United States Patent Application Publication US 2007/0214517 A1 - sequence listing, part 64

SEQ ID NO: 84072 - DNA, 712 bp, Arabidopsis thaliana
  misc_feature (1)..(712): Ceres Seq. ID no. 12673019
  misc_feature: MA Experiment ID: 108434 Result: Up-regulated in Transcription
  misc_feature: MA Experiment 108434 PARAMETER Experiment Name: At_Root_Tips_cDNA_P Parameter: Tissue Value: Root Tips
  misc_feature: MA Experiment ID: 108462 Result: Down-regulated in Transcription
  misc_feature: MA Experiment 108462 PARAMETER Experiment Name: At_Germinating_Seeds_cDNA_P Parameter: Age (day) Value: 2 vs. 0
  misc_feature: MA Experiment 108462 PARAMETER Experiment Name: At_Germinating_Seeds_cDNA_P Parameter: Tissue Value: Germinating Seeds
  misc_feature: MA Experiment ID: 108463 Result: Down-regulated in Transcription
  misc_feature: MA Experiment 108463 PARAMETER Experiment Name: At_Germinating_Seeds_cDNA_P Parameter: Age (day) Value: 3 vs. 0
  misc_feature: MA Experiment 108463 PARAMETER Experiment Name: At_Germinating_Seeds_cDNA_P Parameter: Tissue Value: Germinating Seeds
  misc_feature: MA Experiment ID: 108464 Result: Down-regulated in Transcription
  misc_feature: MA Experiment 108464 PARAMETER Experiment Name: At_Germinating_Seeds_cDNA_P Parameter: Age (day) Value: 4 vs. 0
  misc_feature: MA Experiment 108464 PARAMETER Experiment Name: At_Germinating_Seeds_cDNA_P Parameter: Tissue Value: Germinating Seeds
  misc_feature: MA Experiment ID: 108488 Result: Down-regulated in Transcription
  misc_feature: MA Experiment ID: 108572 Result: Down-regulated in Transcription
  misc_feature: MA Experiment 108572 PARAMETER Experiment Name: At_Drought_cDNA_P Parameter: Timepoint (hr) Value: 1
  misc_feature: MA Experiment 108572 PARAMETER Experiment Name: At_Drought_cDNA_P Parameter: Tissue Value: Aerial
  misc_feature: MA Experiment 108572 PARAMETER Experiment Name: At_Drought_cDNA_P Parameter: Treatment Value: Drought vs. No Drought
  misc_feature: MA Experiment ID: 108577 Result: Down-regulated in Transcription
  misc_feature: MA Experiment 108577 PARAMETER Experiment Name: At_42deg_Heat_cDNA_P Parameter: Temperature (deg C) Value: 42 vs. 22
  misc_feature: MA Experiment 108577 PARAMETER Experiment Name: At_42deg_Heat_cDNA_P Parameter: Timepoint (hr) Value: 6
  misc_feature: MA Experiment 108577 PARAMETER Experiment Name: At_42deg_Heat_cDNA_P Parameter: Tissue Value: Aerial
  misc_feature: MA Experiment ID: 108607 Result: Down-regulated in Transcription
  misc_feature: MA Experiment 108607 PARAMETER Experiment Name: At_100uM_ABA_cDNA_P Parameter: Timepoint (hr) Value: 4
  misc_feature: MA Experiment 108607 PARAMETER Experiment Name: At_100uM_ABA_cDNA_P Parameter: Tissue Value: Aerial
  misc_feature: MA Experiment 108607 PARAMETER Experiment Name: At_100uM_ABA_cDNA_P Parameter: Treatment Value: 100uM ABA vs. No Treatment
  misc_feature: MA Experiment ID: 20000069 Result: Up-regulated in Transcription
  misc_feature: MA Experiment 20000069 PARAMETER Experiment Name: At_100uM_ABA_Mutants_cDNA_P Parameter: Plant Line Value: CS23
  misc_feature: MA Experiment 20000069 PARAMETER Experiment Name: At_100uM_ABA_Mutants_cDNA_P Parameter: Timepoint (hr) Value: 6
  misc_feature: MA Experiment 20000069 PARAMETER Experiment Name: At_100uM_ABA_Mutants_cDNA_P Parameter: Tissue Value: Aerial
  misc_feature: MA Experiment 20000069 PARAMETER Experiment Name: At_100uM_ABA_Mutants_cDNA_P Parameter: Treatment Value: 100uM ABA vs. No Treatment
  misc_feature: MA Experiment ID: 20000070 Result: Up-regulated in Transcription
  misc_feature: MA Experiment 20000070 PARAMETER Experiment Name: At_100uM_ABA_Mutants_cDNA_P Parameter: Plant Line Value: CS24
  misc_feature: MA Experiment 20000070 PARAMETER Experiment Name: At_100uM_ABA_Mutants_cDNA_P Parameter: Timepoint (hr) Value: 6
  misc_feature: MA Experiment 20000070 PARAMETER Experiment Name: At_100uM_ABA_Mutants_cDNA_P Parameter: Tissue Value: Aerial
  misc_feature: MA Experiment 20000070 PARAMETER Experiment Name: At_100uM_ABA_Mutants_cDNA_P Parameter: Treatment Value: 100uM ABA vs. No Treatment
  misc_feature: MA Experiment ID: 20000071 Result: Up-regulated in Transcription
  misc_feature: MA Experiment 20000071 PARAMETER Experiment Name: At_100uM_ABA_Mutants_cDNA_P Parameter: Plant Line Value: CS8104
  misc_feature: MA Experiment 20000071 PARAMETER Experiment Name: At_100uM_ABA_Mutants_cDNA_P Parameter: Timepoint (hr) Value: 6
  misc_feature: MA Experiment 20000071 PARAMETER Experiment Name: At_100uM_ABA_Mutants_cDNA_P Parameter: Tissue Value: Aerial
  misc_feature: MA Experiment 20000071 PARAMETER Experiment Name: At_100uM_ABA_Mutants_cDNA_P Parameter: Treatment Value: 100uM ABA vs. No Treatment
  misc_feature: MA Experiment ID: 20000072 Result: Up-regulated in Transcription
  misc_feature: MA Experiment 20000072 PARAMETER Experiment Name: At_100uM_ABA_Mutants_cDNA_P Parameter: Plant Line Value: CS8105
  misc_feature: MA Experiment 20000072 PARAMETER Experiment Name: At_100uM_ABA_Mutants_cDNA_P Parameter: Timepoint (hr) Value: 6
  misc_feature: MA Experiment 20000072 PARAMETER Experiment Name: At_100uM_ABA_Mutants_cDNA_P Parameter: Tissue Value: Aerial
  misc_feature: MA Experiment 20000072 PARAMETER Experiment Name: At_100uM_ABA_Mutants_cDNA_P Parameter: Treatment Value: 100uM ABA vs. No Treatment
  misc_feature: MA Experiment ID: 20000086 Result: Up-regulated in Transcription
  misc_feature: MA Experiment 20000086 PARAMETER Experiment Name: At_100uM_ABA_Mutants_cDNA_P Parameter: Plant Line Value: CS22
  misc_feature: MA Experiment 20000086 PARAMETER Experiment Name: At_100uM_ABA_Mutants_cDNA_P Parameter: Timepoint (hr) Value: 6
  misc_feature: MA Experiment 20000086 PARAMETER Experiment Name: At_100uM_ABA_Mutants_cDNA_P Parameter: Tissue Value: Aerial
  misc_feature: MA Experiment 20000086 PARAMETER Experiment Name: At_100uM_ABA_Mutants_cDNA_P Parameter: Treatment Value: 100uM ABA vs. No Treatment
  misc_feature: MA Experiment ID: 20000087 Result: Up-regulated in Transcription
  misc_feature: MA Experiment 20000087 PARAMETER Experiment Name: At_100uM_ABA_Mutants_cDNA_P Parameter: Plant Line Value: WS
  misc_feature: MA Experiment 20000087 PARAMETER Experiment Name: At_100uM_ABA_Mutants_cDNA_P Parameter: Timepoint (hr) Value: 6
  misc_feature: MA Experiment 20000087 PARAMETER Experiment Name: At_100uM_ABA_Mutants_cDNA_P Parameter: Tissue Value: Aerial
  misc_feature: MA Experiment 20000087 PARAMETER Experiment Name: At_100uM_ABA_Mutants_cDNA_P Parameter: Treatment Value: 100uM ABA vs. No Treatment
  misc_feature: MA Experiment ID: 20000088 Result: Up-regulated in Transcription
  misc_feature: MA Experiment 20000088 PARAMETER Experiment Name: At_100uM_ABA_Mutants_cDNA_P Parameter: Plant Line Value: Landsberg
  misc_feature: MA Experiment 20000088 PARAMETER Experiment Name: At_100uM_ABA_Mutants_cDNA_P Parameter: Timepoint (hr) Value: 6
  misc_feature: MA Experiment 20000088 PARAMETER Experiment Name: At_100uM_ABA_Mutants_cDNA_P Parameter: Tissue Value: Aerial
  misc_feature: MA Experiment 20000088 PARAMETER Experiment Name: At_100uM_ABA_Mutants_cDNA_P Parameter: Treatment Value: 100uM ABA vs. No Treatment
  misc_feature: MA Experiment ID: 20000089 Result: Up-regulated in Transcription
  misc_feature: MA Experiment ID: 20000090 Result: Up-regulated in Transcription
  misc_feature: MA Experiment ID: 20000111 Result: Down-regulated in Transcription
  misc_feature: MA Experiment 20000111 PARAMETER Experiment Name: At_42deg_Heat_cDNA_P Parameter: Temperature (deg C) Value: 42 vs. 22
  misc_feature: MA Experiment 20000111 PARAMETER Experiment Name: At_42deg_Heat_cDNA_P Parameter: Timepoint (hr) Value: 6
  misc_feature: MA Experiment 20000111 PARAMETER Experiment Name: At_42deg_Heat_cDNA_P Parameter: Tissue Value: Aerial
  misc_feature: MA Experiment ID: 20000117 Result: Up-regulated in Transcription
  misc_feature: MA Experiment 20000117 PARAMETER Experiment Name: At_100uM_ABA_Mutants_cDNA_P Parameter: Plant Line Value: Columbia
  misc_feature: MA Experiment 20000117 PARAMETER Experiment Name: At_100uM_ABA_Mutants_cDNA_P Parameter: Timepoint (hr) Value: 6
  misc_feature: MA Experiment 20000117 PARAMETER Experiment Name: At_100uM_ABA_Mutants_cDNA_P Parameter: Tissue Value: Aerial
  misc_feature: MA Experiment 20000117 PARAMETER Experiment Name: At_100uM_ABA_Mutants_cDNA_P Parameter: Treatment Value: 100uM ABA vs. No Treatment
  misc_feature: MA Experiment ID: 20000213 Result: Up-regulated in Transcription
  misc_feature: MA Experiment 20000213 PARAMETER Experiment Name: At_4deg_Cold_P Parameter: Timepoint (hr) Value: 2
  misc_feature: MA Experiment ID: 20000224 Result: Down-regulated in Transcription
  misc_feature: MA Experiment ID: 20000437 Result: Up-regulated in Transcription
  misc_feature: MA Experiment 20000437 PARAMETER Experiment Name: At_Drought_P Parameter: Age (day) Value: 8
  misc_feature: MA Experiment 20000437 PARAMETER Experiment Name: At_Drought_P Parameter: Organism Value: A. thaliana
  misc_feature: MA Experiment 20000437 PARAMETER Experiment Name: At_Drought_P Parameter: Plant Line Value: WS
  misc_feature: MA Experiment 20000437 PARAMETER Experiment Name: At_Drought_P Parameter: Timepoint (hr) Value: 24
  misc_feature: MA Experiment 20000437 PARAMETER Experiment Name: At_Drought_P Parameter: Tissue Value: Whole Plant
  misc_feature: MA Experiment 20000437 PARAMETER Experiment Name: At_Drought_P Parameter: Treatment Value: Drought vs. No Drought
  misc_feature: MA Experiment ID: 20000438 Result: Down-regulated in Transcription
  misc_feature: MA Experiment 20000438 PARAMETER Experiment Name: At_Shoots__P Parameter: Age (day) Value: 14
  misc_feature: MA Experiment 20000438 PARAMETER Experiment Name: At_Shoots__P Parameter: Tissue Value: Shoots vs. Whole Plant
  misc_feature: MA Experiment ID: 20001451 Result: Up-regulated in Transcription
  misc_feature: MA Experiment 20001451 PARAMETER Experiment Name: At_Far-red-induction_P Parameter: Age (day) Value: 7
  misc_feature: MA Experiment 20001451 PARAMETER Experiment Name: At_Far-red-induction_P Parameter: Light Value: Far-red vs. White
  misc_feature: MA Experiment 20001451 PARAMETER Experiment Name: At_Far-red-induction_P Parameter: Organism Value: A. thaliana
  misc_feature: MA Experiment 20001451 PARAMETER Experiment Name: At_Far-red-induction_P Parameter: Plant Line Value: Columbia
  misc_feature: MA Experiment 20001451 PARAMETER Experiment Name: At_Far-red-induction_P Parameter: Timepoint (hr) Value: 24
  misc_feature: MA Experiment 20001451 PARAMETER Experiment Name: At_Far-red-induction_P Parameter: Tissue Value: Whole Plant
  misc_feature: MA Experiment ID: 20001557 Result: Up-regulated in Transcription
  misc_feature: MA Experiment 20001557 PARAMETER Experiment Name: At_Drought_Soil_Dry_P Parameter: Age (day) Value: 27
  misc_feature: MA Experiment 20001557 PARAMETER Experiment Name: At_Drought_Soil_Dry_P Parameter: Organism Value: A. thaliana
  misc_feature: MA Experiment 20001557 PARAMETER Experiment Name: At_Drought_Soil_Dry_P Parameter: Plant Line Value: WS
  misc_feature: MA Experiment 20001557 PARAMETER Experiment Name: At_Drought_Soil_Dry_P Parameter: Post Timepoint (hr) Value: 3
  misc_feature: MA Experiment 20001557 PARAMETER Experiment Name: At_Drought_Soil_Dry_P Parameter: Post-Treatment Value: Re-Water vs. No Drought
  misc_feature: MA Experiment 20001557 PARAMETER Experiment Name: At_Drought_Soil_Dry_P Parameter: Timepoint (day) Value: 13
  misc_feature: MA Experiment 20001557 PARAMETER Experiment Name: At_Drought_Soil_Dry_P Parameter: Treatment Value: Drought vs. No Drought
acacatctcactgctcactactctcactgtaatcccttagatcttcttttcaaatttcaatggcgtccggtgatgttgagtatcggtgcttcgttggaggtctagcatgggccactgatgacagagctcttgagactgccttcgctcaatacggcgacgttattgattccaagatcattaacgatcgtgagactggaagatcaaggggattcggattcgtcaccttcaaggatgagaaagccatgaaggatgcgattgagggaatgaacggacaagatctcgatggccgtagcatcactgttaacgaggctcagtcacgaggaagcggtggcggcggaggccaccgtggaggtggtggcggcggttactcctcaagaggtggtggtggcggaagctacggtggtggaagacgtgagggaggaggaggatacggtggtggtgaaggaggaggttacggaggaagcggtggtggtggaggatggtaattcctttaattaggtttgggattaccaatgaatgttctctctctcgcttgttatgcttctacttggttttgtgtgttctctattttgttctggttctgctttagatttgatgtaacagttcgtgattaggtattttggtatctggaaacgtaatgttaagtcacttgtcattctctaaataacaaatttcttcggagatattatctctgttgattgattctatcatc

SEQ ID NO: 84073 - protein, 141 aa, Arabidopsis thaliana
  peptide (1)..(141): Ceres Seq. ID no. 12673020
  misc_feature (10)..(81): Pfam Name: RNA recognition motif. (a.k.a. RRM, RBD, or RNP domain) Pfam Description: RNA recognition motif. (a.k.a. RRM, RBD, or RNP
  misc_feature (1)..(141): Homolog of NCBI NO: 30681492 NR Description: glycine-rich RNA-binding protein (AtGRP7)
  misc_feature (1)..(140): Homolog of NCBI NO: 15226605 NR Description: glycine-rich RNA binding protein AtGRP7; protein At2g21660.1, supported by cDNA: 13879., supported by cDNA: supported by cDNA: gi_16226371, supported by cDNA: gi_166836
  misc_feature (1)..(140): Homolog of NCBI NO: 21553354 NR Description: glycine-rich RNA binding protein 7 [Arabidopsis
  misc_feature (1)..(141): Homolog of NCBI NO: 1346180 NR Description: Glycine-rich RNA-binding protein GRP1A
  misc_feature (1)..(141): Homolog of NCBI NO: 1346181 NR Description: Glycine-rich RNA-binding protein GRP2A
  misc_feature (1)..(139): Homolog of NCBI NO: 2267567 NR Description: glycine-rich RNA binding protein 1 [Pelargonium x
  misc_feature (5)..(141): Homolog of NCBI NO: 544426 NR Description: Glycine-rich RNA-binding protein
  misc_feature (5)..(140): Homolog of NCBI NO: 2119044 NR Description: glycine-rich RNA-binding protein RGP-1b - wood
  misc_feature (5)..(140): Homolog of NCBI NO: 2119042 NR Description: glycine-rich RNA-binding protein RGP-1a - wood
  misc_feature (5)..(140): Homolog of NCBI NO: 20152613 NR Description: putative glycine rich protein [Rumex obtusifolius]
MASGDVEYRCFVGGLAWATDDRALETAFAQYGDVIDSKIINDRETGRSRGFGFVTFKDEKAMKDAIEGMNGQDLDGRSITVNEAQSRGSGGGGGHRGGGGGGYSSRGGGGGSYGGGRREGGGGYGGGEGGGYGGSGGGGGW

SEQ ID NO: 84074 - protein, 80 aa, Arabidopsis thaliana
  peptide (1)..(80): Ceres Seq. ID no. 12673021
  misc_feature (15)..(79): Pfam Name: Herpesvirus large structural phosphoprotein UL32 Pfam Description: Herpesvirus large structural phosphoprotein UL32
  misc_feature (1)..(80): Homolog of NCBI NO: 30681492 NR Description: glycine-rich RNA-binding protein (AtGRP7)
  misc_feature (1)..(79): Homolog of NCBI NO: 15226605 NR Description: glycine-rich RNA binding protein AtGRP7; protein At2g21660.1, supported by cDNA: 13879., supported by cDNA: supported by cDNA: gi_16226371, supported by cDNA: gi_166836
  misc_feature (1)..(79): Homolog of NCBI NO: 21553354 NR Description: glycine-rich RNA binding protein 7 [Arabidopsis
  misc_feature (1)..(80): Homolog of NCBI NO: 1346180 NR Description: Glycine-rich RNA-binding protein GRP1A
  misc_feature (1)..(80): Homolog of NCBI NO: 1346181 NR Description: Glycine-rich RNA-binding protein GRP2A
  misc_feature (1)..(78): Homolog of NCBI NO: 2267567 NR Description: glycine-rich RNA binding protein 1 [Pelargonium x
  misc_feature (1)..(80): Homolog of NCBI NO: 544426 NR Description: Glycine-rich RNA-binding protein
  misc_feature (1)..(79): Homolog of NCBI NO: 2119044 NR Description: glycine-rich RNA-binding protein RGP-1b - wood
  misc_feature (1)..(79): Homolog of NCBI NO: 2119042 NR Description: glycine-rich RNA-binding protein RGP-1a - wood
  misc_feature (1)..(79): Homolog of NCBI NO: 20152613 NR Description: putative glycine rich protein [Rumex obtusifolius]
MKDAIEGMNGQDLDGRSITVNEAQSRGSGGGGGHRGGGGGGYSSRGGGGGSYGGGRREGGGGYGGGEGGGYGGSGGGGGW

SEQ ID NO: 84075 - protein, 73 aa, Arabidopsis thaliana
  peptide (1)..(73): Ceres Seq. ID no. 12673022
  misc_feature (8)..(72): Pfam Name: Herpesvirus large structural phosphoprotein UL32 Pfam Description: Herpesvirus large structural phosphoprotein UL32
  misc_feature (1)..(73): Homolog of NCBI NO: 30681492 NR Description: glycine-rich RNA-binding protein (AtGRP7)
  misc_feature (1)..(72): Homolog of NCBI NO: 15226605 NR Description: glycine-rich RNA binding protein AtGRP7; protein At2g21660.1, supported by cDNA: 13879., supported by cDNA: supported by cDNA: gi_16226371, supported by cDNA: gi_166836
  misc_feature (1)..(72): Homolog of NCBI NO: 21553354 NR Description: glycine-rich RNA binding protein 7 [Arabidopsis
  misc_feature (1)..(73): Homolog of NCBI NO: 1346180 NR Description: Glycine-rich RNA-binding protein GRP1A
  misc_feature (1)..(73): Homolog of NCBI NO: 1346181 NR Description: Glycine-rich RNA-binding protein GRP2A
  misc_feature (1)..(71): Homolog of NCBI NO: 2267567 NR Description: glycine-rich RNA binding protein 1 [Pelargonium x
  misc_feature (1)..(73): Homolog of NCBI NO: 544426 NR Description: Glycine-rich RNA-binding protein
  misc_feature (1)..(72): Homolog of NCBI NO: 2119044 NR Description: glycine-rich RNA-binding protein RGP-1b - wood
  misc_feature (1)..(72): Homolog of NCBI NO: 2119042 NR Description: glycine-rich RNA-binding protein RGP-1a - wood
  misc_feature (1)..(72): Homolog of NCBI NO: 20152613 NR Description: putative glycine rich protein [Rumex obtusifolius]
MNGQDLDGRSITVNEAQSRGSGGGGGHRGGGGGGYSSRGGGGGSYGGGRREGGGGYGGGEGGGYGGSGGGGGW

SEQ ID NO: 84076 - DNA, 631 bp, Arabidopsis thaliana
  misc_feature (1)..(631): Ceres Seq. ID no. 12673027
  misc_feature: MA Experiment ID: 108434 Result: Up-regulated in Transcription
  misc_feature: MA Experiment 108434 PARAMETER Experiment Name: At_Root_Tips_cDNA_P Parameter: Tissue Value: Root Tips
  misc_feature: MA Experiment ID: 108462 Result: Down-regulated in Transcription
  misc_feature: MA Experiment 108462 PARAMETER Experiment Name: At_Germinating_Seeds_cDNA_P Parameter: Age (day) Value: 2 vs. 0
  misc_feature: MA Experiment 108462 PARAMETER Experiment Name: At_Germinating_Seeds_cDNA_P Parameter: Tissue Value: Germinating Seeds
  misc_feature: MA Experiment ID: 108463 Result: Down-regulated in Transcription
  misc_feature: MA Experiment 108463 PARAMETER Experiment Name: At_Germinating_Seeds_cDNA_P Parameter: Age (day) Value: 3 vs. 0
  misc_feature: MA Experiment 108463 PARAMETER Experiment Name: At_Germinating_Seeds_cDNA_P Parameter: Tissue Value: Germinating Seeds
  misc_feature: MA Experiment ID: 108464 Result: Down-regulated in Transcription
  misc_feature: MA Experiment 108464 PARAMETER Experiment Name: At_Germinating_Seeds_cDNA_P Parameter: Age (day) Value: 4 vs. 0
  misc_feature: MA Experiment 108464 PARAMETER Experiment Name: At_Germinating_Seeds_cDNA_P Parameter: Tissue Value: Germinating Seeds
  misc_feature: MA Experiment ID: 108488 Result: Down-regulated in Transcription
  misc_feature: MA Experiment ID: 108572 Result: Down-regulated in Transcription
  misc_feature: MA Experiment 108572 PARAMETER Experiment Name: At_Drought_cDNA_P Parameter: Timepoint (hr) Value: 1
  misc_feature: MA Experiment 108572 PARAMETER Experiment Name: At_Drought_cDNA_P Parameter: Tissue Value: Aerial
  misc_feature: MA Experiment 108572 PARAMETER Experiment Name: At_Drought_cDNA_P Parameter: Treatment Value: Drought vs. No Drought
  misc_feature: MA Experiment ID: 108607 Result: Down-regulated in Transcription
  misc_feature: MA Experiment 108607 PARAMETER Experiment Name: At_100uM_ABA_cDNA_P Parameter: Timepoint (hr) Value: 4
  misc_feature: MA Experiment 108607 PARAMETER Experiment Name: At_100uM_ABA_cDNA_P Parameter: Tissue Value: Aerial
  misc_feature: MA Experiment 108607 PARAMETER Experiment Name: At_100uM_ABA_cDNA_P Parameter: Treatment Value: 100uM ABA vs. No Treatment
  misc_feature: MA Experiment ID: 20000070 Result: Up-regulated in Transcription
  misc_feature: MA Experiment 20000070 PARAMETER Experiment Name: At_100uM_ABA_Mutants_cDNA_P Parameter: Plant Line Value: CS24
  misc_feature: MA Experiment 20000070 PARAMETER Experiment Name: At_100uM_ABA_Mutants_cDNA_P Parameter: Timepoint (hr) Value: 6
  misc_feature: MA Experiment 20000070 PARAMETER Experiment Name: At_100uM_ABA_Mutants_cDNA_P Parameter: Tissue Value: Aerial
  misc_feature: MA Experiment 20000070 PARAMETER Experiment Name: At_100uM_ABA_Mutants_cDNA_P Parameter: Treatment Value: 100uM ABA vs. No Treatment
  misc_feature: MA Experiment ID: 20000086 Result: Up-regulated in Transcription
  misc_feature: MA Experiment 20000086 PARAMETER Experiment Name: At_100uM_ABA_Mutants_cDNA_P Parameter: Plant Line Value: CS22
  misc_feature: MA Experiment 20000086 PARAMETER Experiment Name: At_100uM_ABA_Mutants_cDNA_P Parameter: Timepoint (hr) Value: 6
  misc_feature: MA Experiment 20000086 PARAMETER Experiment Name: At_100uM_ABA_Mutants_cDNA_P Parameter: Tissue Value: Aerial
  misc_feature: MA Experiment 20000086 PARAMETER Experiment Name: At_100uM_ABA_Mutants_cDNA_P Parameter: Treatment Value: 100uM ABA vs. No Treatment
  misc_feature: MA Experiment ID: 20000087 Result: Up-regulated in Transcription
  misc_feature: MA Experiment 20000087 PARAMETER Experiment Name: At_100uM_ABA_Mutants_cDNA_P Parameter: Plant Line Value: WS
  misc_feature: MA Experiment 20000087 PARAMETER Experiment Name: At_100uM_ABA_Mutants_cDNA_P Parameter: Timepoint (hr) Value: 6
  misc_feature: MA Experiment 20000087 PARAMETER Experiment Name: At_100uM_ABA_Mutants_cDNA_P Parameter: Tissue Value: Aerial
  misc_feature: MA Experiment 20000087 PARAMETER Experiment Name: At_100uM_ABA_Mutants_cDNA_P Parameter: Treatment Value: 100uM ABA vs. No Treatment
  misc_feature: MA Experiment ID: 20000088 Result: Up-regulated in Transcription
  misc_feature: MA Experiment 20000088 PARAMETER Experiment Name: At_100uM_ABA_Mutants_cDNA_P Parameter: Plant Line Value: Landsberg
  misc_feature: MA Experiment 20000088 PARAMETER Experiment Name: At_100uM_ABA_Mutants_cDNA_P Parameter: Timepoint (hr) Value: 6
  misc_feature: MA Experiment 20000088 PARAMETER Experiment Name: At_100uM_ABA_Mutants_cDNA_P Parameter: Tissue Value: Aerial
  misc_feature: MA Experiment 20000088 PARAMETER Experiment Name: At_100uM_ABA_Mutants_cDNA_P Parameter: Treatment Value: 100uM ABA vs. No Treatment
  misc_feature: MA Experiment ID: 20000090 Result: Up-regulated in Transcription
  misc_feature: MA Experiment ID: 20000213 Result: Up-regulated in Transcription
  misc_feature: MA Experiment 20000213 PARAMETER Experiment Name: At_4deg_Cold_P Parameter: Timepoint (hr) Value: 2
  misc_feature: MA Experiment ID: 20000437 Result: Up-regulated in Transcription
  misc_feature: MA Experiment 20000437 PARAMETER Experiment Name: At_Drought_P Parameter: Age (day) Value: 8
  misc_feature: MA Experiment 20000437 PARAMETER Experiment Name: At_Drought_P Parameter: Organism Value: A. thaliana
  misc_feature: MA Experiment 20000437 PARAMETER Experiment Name: At_Drought_P Parameter: Plant Line Value: WS
  misc_feature: MA Experiment 20000437 PARAMETER Experiment Name: At_Drought_P Parameter: Timepoint (hr) Value: 24
  misc_feature: MA Experiment 20000437 PARAMETER Experiment Name: At_Drought_P Parameter: Tissue Value: Whole Plant
  misc_feature: MA Experiment 20000437 PARAMETER Experiment Name: At_Drought_P Parameter: Treatment Value: Drought vs. No Drought
  misc_feature: MA Experiment ID: 20000438 Result: Down-regulated in Transcription
  misc_feature: MA Experiment 20000438 PARAMETER Experiment Name: At_Shoots__P Parameter: Age (day) Value: 14
  misc_feature: MA Experiment 20000438 PARAMETER Experiment Name: At_Shoots__P Parameter: Tissue Value: Shoots vs. Whole Plant
  misc_feature: MA Experiment ID: 20001451 Result: Up-regulated in Transcription
  misc_feature: MA Experiment 20001451 PARAMETER Experiment Name: At_Far-red-induction_P Parameter: Age (day) Value: 7
  misc_feature: MA Experiment 20001451 PARAMETER Experiment Name: At_Far-red-induction_P Parameter: Light Value: Far-red vs. White
  misc_feature: MA Experiment 20001451 PARAMETER Experiment Name: At_Far-red-induction_P Parameter: Organism Value: A. thaliana
  misc_feature: MA Experiment 20001451 PARAMETER Experiment Name: At_Far-red-induction_P Parameter: Plant Line Value: Columbia
  misc_feature: MA Experiment 20001451 PARAMETER Experiment Name: At_Far-red-induction_P Parameter: Timepoint (hr) Value: 24
  misc_feature: MA Experiment 20001451 PARAMETER Experiment Name: At_Far-red-induction_P Parameter: Tissue Value: Whole Plant
  misc_feature: MA Experiment ID: 20001557 Result: Up-regulated in Transcription
  misc_feature: MA Experiment 20001557 PARAMETER Experiment Name: At_Drought_Soil_Dry_P Parameter: Age (day) Value: 27
  misc_feature: MA Experiment 20001557 PARAMETER Experiment Name: At_Drought_Soil_Dry_P Parameter: Organism Value: A. thaliana
  misc_feature: MA Experiment 20001557 PARAMETER Experiment Name: At_Drought_Soil_Dry_P Parameter: Plant Line Value: WS
  misc_feature: MA Experiment 20001557 PARAMETER Experiment Name: At_Drought_Soil_Dry_P Parameter: Post Timepoint (hr) Value: 3
  misc_feature: MA Experiment 20001557 PARAMETER Experiment Name: At_Drought_Soil_Dry_P Parameter: Post-Treatment Value: Re-Water vs. No Drought
  misc_feature: MA Experiment 20001557 PARAMETER Experiment Name: At_Drought_Soil_Dry_P Parameter: Timepoint (day) Value: 13
  misc_feature: MA Experiment 20001557 PARAMETER Experiment Name: At_Drought_Soil_Dry_P Parameter: Treatment Value: Drought vs. No Drought
ctacacatctcactgctcactactctcactgtaatcccttagatcttcttttcaaatttcaatggcgtccggtgatgttgagtatcggtgcttcgttggaggtctagcatgggccactgatgacagagctcttgagactgccttcgctcaatacggcgacgttattgattccaagatcattaacgatcgtgagactggaagatcaaggggattcggattcgtcaccttcaaggatgagaaagccatgaaggatgcgattgagggaatgaacggacaagatctcgatggccgtagcatcactgttaacgaggctcagtcacgaggaagcggtggtggtggcggaagctacggtggtggaagacgtgagggaggaggaggatacggtggtggtgaaggaggaggttacggaggaagcggtggtggtggaggatggtaattcctttaattaggtttgggattaccaatgaatgttctctctctcgcttgttatgcttctacttggttttgtgtgttctctattttgttctggttctgctttagatttgatgtaacagttcgtgattaggtattttggtatctggaaacgtaatgttaagtcacttgtcattctctaaataacaaatttcttcgg

SEQ ID NO: 84077 - protein, 124 aa, Arabidopsis thaliana
  peptide (1)..(124): Ceres Seq. ID no. 12673028
  misc_feature (10)..(81): Pfam Name: RNA recognition motif. (a.k.a. RRM, RBD, or RNP domain) Pfam Description: RNA recognition motif. (a.k.a. RRM, RBD, or RNP
  misc_feature (1)..(123): Homolog of NCBI NO: 30681492 NR Description: glycine-rich RNA-binding protein (AtGRP7)
  misc_feature (1)..(123): Homolog of NCBI NO: 15226605 NR Description: glycine-rich RNA binding protein AtGRP7; protein At2g21660.1, supported by cDNA: 13879., supported by cDNA: supported by cDNA: gi_16226371, supported by cDNA: gi_166836
  misc_feature (1)..(123): Homolog of NCBI NO: 21553354 NR Description: glycine-rich RNA binding protein 7 [Arabidopsis
  misc_feature (1)..(124): Homolog of NCBI NO: 1346180 NR Description: Glycine-rich RNA-binding protein GRP1A
  misc_feature (1)..(124): Homolog of NCBI NO: 1346181 NR Description: Glycine-rich RNA-binding protein GRP2A
  misc_feature (5)..(124): Homolog of NCBI NO: 2119044 NR Description: glycine-rich RNA-binding protein RGP-1b - wood
  misc_feature (1)..(123): Homolog of NCBI NO: 2267567 NR Description: glycine-rich RNA binding protein 1 [Pelargonium x
  misc_feature (5)..(123): Homolog of NCBI NO: 2226370 NR Description: RNA-binding protein [Nicotiana glutinosa]
  misc_feature (1)..(123): Homolog of NCBI NO: 6911146 NR Description: putative glycine-rich RNA-binding protein 2
  misc_feature (1)..(123): Homolog of NCBI NO: 6911144 NR Description: putative glycine-rich RNA binding protein 3
MASGDVEYRCFVGGLAWATDDRALETAFAQYGDVIDSKIINDRETGRSRGFGFVTFKDEKAMKDAIEGMNGQDLDGRSITVNEAQSRGSGGGGGSYGGGRREGGGGYGGGEGGGYGGSGGGGGW

SEQ ID NO: 84078 - protein, 63 aa, Arabidopsis thaliana
  peptide (1)..(63): Ceres Seq. ID no. 12673029
  misc_feature (1)..(62): Homolog of NCBI NO: 30681492 NR Description: glycine-rich RNA-binding protein (AtGRP7)
  misc_feature (1)..(62): Homolog of NCBI NO: 15226605 NR Description: glycine-rich RNA binding protein AtGRP7; protein At2g21660.1, supported by cDNA: 13879., supported by cDNA: supported by cDNA: gi_16226371, supported by cDNA: gi_166836
  misc_feature (1)..(62): Homolog of NCBI NO: 21553354 NR Description: glycine-rich RNA binding protein 7 [Arabidopsis
  misc_feature (1)..(63): Homolog of NCBI NO: 1346180 NR Description: Glycine-rich RNA-binding protein GRP1A
  misc_feature (1)..(63): Homolog of NCBI NO: 1346181 NR Description: Glycine-rich RNA-binding protein GRP2A
  misc_feature (1)..(63): Homolog of NCBI NO: 2119044 NR Description: glycine-rich RNA-binding protein RGP-1b - wood
  misc_feature (1)..(62): Homolog of NCBI NO: 2267567 NR Description: glycine-rich RNA binding protein 1 [Pelargonium x
  misc_feature (1)..(62): Homolog of NCBI NO: 2226370 NR Description: RNA-binding protein [Nicotiana glutinosa]
  misc_feature (1)..(62): Homolog of NCBI NO: 6911146 NR Description: putative glycine-rich RNA-binding protein 2
  misc_feature (1)..(62): Homolog of NCBI NO: 6911144 NR Description: putative glycine-rich RNA binding protein 3
MKDAIEGMNGQDLDGRSITVNEAQSRGSGGGGGSYGGGRREGGGGYGGGEGGGYGGSGGGGGW

SEQ ID NO: 84079 - DNA, 653 bp, Arabidopsis thaliana
  misc_feature (1)..(653): Ceres Seq. ID no. 12673030
  misc_feature: MA Experiment ID: 108464 Result: Down-regulated in Transcription
  misc_feature: MA Experiment 108464 PARAMETER Experiment Name: At_Germinating_Seeds_cDNA_P Parameter: Age (day) Value: 4 vs. 0
  misc_feature: MA Experiment 108464 PARAMETER Experiment Name: At_Germinating_Seeds_cDNA_P Parameter: Tissue Value: Germinating Seeds
  misc_feature: MA Experiment ID: 108488 Result: Down-regulated in Transcription
  misc_feature: MA Experiment ID: 20000069 Result: Up-regulated in Transcription
  misc_feature: MA Experiment 20000069 PARAMETER Experiment Name: At_100uM_ABA_Mutants_cDNA_P Parameter: Plant Line Value: CS23
  misc_feature: MA Experiment 20000069 PARAMETER Experiment Name: At_100uM_ABA_Mutants_cDNA_P Parameter: Timepoint (hr) Value: 6
  misc_feature: MA Experiment 20000069 PARAMETER Experiment Name: At_100uM_ABA_Mutants_cDNA_P Parameter: Tissue Value: Aerial
  misc_feature: MA Experiment 20000069 PARAMETER Experiment Name: At_100uM_ABA_Mutants_cDNA_P Parameter: Treatment Value: 100uM ABA vs. No Treatment
  misc_feature: MA Experiment ID: 20000070 Result: Up-regulated in Transcription
  misc_feature: MA Experiment 20000070 PARAMETER Experiment Name: At_100uM_ABA_Mutants_cDNA_P Parameter: Plant Line Value: CS24
  misc_feature: MA Experiment 20000070 PARAMETER Experiment Name: At_100uM_ABA_Mutants_cDNA_P Parameter: Timepoint (hr) Value: 6
  misc_feature: MA Experiment 20000070 PARAMETER Experiment Name: At_100uM_ABA_Mutants_cDNA_P Parameter: Tissue Value: Aerial
  misc_feature: MA Experiment 20000070 PARAMETER Experiment Name: At_100uM_ABA_Mutants_cDNA_P Parameter: Treatment Value: 100uM ABA vs. No Treatment
  misc_feature: MA Experiment ID: 20000086 Result: Up-regulated in Transcription
  misc_feature: MA Experiment 20000086 PARAMETER Experiment Name: At_100uM_ABA_Mutants_cDNA_P Parameter: Plant Line Value: CS22
  misc_feature: MA Experiment 20000086 PARAMETER Experiment Name: At_100uM_ABA_Mutants_cDNA_P Parameter: Timepoint (hr) Value: 6
  misc_feature: MA Experiment 20000086 PARAMETER Experiment Name: At_100uM_ABA_Mutants_cDNA_P Parameter: Tissue Value: Aerial
  misc_feature: MA Experiment 20000086 PARAMETER Experiment Name: At_100uM_ABA_Mutants_cDNA_P Parameter: Treatment Value: 100uM ABA vs. No Treatment
  misc_feature: MA Experiment ID: 20000087 Result: Up-regulated in Transcription
  misc_feature: MA Experiment 20000087 PARAMETER Experiment Name: At_100uM_ABA_Mutants_cDNA_P Parameter: Plant Line Value: WS
  misc_feature: MA Experiment 20000087 PARAMETER Experiment Name: At_100uM_ABA_Mutants_cDNA_P Parameter: Timepoint (hr) Value: 6
  misc_feature: MA Experiment 20000087 PARAMETER Experiment Name: At_100uM_ABA_Mutants_cDNA_P Parameter: Tissue Value: Aerial
  misc_feature: MA Experiment 20000087 PARAMETER Experiment Name: At_100uM_ABA_Mutants_cDNA_P Parameter: Treatment Value: 100uM ABA vs. No Treatment
  misc_feature: MA Experiment ID: 20000088 Result: Up-regulated in Transcription
  misc_feature: MA Experiment 20000088 PARAMETER Experiment Name: At_100uM_ABA_Mutants_cDNA_P Parameter: Plant Line Value: Landsberg
  misc_feature: MA Experiment 20000088 PARAMETER Experiment Name: At_100uM_ABA_Mutants_cDNA_P Parameter: Timepoint (hr) Value: 6
  misc_feature: MA Experiment 20000088 PARAMETER Experiment Name: At_100uM_ABA_Mutants_cDNA_P Parameter: Tissue Value: Aerial
  misc_feature: MA Experiment 20000088 PARAMETER Experiment Name: At_100uM_ABA_Mutants_cDNA_P Parameter: Treatment Value: 100uM ABA vs. No Treatment
  misc_feature: MA Experiment ID: 20000117 Result: Up-regulated in Transcription
  misc_feature: MA Experiment 20000117 PARAMETER Experiment Name: At_100uM_ABA_Mutants_cDNA_P Parameter: Plant Line Value: Columbia
  misc_feature: MA Experiment 20000117 PARAMETER Experiment Name: At_100uM_ABA_Mutants_cDNA_P Parameter: Timepoint (hr) Value: 6
  misc_feature: MA Experiment 20000117 PARAMETER Experiment Name: At_100uM_ABA_Mutants_cDNA_P Parameter: Tissue Value: Aerial
  misc_feature: MA Experiment 20000117 PARAMETER Experiment Name: At_100uM_ABA_Mutants_cDNA_P Parameter: Treatment Value: 100uM ABA vs. No Treatment
  misc_feature: MA Experiment ID: 20000213 Result: Up-regulated in Transcription
  misc_feature: MA Experiment 20000213 PARAMETER Experiment Name: At_4deg_Cold_P Parameter: Timepoint (hr) Value: 2
  misc_feature: MA Experiment ID: 20000224 Result: Down-regulated in Transcription
  misc_feature: MA Experiment ID: 20000437 Result: Up-regulated in Transcription
  misc_feature: MA Experiment 20000437 PARAMETER Experiment Name: At_Drought_P Parameter: Age (day) Value: 8
  misc_feature: MA Experiment 20000437 PARAMETER Experiment Name: At_Drought_P Parameter: Organism Value: A. thaliana
  misc_feature: MA Experiment 20000437 PARAMETER Experiment Name: At_Drought_P Parameter: Plant Line Value: WS
  misc_feature: MA Experiment 20000437 PARAMETER Experiment Name: At_Drought_P Parameter: Timepoint (hr) Value: 24
  misc_feature: MA Experiment 20000437 PARAMETER Experiment Name: At_Drought_P Parameter: Tissue Value: Whole Plant
  misc_feature: MA Experiment 20000437 PARAMETER Experiment Name: At_Drought_P Parameter: Treatment Value: Drought vs. No Drought
  misc_feature: MA Experiment ID: 20000438 Result: Down-regulated in Transcription
  misc_feature: MA Experiment 20000438 PARAMETER Experiment Name: At_Shoots__P Parameter: Age (day) Value: 14
  misc_feature: MA Experiment 20000438 PARAMETER Experiment Name: At_Shoots__P Parameter: Tissue Value: Shoots vs. Whole Plant
  misc_feature: MA Experiment ID: 20001451 Result: Up-regulated in Transcription
  misc_feature: MA Experiment 20001451 PARAMETER Experiment Name: At_Far-red-induction_P Parameter: Age (day) Value: 7
  misc_feature: MA Experiment 20001451 PARAMETER Experiment Name: At_Far-red-induction_P Parameter: Light Value: Far-red vs. White
  misc_feature: MA Experiment 20001451 PARAMETER Experiment Name: At_Far-red-induction_P Parameter: Organism Value: A. thaliana
  misc_feature: MA Experiment 20001451 PARAMETER Experiment Name: At_Far-red-induction_P Parameter: Plant Line Value: Columbia
  misc_feature: MA Experiment 20001451 PARAMETER Experiment Name: At_Far-red-induction_P Parameter: Timepoint (hr) Value: 24
  misc_feature: MA Experiment 20001451 PARAMETER Experiment Name: At_Far-red-induction_P Parameter: Tissue Value: Whole Plant
  misc_feature: MA Experiment ID: 20001557 Result: Up-regulated in Transcription
  misc_feature: MA Experiment 20001557 PARAMETER Experiment Name: At_Drought_Soil_Dry_P Parameter: Age (day) Value: 27
  misc_feature: MA Experiment 20001557 PARAMETER Experiment Name: At_Drought_Soil_Dry_P Parameter: Organism Value: A. thaliana
  misc_feature: MA Experiment 20001557 PARAMETER Experiment Name: At_Drought_Soil_Dry_P Parameter: Plant Line Value: WS
  misc_feature: MA Experiment 20001557 PARAMETER Experiment Name: At_Drought_Soil_Dry_P Parameter: Post Timepoint (hr) Value: 3
  misc_feature: MA Experiment 20001557 PARAMETER Experiment Name: At_Drought_Soil_Dry_P Parameter: Post-Treatment Value: Re-Water vs. No Drought
  misc_feature: MA Experiment 20001557 PARAMETER Experiment Name: At_Drought_Soil_Dry_P Parameter: Timepoint (day) Value: 13
  misc_feature: MA Experiment 20001557 PARAMETER Experiment Name: At_Drought_Soil_Dry_P Parameter: Treatment Value: Drought vs. No Drought
acacatctcactgctcactactctcactgtaatcccttagatcttcttttcaaatttcaatggcgtccggtgatgttgagtatcggtgcttcgttggaggtctagcatgggccactgatgacagagctcttgagactgccttcgctcaatacggcgacgttattgattccaagatcattaacgatcgtgagactggaagatcaaggggattcggattcgtcaccttcaaggatgagaaagccatgaaggatgcgattgagggaatgaacggacaagatctcgatggccgtagcatcactgttaacgaggctcagtcacgaggaagcggtggcggcggaggccaccgtggaggtggtggaagacgtgagggaggaggaggatacggtggtggtgaaggaggaggttacggaggaagcggtggtggtggaggatggtaattcctttaattaggtttgggattaccaatgaatgttctctctctcgcttgttatgcttctacttggttttgtgtgttctctattttgttctggttctgctttagatttgatgtaacagttcgtgattaggtattttggtatctggaaacgtaatgttaagtcacttgtcattctctaaataacaaatttcttcggagatattatctctgttgattg

SEQ ID NO: 84080 - protein, 125 aa, Arabidopsis thaliana
  peptide (1)..(125): Ceres Seq. ID no. 12673031
  misc_feature (10)..(81): Pfam Name: RNA recognition motif. (a.k.a. RRM, RBD, or RNP domain) Pfam Description: RNA recognition motif. (a.k.a. RRM, RBD, or RNP
  misc_feature (1)..(124): Homolog of NCBI NO: 30681492 NR Description: glycine-rich RNA-binding protein (AtGRP7)
  misc_feature (1)..(124): Homolog of NCBI NO: 15226605 NR Description: glycine-rich RNA binding protein AtGRP7; protein At2g21660.1, supported by cDNA: 13879., supported by cDNA: supported by cDNA: gi_16226371, supported by cDNA: gi_166836
  misc_feature (1)..(124): Homolog of NCBI NO: 21553354 NR Description: glycine-rich RNA binding protein 7 [Arabidopsis
  misc_feature (1)..(125): Homolog of NCBI NO: 1346180 NR Description: Glycine-rich RNA-binding protein GRP1A
  misc_feature (1)..(125): Homolog of NCBI NO: 1346181 NR Description: Glycine-rich RNA-binding protein GRP2A
  misc_feature (1)..(124): Homolog of NCBI NO: 2267567 NR Description: glycine-rich RNA binding protein 1 [Pelargonium x
  misc_feature (5)..(125): Homolog of NCBI NO: 544426 NR Description: Glycine-rich RNA-binding protein
  misc_feature (5)..(125): Homolog of NCBI NO: 30692254 NR Description: glycine-rich RNA-binding protein 8 (GRP8) (CCR1)
  misc_feature (5)..(125): Homolog of NCBI NO: 2119044 NR Description: glycine-rich RNA-binding protein RGP-1b - wood
  misc_feature (1)..(125): Homolog of NCBI NO: 7439987 NR Description: glycine-rich RNA-binding protein - rice
MASGDVEYRCFVGGLAWATDDRALETAFAQYGDVIDSKIINDRETGRSRGFGFVTFKDEKAMKDAIEGMNGQDLDGRSITVNEAQSRGSGGGGGHRGGGGRREGGGGYGGGEGGGYGGSGGGGGW

SEQ ID NO: 84081 - protein, 64 aa, Arabidopsis thaliana
  peptide (1)..(64): Ceres Seq. ID no. 12673032
  misc_feature (1)..(63): Homolog of NCBI NO: 30681492 NR Description: glycine-rich RNA-binding protein (AtGRP7)
  misc_feature (1)..(63): Homolog of NCBI NO: 15226605 NR Description: glycine-rich RNA binding protein AtGRP7; protein At2g21660.1, supported by cDNA: 13879., supported by cDNA: supported by cDNA: gi_16226371, supported by cDNA: gi_166836
  misc_feature (1)..(63): Homolog of NCBI NO: 21553354 NR Description: glycine-rich RNA binding protein 7 [Arabidopsis
  misc_feature (1)..(64): Homolog of NCBI NO: 1346180 NR Description: Glycine-rich RNA-binding protein GRP1A
  misc_feature (1)..(64): Homolog of NCBI NO: 1346181 NR Description: Glycine-rich RNA-binding protein GRP2A
  misc_feature (1)..(63): Homolog of NCBI NO: 2267567 NR Description: glycine-rich RNA binding protein 1 [Pelargonium x
  misc_feature (1)..(64): Homolog of NCBI NO: 544426 NR Description: Glycine-rich RNA-binding protein
  misc_feature (1)..(64): Homolog of NCBI NO: 30692254 NR Description: glycine-rich RNA-binding protein 8 (GRP8) (CCR1)
  misc_feature (1)..(64): Homolog of NCBI NO: 2119044 NR Description: glycine-rich RNA-binding protein RGP-1b - wood
  misc_feature (1)..(64): Homolog of NCBI NO: 7439987 NR Description: glycine-rich RNA-binding protein - rice
MKDAIEGMNGQDLDGRSITVNEAQSRGSGGGGGHRGGGGRREGGGGYGGGEGGGYGGSGGGGGW

SEQ ID NO: 84082 - DNA, 559 bp, Arabidopsis thaliana
  misc_feature (1)..(559): Ceres Seq. ID no. 12673033
  misc_feature: MA Experiment ID: 108434 Result: Up-regulated in Transcription
  misc_feature: MA Experiment 108434 PARAMETER Experiment Name: At_Root_Tips_cDNA_P Parameter: Tissue Value: Root Tips
  misc_feature: MA Experiment ID: 108462 Result: Down-regulated in Transcription
  misc_feature: MA Experiment 108462 PARAMETER Experiment Name: At_Germinating_Seeds_cDNA_P Parameter: Age (day) Value: 2 vs. 0
  misc_feature: MA Experiment 108462 PARAMETER Experiment Name: At_Germinating_Seeds_cDNA_P Parameter: Tissue Value: Germinating Seeds
  misc_feature: MA Experiment ID: 108463 Result: Down-regulated in Transcription
  misc_feature: MA Experiment 108463 PARAMETER Experiment Name: At_Germinating_Seeds_cDNA_P Parameter: Age (day) Value: 3 vs. 0
  misc_feature: MA Experiment 108463 PARAMETER Experiment Name: At_Germinating_Seeds_cDNA_P Parameter: Tissue Value: Germinating Seeds
  misc_feature: MA Experiment ID: 108464 Result: Down-regulated in Transcription
  misc_feature: MA Experiment 108464 PARAMETER Experiment Name: At_Germinating_Seeds_cDNA_P Parameter: Age (day) Value: 4 vs. 0
  misc_feature: MA Experiment 108464 PARAMETER Experiment Name: At_Germinating_Seeds_cDNA_P Parameter: Tissue Value: Germinating Seeds
  misc_feature: MA Experiment ID: 108488 Result: Down-regulated in Transcription
  misc_feature: MA Experiment ID: 108572 Result: Down-regulated in Transcription
  misc_feature: MA Experiment 108572 PARAMETER Experiment Name: At_Drought_cDNA_P Parameter: Timepoint (hr) Value: 1
  misc_feature: MA Experiment 108572 PARAMETER Experiment Name: At_Drought_cDNA_P Parameter: Tissue Value: Aerial
  misc_feature: MA Experiment 108572 PARAMETER Experiment Name: At_Drought_cDNA_P Parameter: Treatment Value: Drought vs. No Drought
  misc_feature: MA Experiment ID: 108577 Result: Down-regulated in Transcription
  misc_feature: MA Experiment 108577 PARAMETER Experiment Name: At_42deg_Heat_cDNA_P Parameter: Temperature (deg C) Value: 42 vs. 22
  misc_feature: MA Experiment 108577 PARAMETER Experiment Name: At_42deg_Heat_cDNA_P Parameter: Timepoint (hr) Value: 6
  misc_feature: MA Experiment 108577 PARAMETER Experiment Name: At_42deg_Heat_cDNA_P Parameter: Tissue Value: Aerial
  misc_feature: MA Experiment ID: 108607 Result: Down-regulated in Transcription
  misc_feature: MA Experiment 108607 PARAMETER Experiment Name: At_100uM_ABA_cDNA_P Parameter: Timepoint (hr) Value: 4
  misc_feature: MA Experiment 108607 PARAMETER Experiment Name: At_100uM_ABA_cDNA_P Parameter: Tissue Value: Aerial
  misc_feature: MA Experiment 108607 PARAMETER Experiment Name: At_100uM_ABA_cDNA_P Parameter: Treatment Value: 100uM ABA vs. No Treatment
  misc_feature: MA Experiment ID: 20000069 Result: Up-regulated in Transcription
  misc_feature: MA Experiment 20000069 PARAMETER Experiment Name: At_100uM_ABA_Mutants_cDNA_P Parameter: Plant Line Value: CS23
  misc_feature: MA Experiment 20000069 PARAMETER Experiment Name: At_100uM_ABA_Mutants_cDNA_P Parameter: Timepoint (hr) Value: 6
  misc_feature: MA Experiment 20000069 PARAMETER Experiment Name: At_100uM_ABA_Mutants_cDNA_P Parameter: Tissue Value: Aerial
  misc_feature: MA Experiment 20000069 PARAMETER Experiment Name: At_100uM_ABA_Mutants_cDNA_P Parameter: Treatment Value: 100uM ABA vs. No Treatment
  misc_feature: MA Experiment ID: 20000070 Result: Up-regulated in Transcription
  misc_feature: MA Experiment 20000070 PARAMETER Experiment Name: At_100uM_ABA_Mutants_cDNA_P Parameter: Plant Line Value: CS24
  misc_feature: MA Experiment 20000070 PARAMETER Experiment Name: At_100uM_ABA_Mutants_cDNA_P Parameter: Timepoint (hr) Value: 6
  misc_feature: MA Experiment 20000070 PARAMETER Experiment Name: At_100uM_ABA_Mutants_cDNA_P Parameter: Tissue Value: Aerial
  misc_feature: MA Experiment 20000070 PARAMETER Experiment Name: At_100uM_ABA_Mutants_cDNA_P Parameter: Treatment Value: 100uM ABA vs. No Treatment
  misc_feature: MA Experiment ID: 20000071 Result: Up-regulated in Transcription
  misc_feature: MA Experiment 20000071 PARAMETER Experiment Name: At_100uM_ABA_Mutants_cDNA_P Parameter: Plant Line Value: CS8104
  misc_feature: MA Experiment 20000071 PARAMETER Experiment Name: At_100uM_ABA_Mutants_cDNA_P Parameter: Timepoint (hr) Value: 6
  misc_feature: MA Experiment 20000071 PARAMETER Experiment Name: At_100uM_ABA_Mutants_cDNA_P Parameter: Tissue Value: Aerial
  misc_feature: MA Experiment 20000071 PARAMETER Experiment Name: At_100uM_ABA_Mutants_cDNA_P Parameter: Treatment Value: 100uM ABA vs. No Treatment
  misc_feature: MA Experiment ID: 20000072 Result: Up-regulated in Transcription
  misc_feature: MA Experiment 20000072 PARAMETER Experiment Name: At_100uM_ABA_Mutants_cDNA_P Parameter: Plant Line Value: CS8105
  misc_feature: MA Experiment 20000072 PARAMETER Experiment Name: At_100uM_ABA_Mutants_cDNA_P Parameter: Timepoint (hr) Value: 6
  misc_feature: MA Experiment 20000072 PARAMETER Experiment Name: At_100uM_ABA_Mutants_cDNA_P Parameter: Tissue Value: Aerial
  misc_feature: MA Experiment 20000072 PARAMETER Experiment Name: At_100uM_ABA_Mutants_cDNA_P Parameter: Treatment Value: 100uM ABA vs. No Treatment
  misc_feature: MA Experiment ID: 20000086 Result: Up-regulated in Transcription
  misc_feature: MA Experiment 20000086 PARAMETER Experiment Name: At_100uM_ABA_Mutants_cDNA_P Parameter: Plant Line Value: CS22
  misc_feature: MA Experiment 20000086 PARAMETER Experiment Name: At_100uM_ABA_Mutants_cDNA_P Parameter: Timepoint (hr) Value: 6
  misc_feature: MA Experiment 20000086 PARAMETER Experiment Name: At_100uM_ABA_Mutants_cDNA_P Parameter: Tissue Value: Aerial
  misc_feature: MA Experiment 20000086 PARAMETER Experiment Name: At_100uM_ABA_Mutants_cDNA_P Parameter: Treatment Value: 100uM ABA vs. No Treatment
  misc_feature: MA Experiment ID: 20000087 Result: Up-regulated in Transcription
  misc_feature: MA Experiment 20000087 PARAMETER Experiment Name: At_100uM_ABA_Mutants_cDNA_P Parameter: Plant Line Value: WS
  misc_feature: MA Experiment 20000087 PARAMETER Experiment Name: At_100uM_ABA_Mutants_cDNA_P Parameter: Timepoint (hr) Value: 6
  misc_feature: MA Experiment 20000087 PARAMETER Experiment Name: At_100uM_ABA_Mutants_cDNA_P Parameter: Tissue Value: Aerial
  misc_feature: MA Experiment 20000087 PARAMETER Experiment Name: At_100uM_ABA_Mutants_cDNA_P Parameter: Treatment Value: 100uM ABA vs. No Treatment
  misc_feature: MA Experiment ID: 20000088 Result: Up-regulated in Transcription
  misc_feature: MA Experiment 20000088 PARAMETER Experiment Name: At_100uM_ABA_Mutants_cDNA_P Parameter: Plant Line Value: Landsberg
  misc_feature: MA Experiment 20000088 PARAMETER Experiment Name: At_100uM_ABA_Mutants_cDNA_P Parameter: Timepoint (hr) Value: 6
  misc_feature: MA Experiment 20000088 PARAMETER Experiment Name: At_100uM_ABA_Mutants_cDNA_P Parameter: Tissue Value: Aerial
  misc_feature: MA Experiment 20000088 PARAMETER Experiment Name: At_100uM_ABA_Mutants_cDNA_P Parameter: Treatment Value: 100uM ABA vs. No Treatment
  misc_feature: MA Experiment ID: 20000089 Result: Up-regulated in Transcription
  misc_feature: MA Experiment ID: 20000090 Result: Up-regulated in Transcription
  misc_feature: MA Experiment ID: 20000111 Result: Down-regulated in Transcription
  misc_feature: MA Experiment 20000111 PARAMETER Experiment Name: At_42deg_Heat_cDNA_P Parameter: Temperature (deg C) Value: 42 vs. 22
  misc_feature: MA Experiment 20000111 PARAMETER Experiment Name: At_42deg_Heat_cDNA_P Parameter: Timepoint (hr) Value: 6
  misc_feature: MA Experiment 20000111 PARAMETER Experiment Name: At_42deg_Heat_cDNA_P Parameter: Tissue Value: Aerial
  misc_feature: MA Experiment ID: 20000117 Result: Up-regulated in Transcription
  misc_feature: MA Experiment 20000117 PARAMETER Experiment Name: At_100uM_ABA_Mutants_cDNA_P Parameter: Plant Line Value: Columbia
  misc_feature: MA Experiment 20000117 PARAMETER Experiment Name: At_100uM_ABA_Mutants_cDNA_P Parameter: Timepoint (hr) Value: 6
  misc_feature: MA Experiment 20000117 PARAMETER Experiment Name: At_100uM_ABA_Mutants_cDNA_P Parameter: Tissue Value: Aerial
  misc_feature: MA Experiment 20000117 PARAMETER Experiment Name: At_100uM_ABA_Mutants_cDNA_P Parameter: Treatment Value: 100uM ABA vs. No Treatment
  misc_feature: MA Experiment ID: 20000213 Result: Up-regulated in Transcription
  misc_feature: MA Experiment 20000213 PARAMETER Experiment Name: At_4deg_Cold_P Parameter: Timepoint (hr) Value: 2
  misc_feature: MA Experiment ID: 20000224 Result: Down-regulated in Transcription
  misc_feature: MA Experiment ID: 20000437 Result: Up-regulated in Transcription
  misc_feature: MA Experiment 20000437 PARAMETER Experiment Name: At_Drought_P Parameter: Age (day) Value: 8
  misc_feature: MA Experiment 20000437 PARAMETER Experiment Name: At_Drought_P Parameter: Organism Value: A. thaliana
  misc_feature: MA Experiment 20000437 PARAMETER Experiment Name: At_Drought_P Parameter: Plant Line Value: WS
  misc_feature: MA Experiment 20000437 PARAMETER Experiment Name: At_Drought_P Parameter: Timepoint (hr) Value: 24
  misc_feature: MA Experiment 20000437 PARAMETER Experiment Name: At_Drought_P Parameter: Tissue Value: Whole Plant
  misc_feature: MA Experiment 20000437 PARAMETER Experiment Name: At_Drought_P Parameter: Treatment Value: Drought vs. No Drought
  misc_feature: MA Experiment ID: 20000438 Result: Down-regulated in Transcription
  misc_feature: MA Experiment 20000438 PARAMETER Experiment Name: At_Shoots__P Parameter: Age (day) Value: 14
  misc_feature: MA Experiment 20000438 PARAMETER Experiment Name: At_Shoots__P Parameter: Tissue Value: Shoots vs. Whole Plant
  misc_feature: MA Experiment ID: 20001451 Result: Up-regulated in Transcription
  misc_feature: MA Experiment 20001451 PARAMETER Experiment Name: At_Far-red-induction_P Parameter: Age (day) Value: 7
  misc_feature: MA Experiment 20001451 PARAMETER Experiment Name: At_Far-red-induction_P Parameter: Light Value: Far-red vs. White
  misc_feature: MA Experiment 20001451 PARAMETER Experiment Name: At_Far-red-induction_P Parameter: Organism Value: A. thaliana
  misc_feature: MA Experiment 20001451 PARAMETER Experiment Name: At_Far-red-induction_P Parameter: Plant Line Value: Columbia
  misc_feature: MA Experiment 20001451 PARAMETER Experiment Name: At_Far-red-induction_P Parameter: Timepoint (hr) Value: 24
  misc_feature: MA Experiment 20001451 PARAMETER Experiment Name: At_Far-red-induction_P Parameter: Tissue Value: Whole Plant
  misc_feature: MA Experiment ID: 20001557 Result: Up-regulated in Transcription
  misc_feature: MA Experiment 20001557 PARAMETER Experiment Name: At_Drought_Soil_Dry_P Parameter: Age (day) Value: 27
  misc_feature: MA Experiment 20001557 PARAMETER Experiment Name: At_Drought_Soil_Dry_P Parameter: Organism Value: A. thaliana
  misc_feature: MA Experiment 20001557 PARAMETER Experiment Name: At_Drought_Soil_Dry_P Parameter: Plant Line Value: WS
  misc_feature: MA Experiment 20001557 PARAMETER Experiment Name: At_Drought_Soil_Dry_P Parameter: Post Timepoint (hr) Value: 3
  misc_feature: MA Experiment 20001557 PARAMETER Experiment Name: At_Drought_Soil_Dry_P Parameter: Post-Treatment Value: Re-Water vs. No Drought
  misc_feature: MA Experiment 20001557 PARAMETER Experiment Name: At_Drought_Soil_Dry_P Parameter: Timepoint (day) Value: 13
  misc_feature: MA Experiment 20001557 PARAMETER Experiment Name: At_Drought_Soil_Dry_P Parameter: Treatment Value: Drought vs. No Drought
acacatctcactgctcactactctcactgtaatcccttagatcttcttttcaaatttcaatggcgtccggtgatgttgagtatcggtgcttcgttggaggtctagcatgggccactgatgacagagctcttgagactgccttcgctcaatacggcgacgttattgattccaagatcattaacgatcgtgagactggaagatcaaggggattcggattcgtcaccttcaaggatgagaaagccatgaaggatgcgattgagggaatgaacggacaagatctcgatggccgtagcatcactgttaacgaggctcagtcacgaggaagcggtggcggcggaggccaccgtggaggtggtggcggtggataccgcagcgcggtggtggtggaggatggtaattcctttaattaggtttgggattaccaatgaatgttctctctctcgcttgttatgcttctacttggttttgtgtgttctctattttgttctggttctgctttagatttgatgtaacagttcgtgattaggtattttggtatctggaaacgtaatgttaagtc

SEQ ID NO: 84083 - protein, 116 aa, Arabidopsis thaliana
  peptide (1)..(116): Ceres Seq. ID no. 12673034
  misc_feature (10)..(81): Pfam Name: RNA recognition motif. (a.k.a. RRM, RBD, or RNP domain) Pfam Description: RNA recognition motif. (a.k.a. RRM, RBD, or RNP
  misc_feature (1)..(105): Homolog of NCBI NO: 15226605 NR Description: glycine-rich RNA binding protein AtGRP7; protein At2g21660.1, supported by cDNA: 13879., supported by cDNA: supported by cDNA: gi_16226371, supported by cDNA: gi_166836
  misc_feature (1)..(105): Homolog of NCBI NO: 21553354 NR Description: glycine-rich RNA binding protein 7 [Arabidopsis
  misc_feature (1)..(102): Homolog of NCBI NO: 30681492 NR Description: glycine-rich RNA-binding protein (AtGRP7)
  misc_feature (1)..(105): Homolog of NCBI NO: 1346180 NR Description: Glycine-rich RNA-binding protein GRP1A
  misc_feature (1)..(104): Homolog of NCBI NO: 1346181 NR Description: Glycine-rich RNA-binding protein GRP2A
  misc_feature (1)..(103): Homolog of NCBI NO: 2267567 NR Description: glycine-rich RNA binding protein 1 [Pelargonium x
  misc_feature (5)..(103): Homolog of NCBI NO: 544426 NR Description: Glycine-rich RNA-binding protein
  misc_feature (5)..(103): Homolog of NCBI NO: 20152613 NR Description: putative glycine rich protein [Rumex obtusifolius]
  misc_feature (1)..(103): Homolog of NCBI NO: 18076086 NR Description: glycine-rich RNA-binding protein [Ricinus
  misc_feature (5)..(105): Homolog of NCBI NO: 15235002 NR Description: glycine-rich RNA-binding protein 8 (GRP8); id: At4g39260.1, supported by cDNA: gi_166838 [Arabidopsis
MASGDVEYRCFVGGLAWATDDRALETAFAQYGDVIDSKIINDRETGRSRGFGFVTFKDEKAMKDAIEGMNGQDLDGRSITVNEAQSRGSGGGGGHRGGGGGGYRSAVVVEDGNSFN

SEQ ID NO: 84084 - protein, 72 aa, Arabidopsis thaliana
  peptide (1)..(72): Ceres Seq. ID no. 12673035
MAVASLLTRLSHEEAVAAEATVEVVAVDTAARWWWRMVIPLIRFGITNECSLSRLLCFYLVLCVLYFVLVLL

SEQ ID NO: 84085 - DNA, 1139 bp, Arabidopsis thaliana
  misc_feature (1)..(1139): Ceres Seq. ID no. 12673054
  misc_feature: MA Experiment ID: 20000355 Result: Down-regulated in Transcription
  misc_feature: MA Experiment 20000355 PARAMETER Experiment Name: At_Siliques_Sub_P Parameter: Age (day) Value: 21
  misc_feature: MA Experiment 20000355 PARAMETER Experiment Name: At_Siliques_Sub_P Parameter: Organism Value: A. thaliana
  misc_feature: MA Experiment 20000355 PARAMETER Experiment Name: At_Siliques_Sub_P Parameter: Plant Line Value: WS
  misc_feature: MA Experiment 20000355 PARAMETER Experiment Name: At_Siliques_Sub_P Parameter: Tissue Value: Less Than 5mm Siliques vs. Whole Plant
aggcatatttttttcatttcgactcagatgggttttgatgatacatgcaacacaggtcttgttcttggattaggtccctcaccaattccaaataattacaatagtaccatcagacaatcctccgtttacaagctcgagccgtcgttgactctatgcctctcgggcgatccctcggttaccgtggtgaccggagctgaccagctatgccgtcagacgtcatctcacagcggagtctcttctttctcaagcgggagggtggtgaaaagagagagagacggtggcgaagagtcgccggaggaggaagagatgacggagagagttataagtgattaccatgaagatgaagaaggtattagtgctagaaaaaaacttaggcttacgaaacaacaatctgctcttcttgaggaaagcttcaaggatcatagcacccttaatcccgtaactacatatccttaatcctaattcttttttattatacgttactaatcacttttgataattcttatccaatcagattctttgttgttatattttatttacagaaacaaaagcaagttctggctagacagctgaatctaaggcctagacaagttgaagtatggtttcaaaatagaagagccaggtaaaaaaaattatattataaattatcagaatatttgattttttcatgtgtcaaaatttctttaatagtcagaaaattttgtaggtgaaaatattttctattttttaggtgatatgatttttctttcggttatatatatttaattatttattttatttaatgaatgagcaggacaaagctgaagcaaacagaagtagattgtgagtttttgaagaagtgttgtgaaacattagcagatgagaacataagacttcagaaagagattcaagaactcaaaaccctaaaattgactcagcccttttacatgcacatgcctgcatcgactctaacgaagtgtccttcttgtgagagaatcggcggcggcggcgggggtaatggaggaggaggtggcggcagcggggctaccgcggtgattgtagatggaagtacggccaaaggagctttctctatctcctcaaagcctcacttcttcaacccttttactaacccatctgcagcttgttgaatagttaattcg

SEQ ID NO: 84086 - protein, 151 aa, Arabidopsis thaliana
  peptide (1)..(151): Ceres Seq. ID no. 12673055
  misc_feature (10)..(146): Homolog of NCBI NO: 15227754 NR Description: homeobox-leucine zipper protein HAT9 (HD-Zip
  misc_feature (10)..(146): Homolog of NCBI NO: 25386242 NR Description: homeobox protein HAT9 [imported] - Arabidopsis >gi|549892|gb|AAA56907.1| homeobox protein
  misc_feature (10)..(146): Homolog of NCBI NO: 25386244 NR Description: homeobox protein HAT9 [imported] - Arabidopsis
  misc_feature (10)..(146): Homolog of NCBI NO: 15235712 NR Description: homeobox protein HAT22; protein id: At4g37790.1, by cDNA: 36691., supported by cDNA: gi_527628 [Arabidopsis
  misc_feature (45)..(146): Homolog of NCBI NO: 27311238 NR Description: Hypothetical protein [Oryza sativa (japonica group)] >gi|27356671|gb|AAO06960.1| Hypothetical protein [Oryza
  misc_feature (80)..(145): Homolog of NCBI NO: 3868833 NR Description: CRHB3 [Ceratopteris richardii]
  misc_feature (76)..(146): Homolog of NCBI NO: 3868847 NR Description: CRHB10 [Ceratopteris richardii]
  misc_feature (86)..(146): Homolog of NCBI NO: 37530370 NR Description: putative homeobox protein HAT22 [Oryza sativa
  misc_feature (103)..(146): Homolog of NCBI NO: 7415620 NR Description: homeobox protein PpHB4 [Physcomitrella patens]
  misc_feature (16)..(146): Homolog of NCBI NO: 7446246 NR Description: homeobox leucine zipper protein Hb-2,
RHIFFISTQMGFDDTCNTGLVLGLGPSPIPNNYNSTIRQSSVYKLEPSLTLCLSGDPSVTVVTGADQLCRQTSSHSGVSSFSSGRVVKRERDGGEESPEEEEMTERVISDYHEDEEGISARKKLRLTKQQSALLEESFKDHSTLNPVTTYP

SEQ ID NO: 84087 - protein, 142 aa, Arabidopsis thaliana
  peptide (1)..(142): Ceres Seq. ID no. 12673056
  misc_feature (1)..(137): Homolog of NCBI NO: 15227754 NR Description: homeobox-leucine zipper protein HAT9 (HD-Zip
  misc_feature (1)..(137): Homolog of NCBI NO: 25386242 NR Description: homeobox protein HAT9 [imported] - Arabidopsis >gi|549892|gb|AAA56907.1| homeobox protein
  misc_feature (1)..(137): Homolog of NCBI NO: 25386244 NR Description: homeobox protein HAT9 [imported] - Arabidopsis
  misc_feature (1)..(137): Homolog of NCBI NO: 15235712 NR Description: homeobox protein HAT22; protein id: At4g37790.1, by cDNA: 36691., supported by cDNA: gi_527628 [Arabidopsis
  misc_feature (36)..(137): Homolog of NCBI NO: 27311238 NR Description: Hypothetical protein [Oryza sativa (japonica group)] >gi|27356671|gb|AAO06960.1| Hypothetical protein [Oryza
  misc_feature (71)..(136): Homolog of NCBI NO: 3868833 NR Description: CRHB3 [Ceratopteris richardii]
  misc_feature (67)..(137): Homolog of NCBI NO: 3868847 NR Description: CRHB10 [Ceratopteris richardii]
  misc_feature (77)..(137): Homolog of NCBI NO: 37530370 NR Description: putative homeobox protein HAT22 [Oryza sativa
  misc_feature (94)..(137): Homolog of NCBI NO: 7415620 NR Description: homeobox protein PpHB4 [Physcomitrella patens]
  misc_feature (7)..(137): Homolog of NCBI NO: 7446246 NR Description: homeobox leucine zipper protein Hb-2,
MGFDDTCNTGLVLGLGPSPIPNNYNSTIRQSSVYKLEPSLTLCLSGDPSVTVVTGADQLCRQTSSHSGVSSFSSGRVVKRERDGGEESPEEEEMTERVISDYHEDEEGISARKKLRLTKQQSALLEESFKDHSTLNPVTTYP

SEQ ID NO: 84088 - protein, 113 aa, Arabidopsis thaliana
  peptide (1)..(113): Ceres Seq. ID no. 12673057
  misc_feature (7)..(51): Pfam Name: Homeobox associated leucine zipper Pfam Description: Homeobox associated leucine zipper
  misc_feature (2)..(113): Homolog of NCBI NO: 15227754 NR Description: homeobox-leucine zipper protein HAT9 (HD-Zip
  misc_feature (2)..(113): Homolog of NCBI NO: 25386242 NR Description: homeobox protein HAT9 [imported] - Arabidopsis >gi|549892|gb|AAA56907.1| homeobox protein
  misc_feature (2)..(113): Homolog of NCBI NO: 25386244 NR Description: homeobox protein HAT9 [imported] - Arabidopsis
  misc_feature (2)..(113): Homolog of NCBI NO: 15235712 NR Description: homeobox protein HAT22; protein id: At4g37790.1, by cDNA: 36691., supported by cDNA: gi_527628 [Arabidopsis
  misc_feature (2)..(113): Homolog of NCBI NO: 27311238 NR Description: Hypothetical protein [Oryza sativa (japonica group)] >gi|27356671|gb|AAO06960.1| Hypothetical protein [Oryza
  misc_feature (2)..(64): Homolog of NCBI NO: 3868833 NR Description: CRHB3 [Ceratopteris richardii]
  misc_feature (2)..(64): Homolog of NCBI NO: 3868847 NR Description: CRHB10 [Ceratopteris richardii]
  misc_feature (2)..(113): Homolog of NCBI NO: 37530370 NR Description: putative homeobox protein HAT22 [Oryza sativa
  misc_feature (2)..(64): Homolog of NCBI NO: 7415620 NR Description: homeobox protein PpHB4 [Physcomitrella patens]
  misc_feature (2)..(73): Homolog of NCBI NO: 7446246 NR Description: homeobox leucine zipper protein Hb-2,
MSRTKLKQTEVDCEFLKKCCETLADENIRLQKEIQELKTLKLTQPFYMHMPASTLTKCPSCERIGGGGGGNGGGGGGSGATAVIVDGSTAKGAFSISSKPHFFNPFTNPSAAC

SEQ ID NO: 84089 - DNA, 573 bp, Arabidopsis thaliana
  misc_feature (1)..(573): Ceres Seq. ID no. 12673079
  misc_feature: MA Experiment ID: 108434 Result: Down-regulated in Transcription
  misc_feature: MA Experiment 108434 PARAMETER Experiment Name: At_Root_Tips_cDNA_P Parameter: Tissue Value: Root Tips
  misc_feature: MA Experiment ID: 108435 Result: Up-regulated in Transcription
  misc_feature: MA Experiment 108435 PARAMETER Experiment Name: At_stm_Mutants_cDNA_P Parameter: Plant Line Value: wt Landsburg vs stm
  misc_feature: MA Experiment 108435 PARAMETER Experiment Name: At_stm_Mutants_cDNA_P Parameter: Tissue Value: Shoot Apical Meristem Region
  misc_feature: MA Experiment ID: 108594 Result: Down-regulated in Transcription
  misc_feature: MA Experiment 108594 PARAMETER Experiment Name: At_Ler-rhl_Root_cDNA_P Parameter: Plant Line Value: null
  misc_feature: MA Experiment ID: 108609 Result: Up-regulated in Transcription
  misc_feature: MA Experiment 108609 PARAMETER Experiment Name: At_100uM_ABA_cDNA_P Parameter: Timepoint (hr) Value: 24
  misc_feature: MA Experiment 108609 PARAMETER Experiment Name: At_100uM_ABA_cDNA_P Parameter: Tissue Value: Aerial
  misc_feature: MA Experiment 108609 PARAMETER Experiment Name: At_100uM_ABA_cDNA_P Parameter: Treatment Value: 100uM ABA vs. No Treatment
  misc_feature: MA Experiment ID: 20000090 Result: Up-regulated in Transcription
  misc_feature: MA Experiment ID: 20000112 Result: Up-regulated in Transcription
  misc_feature: MA Experiment 20000112 PARAMETER Experiment Name: At_42deg_Heat_cDNA_P Parameter: Temperature (deg C) Value: 42 vs. 22
  misc_feature: MA Experiment 20000112 PARAMETER Experiment Name: At_42deg_Heat_cDNA_P Parameter: Timepoint (hr) Value: 2
  misc_feature: MA Experiment 20000112 PARAMETER Experiment Name: At_42deg_Heat_cDNA_P Parameter: Tissue Value: Aerial
  misc_feature: MA Experiment ID: 20000144 Result: Up-regulated in Transcription
  misc_feature: MA Experiment 20000144 PARAMETER Experiment Name: At_42deg_Heat_cDNA_P Parameter: Temperature (deg C) Value: 42 vs. 22
  misc_feature: MA Experiment 20000144 PARAMETER Experiment Name: At_42deg_Heat_cDNA_P Parameter: Timepoint (hr) Value: 1
  misc_feature: MA Experiment 20000144 PARAMETER Experiment Name: At_42deg_Heat_cDNA_P Parameter: Tissue Value: Aerial
  misc_feature: MA Experiment ID: 20000171 Result: Up-regulated in Transcription
  misc_feature: MA Experiment 20000171 PARAMETER Experiment Name: At_42deg_Heat_P Parameter: Age (day) Value: 14
  misc_feature: MA Experiment 20000171 PARAMETER Experiment Name: At_42deg_Heat_P Parameter: Organism Value: A. thaliana
  misc_feature: MA Experiment 20000171 PARAMETER Experiment Name: At_42deg_Heat_P Parameter: Plant Line Value: WS
  misc_feature: MA Experiment 20000171 PARAMETER Experiment Name: At_42deg_Heat_P Parameter: Temperature (deg C) Value: 42 vs. 22
  misc_feature: MA Experiment 20000171 PARAMETER Experiment Name: At_42deg_Heat_P Parameter: Timepoint (hr) Value: 1
  misc_feature: MA Experiment 20000171 PARAMETER Experiment Name: At_42deg_Heat_P Parameter: Tissue Value: Aerial
  misc_feature: MA Experiment ID: 20000184 Result: Up-regulated in Transcription
  misc_feature: MA Experiment 20000184 PARAMETER Experiment Name: At_Shoots__P Parameter: Age (day) Value: 7
  misc_feature: MA Experiment 20000184 PARAMETER Experiment Name: At_Shoots__P Parameter: Tissue Value: Shoots vs. Whole Plant
  misc_feature: MA Experiment ID: 20000185 Result: Up-regulated in Transcription
  misc_feature: MA Experiment 20000185 PARAMETER Experiment Name: At_Roots__P Parameter: Age (day) Value: 7 vs. 21
  misc_feature: MA Experiment 20000185 PARAMETER Experiment Name: At_Roots__P Parameter: Organism Value: A. thaliana
  misc_feature: MA Experiment 20000185 PARAMETER Experiment Name: At_Roots__P Parameter: Tissue Value: Roots vs. Whole Plant
  misc_feature: MA Experiment ID: 20000234 Result: Down-regulated in Transcription
  misc_feature: MA Experiment 20000234 PARAMETER Experiment Name: At_Siliques_P Parameter: Age (day) Value: 21
  misc_feature: MA Experiment 20000234 PARAMETER Experiment Name: At_Siliques_P Parameter: Organism Value: A. thaliana
  misc_feature: MA Experiment 20000234 PARAMETER Experiment Name: At_Siliques_P Parameter: Plant Line Value: WS
  misc_feature: MA Experiment 20000234 PARAMETER Experiment Name: At_Siliques_P Parameter: Tissue Value: Less Than 5mm Siliques vs. Whole Plant
  misc_feature: MA Experiment ID: 20000235 Result: Down-regulated in Transcription
  misc_feature: MA Experiment 20000235 PARAMETER Experiment Name: At_Siliques_P Parameter: Age (day) Value: 21
  misc_feature: MA Experiment 20000235 PARAMETER Experiment Name: At_Siliques_P Parameter: Organism Value: A. thaliana
  misc_feature: MA Experiment 20000235 PARAMETER Experiment Name: At_Siliques_P Parameter: Plant Line Value: WS
  misc_feature: MA Experiment 20000235 PARAMETER Experiment Name: At_Siliques_P Parameter: Tissue Value: 5-10mm Siliques vs. Whole Plant
  misc_feature: MA Experiment ID: 20000269 Result: Down-regulated in Transcription
  misc_feature: MA Experiment 20000269 PARAMETER Experiment Name: At_1mM_KNO3_L-vs-H_Roots_P Parameter: Age (day) Value: 7,10,12
  misc_feature: MA Experiment 20000269 PARAMETER Experiment Name: At_1mM_KNO3_L-vs-H_Roots_P Parameter: Organism Value: A. thaliana
  misc_feature: MA Experiment 20000269 PARAMETER Experiment Name: At_1mM_KNO3_L-vs-H_Roots_P Parameter: Plant Line Value: WS
  misc_feature: MA Experiment 20000269 PARAMETER Experiment Name: At_1mM_KNO3_L-vs-H_Roots_P Parameter: Timepoint (day) Value: 7,10,12
  misc_feature: MA Experiment 20000269 PARAMETER Experiment Name: At_1mM_KNO3_L-vs-H_Roots_P Parameter: Tissue Value: Roots
  misc_feature: MA Experiment 20000269 PARAMETER Experiment Name: At_1mM_KNO3_L-vs-H_Roots_P Parameter: Treatment Value: 1mM KNO3 vs. 50mM KNO3
  misc_feature: MA Experiment ID: 20000438 Result: Up-regulated in Transcription
  misc_feature: MA Experiment 20000438 PARAMETER Experiment Name: At_Shoots__P Parameter: Age (day) Value: 14
  misc_feature: MA Experiment 20000438 PARAMETER Experiment Name: At_Shoots__P Parameter: Tissue Value: Shoots vs. Whole Plant
  misc_feature: MA Experiment ID: 20000439 Result: Up-regulated in Transcription
  misc_feature: MA Experiment 20000439 PARAMETER Experiment Name: At_Roots__P Parameter: Age (day) Value: 14 vs. 21
  misc_feature: MA Experiment 20000439 PARAMETER Experiment Name: At_Roots__P Parameter: Organism Value: A. thaliana
  misc_feature: MA Experiment 20000439 PARAMETER Experiment Name: At_Roots__P Parameter: Tissue Value: Roots vs. Whole Plant
  misc_feature: MA Experiment ID: 20000451 Result: Down-regulated in Transcription
  misc_feature: MA Experiment 20000451 PARAMETER Experiment Name: At_CS6879_Shoots-Roots_P Parameter: Age (day) Value: 14
  misc_feature: MA Experiment 20000451 PARAMETER Experiment Name: At_CS6879_Shoots-Roots_P Parameter: Organism Value: A. thaliana
  misc_feature: MA Experiment 20000451 PARAMETER Experiment Name: At_CS6879_Shoots-Roots_P Parameter: Plant Line Value: CS6879 vs. WS
  misc_feature: MA Experiment 20000451 PARAMETER Experiment Name: At_CS6879_Shoots-Roots_P Parameter: Tissue Value: Roots
  misc_feature: MA Experiment ID: 20000452 Result: Down-regulated in Transcription
  misc_feature: MA Experiment 20000452 PARAMETER Experiment Name: At_CS6879_Shoots-Roots_P Parameter: Age (day) Value: 14
  misc_feature: MA Experiment 20000452 PARAMETER Experiment Name: At_CS6879_Shoots-Roots_P Parameter: Organism Value: A. thaliana
  misc_feature: MA Experiment 20000452 PARAMETER Experiment Name: At_CS6879_Shoots-Roots_P Parameter: Plant Line Value: CS6879 vs. WS
  misc_feature: MA Experiment 20000452 PARAMETER Experiment Name: At_CS6879_Shoots-Roots_P Parameter: Tissue Value: Shoots
  misc_feature: MA Experiment ID: 20000453 Result: Up-regulated in Transcription
  misc_feature: MA Experiment 20000453 PARAMETER Experiment Name: At_100uM_ABA_P Parameter: Age (day) Value: 15
  misc_feature: MA Experiment 20000453 PARAMETER Experiment Name: At_100uM_ABA_P Parameter: Organism Value: A. thaliana
  misc_feature: MA Experiment 20000453 PARAMETER Experiment Name: At_100uM_ABA_P Parameter: Plant Line Value: WS
  misc_feature: MA Experiment 20000453 PARAMETER Experiment Name: At_100uM_ABA_P Parameter: Timepoint (hr) Value: 24
  misc_feature: MA Experiment 20000453 PARAMETER Experiment Name: At_100uM_ABA_P Parameter: Tissue Value: Aerial
  misc_feature: MA Experiment 20000453 PARAMETER Experiment Name: At_100uM_ABA_P Parameter: Treatment Value: 100uM ABA vs. No Treatment
  misc_feature: MA Experiment ID: 20000455 Result: Up-regulated in Transcription
  misc_feature: MA Experiment 20000455 PARAMETER Experiment Name: At_100uM_ABA_P Parameter: Age (day) Value: 16
  misc_feature: MA Experiment 20000455 PARAMETER Experiment Name: At_100uM_ABA_P Parameter: Organism Value: A. thaliana
  misc_feature: MA Experiment 20000455 PARAMETER Experiment Name: At_100uM_ABA_P Parameter: Plant Line Value: WS
  misc_feature: MA Experiment 20000455 PARAMETER Experiment Name: At_100uM_ABA_P Parameter: Timepoint (hr) Value: 48
  misc_feature: MA Experiment 20000455 PARAMETER Experiment Name: At_100uM_ABA_P Parameter: Tissue Value: Aerial
  misc_feature: MA Experiment 20000455 PARAMETER Experiment Name: At_100uM_ABA_P Parameter: Treatment Value: 100uM ABA vs. No Treatment
  misc_feature: MA Experiment ID: 20000495 Result: Up-regulated in Transcription
  misc_feature: MA Experiment 20000495 PARAMETER Experiment Name: At_Guard_Cells_P Parameter: Harvest Date Value: 8/2/2002
  misc_feature: MA Experiment 20000495 PARAMETER Experiment Name: At_Guard_Cells_P Parameter: Organism Value: A. thaliana
  misc_feature: MA Experiment 20000495 PARAMETER Experiment Name: At_Guard_Cells_P Parameter: Tissue Value: Guard Cells vs. Leaves
  misc_feature: MA Experiment ID: 20000709 Result: Up-regulated in Transcription
  misc_feature: MA Experiment 20000709 PARAMETER Experiment Name: At_15mM_NH4NO3_L-to-H_P Parameter: Age (hr) Value: 14
  misc_feature: MA Experiment 20000709 PARAMETER Experiment Name: At_15mM_NH4NO3_L-to-H_P Parameter: Organism Value: A. thaliana
  misc_feature: MA Experiment 20000709 PARAMETER Experiment Name: At_15mM_NH4NO3_L-to-H_P Parameter: Plant Line Value: WS
  misc_feature: MA Experiment 20000709 PARAMETER Experiment Name: At_15mM_NH4NO3_L-to-H_P Parameter: Timepoint (hr) Value: 4
  misc_feature: MA Experiment 20000709 PARAMETER Experiment Name: At_15mM_NH4NO3_L-to-H_P Parameter: Tissue Value: Aerial
  misc_feature: MA Experiment 20000709 PARAMETER Experiment Name: At_15mM_NH4NO3_L-to-H_P Parameter: Treatment Value: 15mM NH4NO3 vs. 30mM Mannitol
  misc_feature: MA Experiment ID: 20001554 Result: Up-regulated in Transcription
  misc_feature: MA Experiment 20001554 PARAMETER Experiment Name: At_Drought_Soil_Dry_P Parameter: Age (day) Value: 21
  misc_feature: MA Experiment 20001554 PARAMETER Experiment Name: At_Drought_Soil_Dry_P Parameter: Organism Value: A. thaliana
  misc_feature: MA Experiment 20001554 PARAMETER Experiment Name: At_Drought_Soil_Dry_P Parameter: Plant Line Value: WS
  misc_feature: MA Experiment 20001554 PARAMETER Experiment Name: At_Drought_Soil_Dry_P Parameter: Post Timepoint (hr) Value: None
  misc_feature: MA Experiment 20001554 PARAMETER Experiment Name: At_Drought_Soil_Dry_P Parameter: Post-Treatment Value: None
  misc_feature: MA Experiment 20001554 PARAMETER Experiment Name: At_Drought_Soil_Dry_P Parameter: Timepoint (day) Value: 7
  misc_feature: MA Experiment 20001554 PARAMETER Experiment Name: At_Drought_Soil_Dry_P Parameter: Treatment Value: Drought vs. No Drought
  misc_feature: MA Experiment ID: 20001555 Result: Up-regulated in Transcription
  misc_feature: MA Experiment 20001555 PARAMETER Experiment Name: At_Drought_Soil_Dry_P Parameter: Age (day) Value: 24
  misc_feature: MA Experiment 20001555 PARAMETER Experiment Name: At_Drought_Soil_Dry_P Parameter: Organism Value: A. thaliana
  misc_feature: MA Experiment 20001555 PARAMETER Experiment Name: At_Drought_Soil_Dry_P Parameter: Plant Line Value: WS
  misc_feature: MA Experiment 20001555 PARAMETER Experiment Name: At_Drought_Soil_Dry_P Parameter: Post Timepoint (hr) Value: None
  misc_feature: MA Experiment 20001555 PARAMETER Experiment Name: At_Drought_Soil_Dry_P Parameter: Post-Treatment Value: None
  misc_feature: MA Experiment 20001555 PARAMETER Experiment Name: At_Drought_Soil_Dry_P Parameter: Timepoint (day) Value: 10
  misc_feature: MA Experiment 20001555 PARAMETER Experiment Name: At_Drought_Soil_Dry_P Parameter: Treatment Value: Drought vs. No Drought
  misc_feature: MA Experiment ID: 20001558 Result: Down-regulated in Transcription
  misc_feature: MA Experiment 20001558 PARAMETER Experiment Name: At_Drought_Soil_Dry_P Parameter: Age (day) Value: 27
  misc_feature: MA Experiment 20001558 PARAMETER Experiment Name: At_Drought_Soil_Dry_P Parameter: Organism Value: A. thaliana
  misc_feature: MA Experiment 20001558 PARAMETER Experiment Name: At_Drought_Soil_Dry_P Parameter: Plant Line Value: WS
  misc_feature: MA Experiment 20001558 PARAMETER Experiment Name: At_Drought_Soil_Dry_P Parameter: Post Timepoint (hr) Value: 6
  misc_feature: MA Experiment 20001558 PARAMETER Experiment Name: At_Drought_Soil_Dry_P Parameter: Post-Treatment Value: Re-Water vs. No Drought
  misc_feature: MA Experiment 20001558 PARAMETER Experiment Name: At_Drought_Soil_Dry_P Parameter: Timepoint (day) Value: 13
  misc_feature: MA Experiment 20001558 PARAMETER Experiment Name: At_Drought_Soil_Dry_P Parameter: Treatment Value: Drought vs. No Drought
atcacttacttaacatactaagagagttattagaacttgcaaaaaatggcttccaaggctttgattctgttaggtctcttctcagttcttctcgtcgtctccgaagtgtctgccgcaaggcaatcgggcatggtgaagccagagagtgaggaaactgtgcaacctgaaggttatggcggtggccacggaggacatggtggtcacggagggggaggaggccacggacatggaggacacaacggaggagggggccacggacttgacggatacggaggaggtggaggacactatggaggaggtggaggacactacggaggaggtggaggacactacggaggtggtggaggaggatacggaggtggaggaggacaccacggaggaggaggccacgggctaaacgaacctgttcagactaagccgggtgtttaaaactatataatatcttcactaccatgcatgattgcatatatatatatacgcttatgtattatctatatgcctataaataaaccatggtgagtttgtaacgcagtgccttcagaaatgttcggaataaatttccataatattagt

SEQ ID NO: 84090 - protein, 127 aa, Arabidopsis thaliana
  peptide (1)..(127): Ceres Seq. ID no. 12673080
  misc_feature (38)..(120): Pfam Name: Herpesvirus latent membrane protein 1 (LMP1) Pfam Description: Herpesvirus latent membrane protein 1 (LMP1)
  misc_feature (1)..(127): Homolog of NCBI NO: 15224540 NR Description: putative glycine-rich protein; protein id: supported by cDNA: 105261. [Arabidopsis thaliana]
  misc_feature (1)..(127): Homolog of NCBI NO: 21536606 NR Description: putative glycine-rich protein [Arabidopsis
  misc_feature (1)..(116): Homolog of NCBI NO: 30678191 NR Description: glycine-rich protein [Arabidopsis thaliana]
  misc_feature (1)..(127): Homolog of NCBI NO: 15224547 NR Description: putative glycine-rich protein; protein id:
  misc_feature (1)..(127): Homolog of NCBI NO: 9957568 NR Description: antimicrobial peptide shep-GRP [Capsella
  misc_feature (42)..(127): Homolog of NCBI NO: 30678191 NR Description: glycine-rich protein [Arabidopsis thaliana]
  misc_feature (1)..(116): Homolog of NCBI NO: 15224548 NR Description: putative glycine-rich protein; protein id: supported by cDNA: gi_17473738, supported by cDNA: gi_20148476
  misc_feature (1)..(114): Homolog of NCBI NO: 259447 NR Description: glycine-rich protein; atGRP [Arabidopsis thaliana]
  misc_feature (1)..(114): Homolog of NCBI NO: 81625 NR Description: glycine-rich protein 3 precursor - Arabidopsis
  misc_feature (4)..(116): Homolog of NCBI NO: 7488799 NR Description: dormancy-associated protein 2 - garden pea
MASKALILLGLFSVLLVVSEVSAARQSGMVKPESEETVQPEGYGGGHGGHGGHGGGGGHGHGGHNGGGGHGLDGYGGGGGHYGGGGGHYGGGGGHYGGGGGGYGGGGGHHGGGGHGLNEPVQTKPGV

SEQ ID NO: 84091 - protein, 99 aa, Arabidopsis thaliana; identical to SEQ ID NO: 39252
  peptide (1)..(99): Ceres Seq. ID no. 12673081
  misc_feature (10)..(92): Pfam Name: Herpesvirus latent membrane protein 1 (LMP1) Pfam Description: Herpesvirus latent membrane protein 1 (LMP1)
  misc_feature (1)..(99): Homolog of NCBI NO: 15224540 NR Description: putative glycine-rich protein; protein id: supported by cDNA: 105261. [Arabidopsis thaliana]
  misc_feature (1)..(99): Homolog of NCBI NO: 21536606 NR Description: putative glycine-rich protein [Arabidopsis
  misc_feature (1)..(88): Homolog of NCBI NO: 30678191 NR Description: glycine-rich protein [Arabidopsis thaliana]
  misc_feature (1)..(99): Homolog of NCBI NO: 15224547 NR Description: putative glycine-rich protein; protein id:
  misc_feature (1)..(99): Homolog of NCBI NO: 9957568 NR Description: antimicrobial peptide shep-GRP [Capsella
  misc_feature (14)..(99): Homolog of NCBI NO: 30678191 NR Description: glycine-rich protein [Arabidopsis thaliana]
  misc_feature (1)..(88): Homolog of NCBI NO: 15224548 NR Description: putative glycine-rich protein; protein id: supported by cDNA: gi_17473738, supported by cDNA: gi_20148476
  misc_feature (1)..(86): Homolog of NCBI NO: 259447 NR Description: glycine-rich protein; atGRP [Arabidopsis thaliana]
  misc_feature (1)..(86): Homolog of NCBI NO: 81625 NR Description: glycine-rich protein 3 precursor - Arabidopsis
  misc_feature (1)..(88): Homolog of NCBI NO: 7488799 NR Description: dormancy-associated protein 2 - garden pea

SEQ ID NO: 84092 - protein, 74 aa, Arabidopsis thaliana; identical to SEQ ID NO: 39253
  peptide (1)..(74): Ceres Seq. ID no. 12673082
  misc_feature (1)..(73): Pfam Name: Transferrin binding protein-like solute binding protein Pfam Description: Transferrin binding protein-like solute binding

SEQ ID NO: 84093 - DNA, 1339 bp, Arabidopsis thaliana
  misc_feature (1)..(1339): Ceres Seq. ID no. 12673103
  misc_feature: MA Experiment ID: 108433 Result: Up-regulated in Transcription
  misc_feature: MA Experiment 108433 PARAMETER Experiment Name: At_rhl_Mutant2_cDNA_P Parameter: Age (day) Value: 7
  misc_feature: MA Experiment 108433 PARAMETER Experiment Name: At_rhl_Mutant2_cDNA_P Parameter: Organism Value: A. thaliana
  misc_feature: MA Experiment 108433 PARAMETER Experiment Name: At_rhl_Mutant2_cDNA_P Parameter: Plant Line Value: rhl Mutant vs. wt landsburg
  misc_feature: MA Experiment 108433 PARAMETER Experiment Name: At_rhl_Mutant2_cDNA_P Parameter: Tissue Value: Roots
  misc_feature: MA Experiment ID: 108434 Result: Down-regulated in Transcription
  misc_feature: MA Experiment 108434 PARAMETER Experiment Name: At_Root_Tips_cDNA_P Parameter: Tissue Value: Root Tips
  misc_feature: MA Experiment ID: 108435 Result: Up-regulated in Transcription
  misc_feature: MA Experiment 108435 PARAMETER Experiment Name: At_stm_Mutants_cDNA_P Parameter: Plant Line Value: wt Landsburg vs stm
  misc_feature: MA Experiment 108435 PARAMETER Experiment Name: At_stm_Mutants_cDNA_P Parameter: Tissue Value: Shoot Apical Meristem Region
  misc_feature: MA Experiment ID: 108461 Result: Up-regulated in Transcription
  misc_feature: MA Experiment 108461 PARAMETER Experiment Name: At_Germinating_Seeds_cDNA_P Parameter: Age (day) Value: 1 vs. 0
  misc_feature: MA Experiment 108461 PARAMETER Experiment Name: At_Germinating_Seeds_cDNA_P Parameter: Tissue Value: Germinating Seeds
  misc_feature: MA Experiment ID: 108463 Result: Up-regulated in Transcription
  misc_feature: MA Experiment 108463 PARAMETER Experiment Name: At_Germinating_Seeds_cDNA_P Parameter: Age (day) Value: 3 vs. 0
  misc_feature: MA Experiment 108463 PARAMETER Experiment Name: At_Germinating_Seeds_cDNA_P Parameter: Tissue Value: Germinating Seeds
  misc_feature: MA Experiment ID: 108464 Result: Up-regulated in Transcription
  misc_feature: MA Experiment 108464 PARAMETER Experiment Name: At_Germinating_Seeds_cDNA_P Parameter: Age (day) Value: 4 vs. 0
  misc_feature: MA Experiment 108464 PARAMETER Experiment Name: At_Germinating_Seeds_cDNA_P Parameter: Tissue Value: Germinating Seeds
  misc_feature: MA Experiment ID: 108488 Result: Down-regulated in Transcription
  misc_feature: MA Experiment ID: 108574 Result: Up-regulated in Transcription
  misc_feature: MA Experiment 108574 PARAMETER Experiment Name: At_Wounding__cDNA_P Parameter: Timepoint (hr) Value: 1
  misc_feature: MA Experiment 108574 PARAMETER Experiment Name: At_Wounding__cDNA_P Parameter: Tissue Value: Aerial
  misc_feature: MA Experiment 108574 PARAMETER Experiment Name: At_Wounding__cDNA_P Parameter: Treatment Value: Wounding vs. No Wounding
  misc_feature: MA Experiment ID: 108577 Result: Down-regulated in Transcription
  misc_feature: MA Experiment 108577 PARAMETER Experiment Name: At_42deg_Heat_cDNA_P Parameter: Temperature (deg C) Value: 42 vs. 22
  misc_feature: MA Experiment 108577 PARAMETER Experiment Name: At_42deg_Heat_cDNA_P Parameter: Timepoint (hr) Value: 6
  misc_feature: MA Experiment 108577 PARAMETER Experiment Name: At_42deg_Heat_cDNA_P Parameter: Tissue Value: Aerial
  misc_feature: MA Experiment ID: 108585 Result: Up-regulated in Transcription
  misc_feature: MA Experiment 108585 PARAMETER Experiment Name: At_5mM_NaNP_cDNA_P Parameter: Timepoint (hr) Value: 6
  misc_feature: MA Experiment 108585 PARAMETER Experiment Name: At_5mM_NaNP_cDNA_P Parameter: Tissue Value: Aerial
  misc_feature: MA Experiment 108585 PARAMETER Experiment Name: At_5mM_NaNP_cDNA_P Parameter: Treatment Value: null
  misc_feature: MA Experiment ID: 108595 Result: Up-regulated in Transcription
  misc_feature: MA Experiment 108595 PARAMETER Experiment Name: At_Ler-pi_Ovule_cDNA_P Parameter: Plant Line Value: null
  misc_feature: MA Experiment ID: 108667 Result: Up-regulated in Transcription
  misc_feature: MA Experiment 108667 PARAMETER Experiment Name: At_2mM_SA_cDNA_P Parameter: Plant Line Value: WS
  misc_feature: MA Experiment 108667 PARAMETER Experiment Name: At_2mM_SA_cDNA_P Parameter: Timepoint (hr) Value: 1
  misc_feature: MA Experiment 108667 PARAMETER Experiment Name: At_2mM_SA_cDNA_P Parameter: Treatment Value: 2mM SA vs. No Treatment
  misc_feature: MA Experiment ID: 108668 Result: Up-regulated in Transcription
  misc_feature: MA Experiment 108668 PARAMETER Experiment Name: At_2mM_SA_cDNA_P Parameter: Plant Line Value: WS
  misc_feature: MA Experiment 108668 PARAMETER Experiment Name: At_2mM_SA_cDNA_P Parameter: Timepoint (hr) Value: 6
  misc_feature: MA Experiment 108668 PARAMETER Experiment Name: At_2mM_SA_cDNA_P Parameter: Treatment Value: 2mM SA vs. No Treatment
  misc_feature: MA Experiment ID: 20000069 Result: Up-regulated in Transcription
  misc_feature: MA Experiment 20000069 PARAMETER Experiment Name: At_100uM_ABA_Mutants_cDNA_P Parameter: Plant Line Value: CS23
  misc_feature: MA Experiment 20000069 PARAMETER Experiment Name: At_100uM_ABA_Mutants_cDNA_P Parameter: Timepoint (hr) Value: 6
  misc_feature: MA Experiment 20000069 PARAMETER Experiment Name: At_100uM_ABA_Mutants_cDNA_P Parameter: Tissue Value: Aerial
  misc_feature: MA Experiment 20000069 PARAMETER Experiment Name: At_100uM_ABA_Mutants_cDNA_P Parameter: Treatment Value: 100uM ABA vs. No Treatment
  misc_feature: MA Experiment ID: 20000072 Result: Up-regulated in Transcription
  misc_feature: MA Experiment 20000072 PARAMETER Experiment Name: At_100uM_ABA_Mutants_cDNA_P Parameter: Plant Line Value: CS8105
  misc_feature: MA Experiment 20000072 PARAMETER Experiment Name: At_100uM_ABA_Mutants_cDNA_P Parameter: Timepoint (hr) Value: 6
  misc_feature: MA Experiment 20000072 PARAMETER Experiment Name: At_100uM_ABA_Mutants_cDNA_P Parameter: Tissue Value: Aerial
  misc_feature: MA Experiment 20000072 PARAMETER Experiment Name: At_100uM_ABA_Mutants_cDNA_P Parameter: Treatment Value: 100uM ABA vs. No Treatment
  misc_feature: MA Experiment ID: 20000086 Result: Up-regulated in Transcription
  misc_feature: MA Experiment 20000086 PARAMETER Experiment Name: At_100uM_ABA_Mutants_cDNA_P Parameter: Plant Line Value: CS22
  misc_feature: MA Experiment 20000086 PARAMETER Experiment Name: At_100uM_ABA_Mutants_cDNA_P Parameter: Timepoint (hr) Value: 6
  misc_feature: MA Experiment 20000086 PARAMETER Experiment Name: At_100uM_ABA_Mutants_cDNA_P Parameter: Tissue Value: Aerial
  misc_feature: MA Experiment 20000086 PARAMETER Experiment Name: At_100uM_ABA_Mutants_cDNA_P Parameter: Treatment Value: 100uM ABA vs. No Treatment
  misc_feature: MA Experiment ID: 20000111 Result: Down-regulated in Transcription
  misc_feature: MA Experiment 20000111 PARAMETER Experiment Name: At_42deg_Heat_cDNA_P Parameter: Temperature (deg C) Value: 42 vs. 22
  misc_feature: MA Experiment 20000111 PARAMETER Experiment Name: At_42deg_Heat_cDNA_P Parameter: Timepoint (hr) Value: 6
  misc_feature: MA Experiment 20000111 PARAMETER Experiment Name: At_42deg_Heat_cDNA_P Parameter: Tissue Value: Aerial
  misc_feature: MA Experiment ID: 20000112 Result: Down-regulated in Transcription
  misc_feature: MA Experiment 20000112 PARAMETER Experiment Name: At_42deg_Heat_cDNA_P Parameter: Temperature (deg C) Value: 42 vs. 22
  misc_feature: MA Experiment 20000112 PARAMETER Experiment Name: At_42deg_Heat_cDNA_P Parameter: Timepoint (hr) Value: 2
  misc_feature: MA Experiment 20000112 PARAMETER Experiment Name: At_42deg_Heat_cDNA_P Parameter: Tissue Value: Aerial
  misc_feature: MA Experiment ID: 20000173 Result: Down-regulated in Transcription
  misc_feature: MA Experiment 20000173 PARAMETER Experiment Name: At_42deg_Heat_P Parameter: Age (day) Value: 14
  misc_feature: MA Experiment 20000173 PARAMETER Experiment Name: At_42deg_Heat_P Parameter: Organism Value: A. thaliana
  misc_feature: MA Experiment 20000173 PARAMETER Experiment Name: At_42deg_Heat_P Parameter: Plant Line Value: WS
  misc_feature: MA Experiment 20000173 PARAMETER Experiment Name: At_42deg_Heat_P Parameter: Temperature (deg C) Value: 42 vs. 22
  misc_feature: MA Experiment 20000173 PARAMETER Experiment Name: At_42deg_Heat_P Parameter: Timepoint (hr) Value: 6
  misc_feature: MA Experiment 20000173 PARAMETER Experiment Name: At_42deg_Heat_P Parameter: Tissue Value: Aerial
  misc_feature: MA Experiment ID: 20000179 Result: Up-regulated in Transcription
  misc_feature: MA Experiment 20000179 PARAMETER Experiment Name: At_Germinating_Seeds_P Parameter: Age (hr) Value: 6 vs. 0
  misc_feature: MA Experiment 20000179 PARAMETER Experiment Name: At_Germinating_Seeds_P Parameter: Tissue Value: Germinating Seeds
  misc_feature: MA Experiment ID: 20000180 Result: Up-regulated in Transcription
  misc_feature: MA Experiment 20000180 PARAMETER Experiment Name: At_Germinating_Seeds_P Parameter: Age (hr) Value: 24 vs. 0
  misc_feature: MA Experiment 20000180 PARAMETER Experiment Name: At_Germinating_Seeds_P Parameter: Tissue Value: Germinating Seeds
  misc_feature: MA Experiment ID: 20000182 Result: Up-regulated in Transcription
  misc_feature: MA Experiment 20000182 PARAMETER Experiment Name: At_2mM_SA_P Parameter: Age (day) Value: 14
  misc_feature: MA Experiment 20000182 PARAMETER Experiment Name: At_2mM_SA_P Parameter: Organism Value: A. thaliana
  misc_feature: MA Experiment 20000182 PARAMETER Experiment Name: At_2mM_SA_P Parameter: Plant Line Value: WS
  misc_feature: MA Experiment 20000182 PARAMETER Experiment Name: At_2mM_SA_P Parameter: Timepoint (hr) Value: 6
  misc_feature: MA Experiment 20000182 PARAMETER Experiment Name: At_2mM_SA_P Parameter: Tissue Value: Aerial
  misc_feature: MA Experiment 20000182 PARAMETER Experiment Name: At_2mM_SA_P Parameter: Treatment Value: 2mM SA vs. No Treatment
  misc_feature: MA Experiment ID: 20000184 Result: Down-regulated in Transcription
  misc_feature: MA Experiment 20000184 PARAMETER Experiment Name: At_Shoots__P Parameter: Age (day) Value: 7
  misc_feature: MA Experiment 20000184 PARAMETER Experiment Name: At_Shoots__P Parameter: Tissue Value: Shoots vs. Whole Plant
  misc_feature: MA Experiment ID: 20000185 Result: Down-regulated in Transcription
  misc_feature: MA Experiment 20000185 PARAMETER Experiment Name: At_Roots__P Parameter: Age (day) Value: 7 vs. 21
  misc_feature: MA Experiment 20000185 PARAMETER Experiment Name: At_Roots__P Parameter: Organism Value: A. thaliana
  misc_feature: MA Experiment 20000185 PARAMETER Experiment Name: At_Roots__P Parameter: Tissue Value: Roots vs. Whole Plant
  misc_feature: MA Experiment ID: 20000211 Result: Up-regulated in Transcription
  misc_feature: MA Experiment 20000211 PARAMETER Experiment Name: At_0.001percent_MeJA__P Parameter: Age (day) Value: 14
  misc_feature: MA Experiment 20000211 PARAMETER Experiment Name: At_0.001percent_MeJA__P Parameter: Organism Value: A. thaliana
  misc_feature: MA Experiment 20000211 PARAMETER Experiment Name: At_0.001percent_MeJA__P Parameter: Plant Line Value: WS
  misc_feature: MA Experiment 20000211 PARAMETER Experiment Name: At_0.001percent_MeJA__P Parameter: Timepoint (hr) Value: 1
  misc_feature: MA Experiment 20000211 PARAMETER Experiment Name: At_0.001percent_MeJA__P Parameter: Tissue Value: Aerial
  misc_feature: MA Experiment 20000211 PARAMETER Experiment Name: At_0.001percent_MeJA__P Parameter: Treatment Value: 0.001percent MeJA vs. No Treatment
  misc_feature: MA Experiment ID: 20000234 Result: Down-regulated in Transcription
  misc_feature: MA Experiment 20000234 PARAMETER Experiment Name: At_Siliques_P Parameter: Age (day) Value: 21
  misc_feature: MA Experiment 20000234 PARAMETER Experiment Name: At_Siliques_P Parameter: Organism Value: A. thaliana
  misc_feature: MA Experiment 20000234 PARAMETER Experiment Name: At_Siliques_P Parameter: Plant Line Value: WS
  misc_feature: MA Experiment 20000234 PARAMETER Experiment Name: At_Siliques_P Parameter: Tissue Value: Less Than 5mm Siliques vs. Whole Plant
  misc_feature: MA Experiment ID: 20000438 Result: Down-regulated in Transcription
  misc_feature: MA Experiment 20000438 PARAMETER Experiment Name: At_Shoots__P Parameter: Age (day) Value: 14
  misc_feature: MA Experiment 20000438 PARAMETER Experiment Name: At_Shoots__P Parameter: Tissue Value: Shoots vs. Whole Plant
  misc_feature: MA Experiment ID: 20000439 Result: Down-regulated in Transcription
  misc_feature: MA Experiment 20000439 PARAMETER Experiment Name: At_Roots__P Parameter: Age (day) Value: 14 vs. 21
  misc_feature: MA Experiment 20000439 PARAMETER Experiment Name: At_Roots__P Parameter: Organism Value: A. thaliana
  misc_feature: MA Experiment 20000439 PARAMETER Experiment Name: At_Roots__P Parameter: Tissue Value: Roots vs. Whole Plant
  misc_feature: MA Experiment ID: 20000495 Result: Down-regulated in Transcription
  misc_feature: MA Experiment 20000495 PARAMETER Experiment Name: At_Guard_Cells_P Parameter: Harvest Date Value: 8/2/2002
  misc_feature: MA Experiment 20000495 PARAMETER Experiment Name: At_Guard_Cells_P Parameter: Organism Value: A. thaliana
  misc_feature: MA Experiment 20000495 PARAMETER Experiment Name: At_Guard_Cells_P Parameter: Tissue Value: Guard Cells vs. Leaves
  misc_feature: MA Experiment ID: 20000606 Result: Up-regulated in Transcription
  misc_feature: MA Experiment 20000606 PARAMETER Experiment Name: At_CS8548_Mutant_P Parameter: Age (day) Value: 14
  misc_feature: MA Experiment 20000606 PARAMETER Experiment Name: At_CS8548_Mutant_P Parameter: Plant Line Value: CS8548 vs. wt
  misc_feature: MA Experiment 20000606 PARAMETER Experiment Name: At_CS8548_Mutant_P Parameter: Tissue Value: Whole Plant
  misc_feature: MA Experiment ID: 20001450 Result: Down-regulated in Transcription
  misc_feature: MA Experiment 20001450 PARAMETER Experiment Name: At_Far-red-induction_P Parameter: Age (day) Value: 7
  misc_feature: MA Experiment 20001450 PARAMETER Experiment Name: At_Far-red-induction_P Parameter: Light Value: Far-red vs. White
  misc_feature: MA Experiment 20001450 PARAMETER Experiment Name: At_Far-red-induction_P Parameter: Organism Value: A. thaliana
  misc_feature: MA Experiment 20001450 PARAMETER Experiment Name: At_Far-red-induction_P Parameter: Plant Line Value: Columbia
  misc_feature: MA Experiment 20001450 PARAMETER Experiment Name: At_Far-red-induction_P Parameter: Timepoint (hr) Value: 8
  misc_feature: MA Experiment 20001450 PARAMETER Experiment Name: At_Far-red-induction_P Parameter: Tissue Value: Whole Plant
  misc_feature: MA Experiment ID: 20001451 Result: Down-regulated in Transcription
  misc_feature: MA Experiment 20001451 PARAMETER Experiment Name: At_Far-red-induction_P Parameter: Age (day) Value: 7
  misc_feature: MA Experiment 20001451 PARAMETER Experiment Name: At_Far-red-induction_P Parameter: Light Value: Far-red vs. White
  misc_feature: MA Experiment 20001451 PARAMETER Experiment Name: At_Far-red-induction_P Parameter: Organism Value: A. thaliana
  misc_feature: MA Experiment 20001451 PARAMETER Experiment Name: At_Far-red-induction_P Parameter: Plant Line Value: Columbia
  misc_feature: MA Experiment 20001451 PARAMETER Experiment Name: At_Far-red-induction_P Parameter: Timepoint (hr) Value: 24
  misc_feature: MA Experiment 20001451 PARAMETER Experiment Name: At_Far-red-induction_P Parameter: Tissue Value: Whole Plant
  misc_feature: MA Experiment ID: 20001911 Result: Down-regulated in Transcription
  misc_feature: MA Experiment 20001911 PARAMETER Experiment Name: At_Drought_Reproduction_P Parameter: Age (day) Value: 40
  misc_feature: MA Experiment 20001911 PARAMETER Experiment Name: At_Drought_Reproduction_P Parameter: Organism Value: A. thaliana
  misc_feature: MA Experiment 20001911 PARAMETER Experiment Name: At_Drought_Reproduction_P Parameter: Plant Line Value: WS
  misc_feature: MA Experiment 20001911 PARAMETER Experiment Name: At_Drought_Reproduction_P Parameter: Timepoint (day) Value: 10
  misc_feature: MA Experiment 20001911 PARAMETER Experiment Name: At_Drought_Reproduction_P Parameter: Tissue Value: Flowers
  misc_feature: MA Experiment 20001911 PARAMETER Experiment Name: At_Drought_Reproduction_P Parameter: Treatment Value: Drought vs. No Drought
acacaacaacaacacatccactcgaattttctatttccgaataacaaaaccgatcggcggagacatgacggcggcacaagggaactctaacgagactctgttttcttcttacaagatgggaagattcgatctctctcatcgagtggttctggcgccgatgacgcggtgcagggcgttgaacggagtaccaaacgcggcgttggcagagtattatgctcaacggaccactcccggcggttttctcatctccgaaggcaccatggtctctcccggatccgcaggttcccacatgtgcctggaatctattcagatgaacaagtagaagcatggaagcaagttgtggaagcagttcacgctaagggaggtttcatcttttgtcaattatggcatgttggacgtgcttctcatgcagtgtatcaacctaatggaggatcaccaatatcgtcaacgaacaaaccaatctcggaaaacaggtggcgagttttgttgcccgatggttcccacgtgaagtacccgaaacctcgggctttagaagcttccgagatacctcgggtggtggaggattattgcctttctgctttgaatgcgattcgagctggtttcgatgggattgagatccacggggcgcatggttaccttattgatcagtttttgaaagatgggatcaatgaccgtactgaccaatacggaggatccattgcaaaccgttgtagattcttgaaacaagtagtggaaggtgtagtttcagccataggagctagtaaagttggtgtgagggtatctccggctatagatcacttggacgcaactgattctgacccactatcactcgggctagccgtggttggcatgctcaataagttacaaggtgttaatggctcaaagctcgcttaccttcacgttacacaacctcgctaccacgcctacgggcaaacagagtctggaaggcaagggagtgatgaggaagaagctaagctaatgaagagcttgaggatggcttataatggaacctttatgtctagtggaggattcaataaggaactaggtatgcaagctgttcaacaaggtgatgctgatttggtttcatatggcagactgtttatcgcaaacccggatttggtttcgcggttcaagattgatggagagttgaataaatataatcggaagacgttttacactcaagatccagttgttggctacacggattatcctttcttggctcctttttcccgcctctgagtttgataatcgaggagaaaatgtattgacaatacattgatatgtaaaatgacaatgttattgttatccacttaatatttagtcatgtatcttgttgttt

SEQ ID NO: 84094 - protein, 129 aa, Arabidopsis thaliana
  peptide (1)..(129): Ceres Seq. ID no. 12673104
  misc_feature (1)..(101): Pfam Name: NADH:flavin oxidoreductase / NADH oxidase family Pfam Description: NADH:flavin oxidoreductase / NADH oxidase family
  misc_feature (1)..(129): Homolog of NCBI NO: 15225045 NR Description: 12-oxophytodienoate reductase (OPR3)(DDE1); id: At2g06050.1, supported by cDNA: gi_10242313, supported by
  misc_feature (1)..(129): Homolog of NCBI NO: 6707797 NR Description: 12-oxo-phytodienoate reductase [Arabidopsis
  misc_feature (1)..(129): Homolog of NCBI NO: 7688991 NR Description: 12-oxo-phytodienoate reductase [Arabidopsis
  misc_feature (1)..(129): Homolog of NCBI NO: 5059115 NR Description: OPDA-reductase homolog [Arabidopsis thaliana]
  misc_feature (1)..(129): Homolog of NCBI NO: 10242314 NR Description: 12-oxo-phytodienoate reductase [Arabidopsis
  misc_feature (1)..(129): Homolog of NCBI NO: 12056507 NR Description: 12-oxophytodienoate reductase 3 [Lycopersicon
  misc_feature (1)..(123): Homolog of NCBI NO: 40645459 NR Description: LEDI-5c protein [Lithospermum erythrorhizon]
  misc_feature (1)..(123): Homolog of NCBI NO: 23495288 NR Description: 12-oxophytodienoic acid reductase [Oryza sativa]
  misc_feature (1)..(123): Homolog of NCBI NO: 40645347 NR Description: hypothetical protein [Pisum sativum]
  misc_feature (1)..(123): Homolog of NCBI NO: 5701740 NR Description: LEDI-5a protein [Lithospermum erythrorhizon]
MLNKLQGVNGSKLAYLHVTQPRYHAYGQTESGRQGSDEEEAKLMKSLRMAYNGTFMSSGGFNKELGMQAVQQGDADLVSYGRLFIANPDLVSRFKIDGELNKYNRKTFYTQDPVVGYTDYPFLAPFSRL

SEQ ID NO: 84095 - protein, 106 aa, Arabidopsis thaliana
  peptide (1)..(106): Ceres Seq. ID no. 12673105
  misc_feature (32)..(94): Pfam Name: NADH:flavin oxidoreductase / NADH oxidase family Pfam Description: NADH:flavin oxidoreductase / NADH oxidase family
  misc_feature (22)..(94): Homolog of NCBI NO: 15225045 NR Description: 12-oxophytodienoate reductase (OPR3)(DDE1); id: At2g06050.1, supported by cDNA: gi_10242313, supported by
  misc_feature (22)..(94): Homolog of NCBI NO: 6707797 NR Description: 12-oxo-phytodienoate reductase [Arabidopsis
  misc_feature (22)..(94): Homolog of NCBI NO: 7688991 NR Description: 12-oxo-phytodienoate reductase [Arabidopsis
  misc_feature (22)..(94): Homolog of NCBI NO: 5059115 NR Description: OPDA-reductase homolog [Arabidopsis thaliana]
  misc_feature (22)..(94): Homolog of NCBI NO: 10242314 NR Description: 12-oxo-phytodienoate reductase [Arabidopsis
  misc_feature (22)..(94): Homolog of NCBI NO: 12056507 NR Description: 12-oxophytodienoate reductase 3 [Lycopersicon
  misc_feature (33)..(94): Homolog of NCBI NO: 40645459 NR Description: LEDI-5c protein [Lithospermum erythrorhizon]
  misc_feature (33)..(94): Homolog of NCBI NO: 23495288 NR Description: 12-oxophytodienoic acid reductase [Oryza sativa]
  misc_feature (33)..(94): Homolog of NCBI NO: 40645347 NR Description: hypothetical protein [Pisum sativum]
  misc_feature (29)..(94): Homolog of NCBI NO: 5701740 NR Description: LEDI-5a protein [Lithospermum erythrorhizon]
HNNNTSTRIFYFRITKPIGGDMTAAQGNSNETLFSSYKMGRFDLSHRVVLAPMTRCRALNGVPNAALAEYYAQRTTPGGFLISEGTMVSPGSAGSHMCLESIQMNK

SEQ ID NO: 84096 - protein, 86 aa, Arabidopsis thaliana
  peptide (1)..(86): Ceres Seq. ID no. 12673106
  misc_feature (1)..(58): Pfam Name: NADH:flavin oxidoreductase / NADH oxidase family Pfam Description: NADH:flavin oxidoreductase / NADH oxidase family
  misc_feature (1)..(86): Homolog of NCBI NO: 15225045 NR Description: 12-oxophytodienoate reductase (OPR3)(DDE1); id: At2g06050.1, supported by cDNA: gi_10242313, supported by
  misc_feature (1)..(86): Homolog of NCBI NO: 6707797 NR Description: 12-oxo-phytodienoate reductase [Arabidopsis
  misc_feature (1)..(86): Homolog of NCBI NO: 7688991 NR Description: 12-oxo-phytodienoate reductase [Arabidopsis
  misc_feature (1)..(86): Homolog of NCBI NO: 5059115 NR Description: OPDA-reductase homolog [Arabidopsis thaliana]
  misc_feature (1)..(86): Homolog of NCBI NO: 10242314 NR Description: 12-oxo-phytodienoate reductase [Arabidopsis
  misc_feature (1)..(86): Homolog of NCBI NO: 12056507 NR Description: 12-oxophytodienoate reductase 3 [Lycopersicon
  misc_feature (1)..(80): Homolog of NCBI NO: 40645459 NR Description: LEDI-5c protein [Lithospermum erythrorhizon]
  misc_feature (1)..(80): Homolog of NCBI NO: 23495288 NR Description: 12-oxophytodienoic acid reductase [Oryza sativa]
  misc_feature (1)..(80): Homolog of NCBI NO: 40645347 NR Description: hypothetical protein [Pisum sativum]
  misc_feature (1)..(80): Homolog of NCBI NO: 5701740 NR Description: LEDI-5a protein [Lithospermum erythrorhizon]
MKSLRMAYNGTFMSSGGFNKELGMQAVQQGDADLVSYGRLFIANPDLVSRFKIDGELNKYNRKTFYTQDPVVGYTDYPFLAPFSRL

SEQ ID NO: 84097 - DNA, 961 bp, Arabidopsis thaliana
  misc_feature (1)..(961): Ceres Seq. ID no. 12673125
  misc_feature: MA Experiment ID: 20000495 Result: Up-regulated in Transcription
  misc_feature: MA Experiment 20000495 PARAMETER Experiment Name: At_Guard_Cells_P Parameter: Harvest Date Value: 8/2/2002
  misc_feature: MA Experiment 20000495 PARAMETER Experiment Name: At_Guard_Cells_P Parameter: Organism Value: A. thaliana
  misc_feature: MA Experiment 20000495 PARAMETER Experiment Name: At_Guard_Cells_P Parameter: Tissue Value: Guard Cells vs. Leaves
  misc_feature: MA Experiment ID: 20000573 Result: Down-regulated in Transcription
  misc_feature: MA Experiment 20000573 PARAMETER Experiment Name: At_100uM_ABA_Mutants__P Parameter: Organism Value: A. thaliana
  misc_feature: MA Experiment 20000573 PARAMETER Experiment Name: At_100uM_ABA_Mutants__P Parameter: Plant Line Value: CS22 vs. Ler wt
  misc_feature: MA Experiment 20000573 PARAMETER Experiment Name: At_100uM_ABA_Mutants__P Parameter: Timepoint (hr) Value: N/A
  misc_feature: MA Experiment 20000573 PARAMETER Experiment Name: At_100uM_ABA_Mutants__P Parameter: Tissue Value: Whole Plant
  misc_feature: MA Experiment 20000573 PARAMETER Experiment Name: At_100uM_ABA_Mutants__P Parameter: Treatment Value: None
  misc_feature: MA Experiment ID: 20000574 Result: Down-regulated in Transcription
  misc_feature: MA Experiment 20000574 PARAMETER Experiment Name: At_100uM_ABA_Mutants__P Parameter: Organism Value: A. thaliana
  misc_feature: MA Experiment 20000574 PARAMETER Experiment Name: At_100uM_ABA_Mutants__P Parameter: Plant Line Value: CS23 vs. Ler wt
  misc_feature: MA Experiment 20000574 PARAMETER Experiment Name: At_100uM_ABA_Mutants__P Parameter: Timepoint (hr) Value: N/A
  misc_feature: MA Experiment 20000574 PARAMETER Experiment Name: At_100uM_ABA_Mutants__P Parameter: Tissue Value: Whole Plant
  misc_feature: MA Experiment 20000574 PARAMETER Experiment Name: At_100uM_ABA_Mutants__P Parameter: Treatment Value: None
  misc_feature: MA Experiment ID: 20000794 Result: Up-regulated in Transcription
  misc_feature: MA Experiment 20000794 PARAMETER Experiment Name: At_Petals_P Parameter: Age (day) Value: 23-25 days
  misc_feature: MA Experiment 20000794 PARAMETER Experiment Name: At_Petals_P Parameter: Plant Line Value: WS
  misc_feature: MA Experiment 20000794 PARAMETER Experiment Name: At_Petals_P Parameter: Tissue Value: Petals vs. Whole plant
  misc_feature: MA Experiment ID: 20001911 Result: Up-regulated in Transcription
  misc_feature: MA Experiment 20001911 PARAMETER Experiment Name: At_Drought_Reproduction_P Parameter: Age (day) Value: 40
  misc_feature: MA Experiment 20001911 PARAMETER Experiment Name: At_Drought_Reproduction_P Parameter: Organism Value: A. thaliana
  misc_feature: MA Experiment 20001911 PARAMETER Experiment Name: At_Drought_Reproduction_P Parameter: Plant Line Value: WS
  misc_feature: MA Experiment 20001911 PARAMETER Experiment Name: At_Drought_Reproduction_P Parameter: Timepoint (day) Value: 10
  misc_feature: MA Experiment 20001911 PARAMETER Experiment Name: At_Drought_Reproduction_P Parameter: Tissue Value: Flowers
  misc_feature: MA Experiment 20001911 PARAMETER Experiment Name: At_Drought_Reproduction_P Parameter: Treatment Value: Drought vs. No Drought
tttctctgtggcctatcccaggtgtctttcaacaatactttgtttatcaagtccagaaaatacgtctccagggttattacagtttcagtcaaaagttgaagcatgttgttcgtctgccatttgcaatcgctgcatatgggactgctgcaatgcttcttgtgatagtgtggaggcctcaaatccacattctttctatttcttctttgcaacggatcatcatgttggttgaagcagtgggcgctggctttttcatgggtttatacatcggttatgtgcaccaatacaattccgtgaattcccggccagatgtcttgaagtcattatattctcctcttcagccgtcaagttctatggaaggtttgaggtattatgaaggccggctttctgatcaacaaacggctttgttacaatatcaacgcgaaaatctccattttctaagcgaggagattctgtgcttgcaagagaaacttagcaaatatgaacaatctgatgatggaagcacacctcaggttgatctcgcacatcttttagctgctcgagatcaagagctgaggacactttcagctgagatgaatcagcttcagtctgagctacggcttgctcgttctttaatagccgagagagatgcagaggtgcagcgtgtcaacagtaccaacaaccagtatatcgaagaaaacgaaagactgagggcaattttgagtgaatggagcatgcgggcagcgaatcttgagagagctttggaagtggaacggatgtcgaactcagaactacagaaggaagtagcaagcacgcgtagaaagcagatgcttgagacaacaacgtctgagcaaccttaattctaatatgggaatcaaagcttatataggtttttaacataatctctaaagtttgatggtgtaactataaagatcatggaatgtgtctacggaaagaagtttgtgtagtaaacggctcttttgtt

SEQ ID NO: 84098 - protein, 277 aa, Arabidopsis thaliana
  peptide (1)..(277): Ceres Seq. ID no. 12673126
  misc_feature (1)..(277): Homolog of NCBI NO: 18396221 NR Description: Expressed protein; protein id: At2g06005.1, by cDNA: 253548. [Arabidopsis thaliana] Expressed protein [Arabidopsis thaliana]
  misc_feature (50)..(277): Homolog of NCBI NO: 20453094 NR Description: At2g06010/F5K7.23 [Arabidopsis thaliana]
  misc_feature (121)..(224): Homolog of NCBI NO: 25411202 NR Description: hypothetical protein At2g06010 [imported] -
  misc_feature (148)..(269): Homolog of NCBI NO: 15242018 NR Description: putative protein; protein id: At5g20580.1
SLWPIPGVFQQYFVYQVQKIRLQGYYSFSQKLKHVVRLPFAIAAYGTAAMLLVIVWRPQIHILSISSLQRIIMLVEAVGAGFFMGLYIGYVHQYNSVNSRPDVLKSLYSPLQPSSSMEGLRYYEGRLSDQQTALLQYQRENLHFLSEEILCLQEKLSKYEQSDDGSTPQVDLAHLLAARDQELRTLSAEMNQLQSELRLARSLIAERDAEVQRVNSTNNQYIEENERLRAILSEWSMRAANLERALEVERMSNSELQKEVASTRRKQMLETTTSEQP

SEQ ID NO: 84099 - protein, 228 aa, Arabidopsis thaliana
  peptide (1)..(228): Ceres Seq. ID no. 12673127
  misc_feature (1)..(228): Homolog of NCBI NO: 18396221 NR Description: Expressed protein; protein id: At2g06005.1, by cDNA: 253548. [Arabidopsis thaliana] Expressed protein [Arabidopsis thaliana]
  misc_feature (1)..(228): Homolog of NCBI NO: 20453094 NR Description: At2g06010/F5K7.23 [Arabidopsis thaliana]
  misc_feature (72)..(175): Homolog of NCBI NO: 25411202 NR Description: hypothetical protein At2g06010 [imported] -
  misc_feature (99)..(220): Homolog of NCBI NO: 15242018 NR Description: putative protein; protein id: At5g20580.1
MLLVIVWRPQIHILSISSLQRIIMLVEAVGAGFFMGLYIGYVHQYNSVNSRPDVLKSLYSPLQPSSSMEGLRYYEGRLSDQQTALLQYQRENLHFLSEEILCLQEKLSKYEQSDDGSTPQVDLAHLLAARDQELRTLSAEMNQLQSELRLARSLIAERDAEVQRVNSTNNQYIEENERLRAILSEWSMRAANLERALEVERMSNSELQKEVASTRRKQMLETTTSEQP

SEQ ID NO: 84100 - protein, 205 aa, Arabidopsis thaliana
  peptide (1)..(205): Ceres Seq. ID no. 12673128
  misc_feature (1)..(205): Homolog of NCBI NO: 18396221 NR Description: Expressed protein; protein id: At2g06005.1, by cDNA: 253548. [Arabidopsis thaliana] Expressed protein [Arabidopsis thaliana]
  misc_feature (1)..(205): Homolog of NCBI NO: 20453094 NR Description: At2g06010/F5K7.23 [Arabidopsis thaliana]
  misc_feature (49)..(152): Homolog of NCBI NO: 25411202 NR Description: hypothetical protein At2g06010 [imported] -
  misc_feature (76)..(197): Homolog of NCBI NO: 15242018 NR Description: putative protein; protein id: At5g20580.1
MLVEAVGAGFFMGLYIGYVHQYNSVNSRPDVLKSLYSPLQPSSSMEGLRYYEGRLSDQQTALLQYQRENLHFLSEEILCLQEKLSKYEQSDDGSTPQVDLAHLLAARDQELRTLSAEMNQLQSELRLARSLIAERDAEVQRVNSTNNQYIEENERLRAILSEWSMRAANLERALEVERMSNSELQKEVASTRRKQMLETTTSEQP

SEQ ID NO: 84101 - DNA, 1000 bp, Arabidopsis thaliana
  misc_feature (1)..(1000): Ceres Seq. ID no. 12673137
  misc_feature: MA Experiment ID: 108434 Result: Up-regulated in Transcription
  misc_feature: MA Experiment 108434 PARAMETER Experiment Name: At_Root_Tips_cDNA_P Parameter: Tissue Value: Root Tips
  misc_feature: MA Experiment ID: 108462 Result: Down-regulated in Transcription
  misc_feature: MA Experiment 108462 PARAMETER Experiment Name: At_Germinating_Seeds_cDNA_P Parameter: Age (day) Value: 2 vs. 0
  misc_feature: MA Experiment 108462 PARAMETER Experiment Name: At_Germinating_Seeds_cDNA_P Parameter: Tissue Value: Germinating Seeds
  misc_feature: MA Experiment ID: 108463 Result: Down-regulated in Transcription
  misc_feature: MA Experiment 108463 PARAMETER Experiment Name: At_Germinating_Seeds_cDNA_P Parameter: Age (day) Value: 3 vs. 0
  misc_feature: MA Experiment 108463 PARAMETER Experiment Name: At_Germinating_Seeds_cDNA_P Parameter: Tissue Value: Germinating Seeds
  misc_feature: MA Experiment ID: 108464 Result: Down-regulated in Transcription
  misc_feature: MA Experiment 108464 PARAMETER Experiment Name: At_Germinating_Seeds_cDNA_P Parameter: Age (day) Value: 4 vs. 0
  misc_feature: MA Experiment 108464 PARAMETER Experiment Name: At_Germinating_Seeds_cDNA_P Parameter: Tissue Value: Germinating Seeds
  misc_feature: MA Experiment ID: 108488 Result: Up-regulated in Transcription
  misc_feature: MA Experiment ID: 108489 Result: Up-regulated in Transcription
  misc_feature: MA Experiment ID: 108573 Result: Down-regulated in Transcription
  misc_feature: MA Experiment 108573 PARAMETER Experiment Name: At_Drought_cDNA_P Parameter: Timepoint (hr) Value: 6
  misc_feature: MA Experiment 108573 PARAMETER Experiment Name: At_Drought_cDNA_P Parameter: Tissue Value: Aerial
  misc_feature: MA Experiment 108573 PARAMETER Experiment Name: At_Drought_cDNA_P Parameter: Treatment Value: Drought vs. No Drought
  misc_feature: MA Experiment ID: 20000069 Result: Down-regulated in Transcription
  misc_feature: MA Experiment 20000069 PARAMETER Experiment Name: At_100uM_ABA_Mutants_cDNA_P Parameter: Plant Line Value: CS23
  misc_feature: MA Experiment 20000069 PARAMETER Experiment Name: At_100uM_ABA_Mutants_cDNA_P Parameter: Timepoint (hr) Value: 6
  misc_feature: MA Experiment 20000069 PARAMETER Experiment Name: At_100uM_ABA_Mutants_cDNA_P Parameter: Tissue Value: Aerial
  misc_feature: MA Experiment 20000069 PARAMETER Experiment Name: At_100uM_ABA_Mutants_cDNA_P Parameter: Treatment Value: 100uM ABA vs. No Treatment
  misc_feature: MA Experiment ID: 20000117 Result: Down-regulated in Transcription
  misc_feature: MA Experiment 20000117 PARAMETER Experiment Name: At_100uM_ABA_Mutants_cDNA_P Parameter: Plant Line Value: Columbia
  misc_feature: MA Experiment 20000117 PARAMETER Experiment Name: At_100uM_ABA_Mutants_cDNA_P Parameter: Timepoint (hr) Value: 6
  misc_feature: MA Experiment 20000117 PARAMETER Experiment Name: At_100uM_ABA_Mutants_cDNA_P Parameter: Tissue Value: Aerial
  misc_feature: MA Experiment 20000117 PARAMETER Experiment Name: At_100uM_ABA_Mutants_cDNA_P Parameter: Treatment Value: 100uM ABA vs. No Treatment
  misc_feature: MA Experiment ID: 20000234 Result: Up-regulated in Transcription
  misc_feature: MA Experiment 20000234 PARAMETER Experiment Name: At_Siliques_P Parameter: Age (day) Value: 21
  misc_feature: MA Experiment 20000234 PARAMETER Experiment Name: At_Siliques_P Parameter: Organism Value: A. thaliana
  misc_feature: MA Experiment 20000234 PARAMETER Experiment Name: At_Siliques_P Parameter: Plant Line Value: WS
  misc_feature: MA Experiment 20000234 PARAMETER Experiment Name: At_Siliques_P Parameter: Tissue Value: Less Than 5mm Siliques vs. Whole Plant
  misc_feature: MA Experiment ID: 20000437 Result: Down-regulated in Transcription
  misc_feature: MA Experiment 20000437 PARAMETER Experiment Name: At_Drought_P Parameter: Age (day) Value: 8
  misc_feature: MA Experiment 20000437 PARAMETER Experiment Name: At_Drought_P Parameter: Organism Value: A. thaliana
  misc_feature: MA Experiment 20000437 PARAMETER Experiment Name: At_Drought_P Parameter: Plant Line Value: WS
  misc_feature: MA Experiment 20000437 PARAMETER Experiment Name: At_Drought_P Parameter: Timepoint (hr) Value: 24
  misc_feature: MA Experiment 20000437 PARAMETER Experiment Name: At_Drought_P Parameter: Tissue Value: Whole Plant
  misc_feature: MA Experiment 20000437 PARAMETER Experiment Name: At_Drought_P Parameter: Treatment Value: Drought vs. No Drought
  misc_feature: MA Experiment ID: 20000438 Result: Up-regulated in Transcription
  misc_feature: MA Experiment 20000438 PARAMETER Experiment Name: At_Shoots__P Parameter: Age (day) Value: 14
  misc_feature: MA Experiment 20000438 PARAMETER Experiment Name: At_Shoots__P Parameter: Tissue Value: Shoots vs. Whole Plant
  misc_feature: MA Experiment ID: 20000496 Result: Up-regulated in Transcription
  misc_feature: MA Experiment 20000496 PARAMETER Experiment Name: At_Guard_Cells_P Parameter: Harvest Date Value: 7/19/2002
  misc_feature: MA Experiment 20000496 PARAMETER Experiment Name: At_Guard_Cells_P Parameter: Organism Value: Canola
  misc_feature: MA Experiment 20000496 PARAMETER Experiment Name: At_Guard_Cells_P Parameter: Tissue Value: Guard Cells vs. Leaves
  misc_feature: MA Experiment ID: 20000794 Result: Down-regulated in Transcription
  misc_feature: MA Experiment 20000794 PARAMETER Experiment Name: At_Petals_P Parameter: Age (day) Value: 23-25 days
  misc_feature: MA Experiment 20000794 PARAMETER Experiment Name: At_Petals_P Parameter: Plant Line Value: WS
  misc_feature: MA Experiment 20000794 PARAMETER Experiment Name: At_Petals_P Parameter: Tissue Value: Petals vs. Whole plant
  misc_feature: MA Experiment ID: 20001558 Result: Up-regulated in Transcription
  misc_feature: MA Experiment 20001558 PARAMETER Experiment Name: At_Drought_Soil_Dry_P Parameter: Age (day) Value: 27
  misc_feature: MA Experiment 20001558 PARAMETER Experiment Name: At_Drought_Soil_Dry_P Parameter: Organism Value: A. thaliana
  misc_feature: MA Experiment 20001558 PARAMETER Experiment Name: At_Drought_Soil_Dry_P Parameter: Plant Line Value: WS
  misc_feature: MA Experiment 20001558 PARAMETER Experiment Name: At_Drought_Soil_Dry_P Parameter: Post Timepoint (hr) Value: 6
  misc_feature: MA Experiment 20001558 PARAMETER Experiment Name: At_Drought_Soil_Dry_P Parameter: Post-Treatment Value: Re-Water vs. No Drought
  misc_feature: MA Experiment 20001558 PARAMETER Experiment Name: At_Drought_Soil_Dry_P Parameter: Timepoint (day) Value: 13
  misc_feature: MA Experiment 20001558 PARAMETER Experiment Name: At_Drought_Soil_Dry_P Parameter: Treatment Value: Drought vs. No Drought
  misc_feature: MA Experiment ID: 20001757 Result: Up-regulated in Transcription
  misc_feature: MA Experiment 20001757 PARAMETER Experiment Name: At_50mM_NH4NO3_L-to-H_P Parameter: Timepoint (hr) Value: 6
  misc_feature: MA Experiment 20001757 PARAMETER Experiment Name: At_50mM_NH4NO3_L-to-H_P Parameter: Tissue Value: Leaf
  misc_feature: MA Experiment 20001757 PARAMETER Experiment Name: At_50mM_NH4NO3_L-to-H_P Parameter: Treatment Value: 50mM NH4NO3 vs 100mM Mannitol
aggttaaaacttattgttgattcttctctattcgtcgtcgacctattttcctcagccatggccgtcgggaaaaacaagagaatctctaagggtaggaagggaggaaagaagaaggctgttgatcctttctccaagaaagattggtatgatgttaaggctccttcaatcttcactcacaggaatgttggaaagacacttgtttccagaactcagggtaccaaaattgcctcagaaggcttgaaacacagagtttttgaggtttctcttgctgatcttcaaggtgatgaggataacgcttacaggaagatccgtctcagagctgaagatgtccagggcaggaacgttctgtgccaattctggggcatggacttcaccaccgataaacttaggtcattggttaagaagtggcagactttgattgaggctcatgttgatgttaaaaccaccgacagttacactctcaggctattctgtatcgccttcaccaagagacgtgctaaccaggtcaagaggacttgctacgctcaatccagccaaatccgtcagatccgcaggaagatgagggacatcatggttagggaagcttcctcatgtgaccttaaggatcttgttgctaagttcattcctgaagctattggcagggagattgagaaggcaactcagggcatctaccctcttcagaatgttttcatccgtaaagtcaagatcctcaaggcccctaaattcgaccttggcaagctcatggatgttcacggagattactcagcagaagatgttggtgttaaggtagacaggccggctgatgagatggctgttgaggaacctactgaaatcatcggagcttaagaaatcgagagatgtctttttcttctaaactttagctttttgatgctctgtcgtttcacacactcttttgttcccggtttaattttgctgtattgatgacttttctcagtgtaaacttgcgagtttttgataatttatggaacaccttttctct

SEQ ID NO: 84102 - protein, 281 aa, Arabidopsis thaliana; identical to SEQ ID NO: 30529
  peptide (1)..(281): Ceres Seq. ID no. 12673138
  misc_feature (30)..(241): Pfam Name: Ribosomal S3Ae family Pfam Description: Ribosomal S3Ae family
  misc_feature (20)..(281): Homolog of NCBI NO: 15229364 NR Description: putative 40S ribosomal protein S3A (S phase protein id: At3g04840.1, supported by cDNA: 18185., supported by gi_17065439, supported by cDNA: gi_20148512 [Arabidopsis
  misc_feature (20)..(281): Homolog of NCBI NO: 15236171 NR Description: Putative S-phase-specific ribosomal protein; id: At4g34670.1, supported by cDNA: gi_17064847 [Arabidopsis
  misc_feature (20)..(281): Homolog of NCBI NO: 1350981 NR Description: 40S RIBOSOMAL PROTEIN S3A (S PHASE SPECIFIC
  misc_feature (20)..(281): Homolog of NCBI NO: 1350983 NR Description: 40S RIBOSOMAL PROTEIN S3A (CYC07 PROTEIN)
  misc_feature (20)..(281): Homolog of NCBI NO: 24817254 NR Description: ribosomal protein S3a [Cicer arietinum]
  misc_feature (20)..(281): Homolog of NCBI NO: 1350984 NR Description: 40S RIBOSOMAL PROTEIN S3A >gi|7441118|pir||T09301
  misc_feature (20)..(281): Homolog of NCBI NO: 6714564 NR Description: cyc07 [Daucus carota]
  misc_feature (20)..(272): Homolog of NCBI NO: 1350986 NR Description: 40S RIBOSOMAL PROTEIN S3A (CYC07 PROTEIN)
  misc_feature (20)..(258): Homolog of NCBI NO: 1856971 NR Description: This gene is specifically expressed at the S during the cell cycle in the synchronous culture of periwinkle
  misc_feature (20)..(258): Homolog of NCBI NO: 82065 NR Description: ribosomal protein S3a - Madagascar periwinkle

SEQ ID NO: 84103 - protein, 262 aa, Arabidopsis thaliana; identical to SEQ ID NO: 30530
  peptide (1)..(262): Ceres Seq. ID no. 12673139
  misc_feature (11)..(222): Pfam Name: Ribosomal S3Ae family Pfam Description: Ribosomal S3Ae family
  misc_feature (1)..(262): Homolog of NCBI NO: 15229364 NR Description: putative 40S ribosomal protein S3A (S phase protein id: At3g04840.1, supported by cDNA: 18185., supported by gi_17065439, supported by cDNA: gi_20148512 [Arabidopsis
  misc_feature (1)..(262): Homolog of NCBI NO: 15236171 NR Description: Putative S-phase-specific ribosomal protein; id: At4g34670.1, supported by cDNA: gi_17064847 [Arabidopsis
  misc_feature (1)..(262): Homolog of NCBI NO: 1350981 NR Description: 40S RIBOSOMAL PROTEIN S3A (S PHASE SPECIFIC
  misc_feature (1)..(262): Homolog of NCBI NO: 1350983 NR Description: 40S RIBOSOMAL PROTEIN S3A (CYC07 PROTEIN)
  misc_feature (1)..(262): Homolog of NCBI NO: 24817254 NR Description: ribosomal protein S3a [Cicer arietinum]
  misc_feature (1)..(262): Homolog of NCBI NO: 1350984 NR Description: 40S RIBOSOMAL PROTEIN S3A >gi|7441118|pir||T09301
  misc_feature (1)..(262): Homolog of NCBI NO: 6714564 NR Description: cyc07 [Daucus carota]
  misc_feature (1)..(253): Homolog of NCBI NO: 1350986 NR Description: 40S RIBOSOMAL PROTEIN S3A (CYC07 PROTEIN)
  misc_feature (1)..(239): Homolog of NCBI NO: 1856971 NR Description: This gene is specifically expressed at the S during the cell cycle in the synchronous culture of periwinkle
  misc_feature (1)..(239): Homolog of NCBI NO: 82065 NR Description: ribosomal protein S3a - Madagascar periwinkle

SEQ ID NO: 84104 - protein, 160 aa, Arabidopsis thaliana; identical to SEQ ID NO: 30531
  peptide (1)..(160): Ceres Seq. ID no. 12673140
  misc_feature (1)..(120): Pfam Name: Ribosomal S3Ae family Pfam Description: Ribosomal S3Ae family
  misc_feature (1)..(160): Homolog of NCBI NO: 15229364 NR Description: putative 40S ribosomal protein S3A (S phase protein id: At3g04840.1, supported by cDNA: 18185., supported by gi_17065439, supported by cDNA: gi_20148512 [Arabidopsis
  misc_feature (1)..(160): Homolog of NCBI NO: 15236171 NR Description: Putative S-phase-specific ribosomal protein; id: At4g34670.1, supported by cDNA: gi_17064847 [Arabidopsis
  misc_feature (1)..(160): Homolog of NCBI NO: 1350981 NR Description: 40S RIBOSOMAL PROTEIN S3A (S PHASE SPECIFIC
  misc_feature (1)..(160): Homolog of NCBI NO: 1350983 NR Description: 40S RIBOSOMAL PROTEIN S3A (CYC07 PROTEIN)
  misc_feature (1)..(160): Homolog of NCBI NO: 24817254 NR Description: ribosomal protein S3a [Cicer arietinum]
  misc_feature (1)..(160): Homolog of NCBI NO: 1350984 NR Description: 40S RIBOSOMAL PROTEIN S3A >gi|7441118|pir||T09301
  misc_feature (1)..(160): Homolog of NCBI NO: 6714564 NR Description: cyc07 [Daucus carota]
  misc_feature (1)..(151): Homolog of NCBI NO: 1350986 NR Description: 40S RIBOSOMAL PROTEIN S3A (CYC07 PROTEIN)
  misc_feature (1)..(137): Homolog of NCBI NO: 1856971 NR Description: This gene is specifically expressed at the S during the cell cycle in the synchronous culture of periwinkle
  misc_feature (1)..(137): Homolog of NCBI NO: 82065 NR Description: ribosomal protein S3a - Madagascar periwinkle

SEQ ID NO: 84105 - DNA, 604 bp, Arabidopsis thaliana
  misc_feature (1)..(604): Ceres Seq. ID no. 12673159
  misc_feature: MA Experiment ID: 108462 Result: Up-regulated in Transcription
  misc_feature: MA Experiment 108462 PARAMETER Experiment Name: At_Germinating_Seeds_cDNA_P Parameter: Age (day) Value: 2 vs. 0
  misc_feature: MA Experiment 108462 PARAMETER Experiment Name: At_Germinating_Seeds_cDNA_P Parameter: Tissue Value: Germinating Seeds
  misc_feature: MA Experiment ID: 108488 Result: Down-regulated in Transcription
  misc_feature: MA Experiment ID: 108668 Result: Up-regulated in Transcription
  misc_feature: MA Experiment 108668 PARAMETER Experiment Name: At_2mM_SA_cDNA_P Parameter: Plant Line Value: WS
  misc_feature: MA Experiment 108668 PARAMETER Experiment Name: At_2mM_SA_cDNA_P Parameter: Timepoint (hr) Value: 6
  misc_feature: MA Experiment 108668 PARAMETER Experiment Name: At_2mM_SA_cDNA_P Parameter: Treatment Value: 2mM SA vs. No Treatment
  misc_feature: MA Experiment ID: 20000069 Result: Up-regulated in Transcription
  misc_feature: MA Experiment 20000069 PARAMETER Experiment Name: At_100uM_ABA_Mutants_cDNA_P Parameter: Plant Line Value: CS23
  misc_feature: MA Experiment 20000069 PARAMETER Experiment Name: At_100uM_ABA_Mutants_cDNA_P Parameter: Timepoint (hr) Value: 6
  misc_feature: MA Experiment 20000069 PARAMETER Experiment Name: At_100uM_ABA_Mutants_cDNA_P Parameter: Tissue Value: Aerial
  misc_feature: MA Experiment 20000069 PARAMETER Experiment Name: At_100uM_ABA_Mutants_cDNA_P Parameter: Treatment Value: 100uM ABA vs. No Treatment
  misc_feature: MA Experiment ID: 20000071 Result: Up-regulated in Transcription
  misc_feature: MA Experiment 20000071 PARAMETER Experiment Name: At_100uM_ABA_Mutants_cDNA_P Parameter: Plant Line Value: CS8104
  misc_feature: MA Experiment 20000071 PARAMETER Experiment Name: At_100uM_ABA_Mutants_cDNA_P Parameter: Timepoint (hr) Value: 6
  misc_feature: MA Experiment 20000071 PARAMETER Experiment Name: At_100uM_ABA_Mutants_cDNA_P Parameter: Tissue Value: Aerial
  misc_feature: MA Experiment 20000071 PARAMETER Experiment Name: At_100uM_ABA_Mutants_cDNA_P Parameter: Treatment Value: 100uM ABA vs. No Treatment
  misc_feature: MA Experiment ID: 20000072 Result: Up-regulated in Transcription
  misc_feature: MA Experiment 20000072 PARAMETER Experiment Name: At_100uM_ABA_Mutants_cDNA_P Parameter: Plant Line Value: CS8105
  misc_feature: MA Experiment 20000072 PARAMETER Experiment Name: At_100uM_ABA_Mutants_cDNA_P Parameter: Timepoint (hr) Value: 6
  misc_feature: MA Experiment 20000072 PARAMETER Experiment Name: At_100uM_ABA_Mutants_cDNA_P Parameter: Tissue Value: Aerial
  misc_feature: MA Experiment 20000072 PARAMETER Experiment Name: At_100uM_ABA_Mutants_cDNA_P Parameter: Treatment Value: 100uM ABA vs. No Treatment
  misc_feature: MA Experiment ID: 20000089 Result: Up-regulated in Transcription
  misc_feature: MA Experiment ID: 20000090 Result: Up-regulated in Transcription
  misc_feature: MA Experiment ID: 20000111 Result: Down-regulated in Transcription
  misc_feature: MA Experiment 20000111 PARAMETER Experiment Name: At_42deg_Heat_cDNA_P Parameter: Temperature (deg C) Value: 42 vs. 22
  misc_feature: MA Experiment 20000111 PARAMETER Experiment Name: At_42deg_Heat_cDNA_P Parameter: Timepoint (hr) Value: 6
  misc_feature: MA Experiment 20000111 PARAMETER Experiment Name: At_42deg_Heat_cDNA_P Parameter: Tissue Value: Aerial
  misc_feature: MA Experiment ID: 20000113 Result: Down-regulated in Transcription
  misc_feature: MA Experiment 20000113 PARAMETER Experiment Name: At_42deg_Heat_cDNA_P Parameter: Temperature (deg C) Value: 42 vs. 22
  misc_feature: MA Experiment 20000113 PARAMETER Experiment Name: At_42deg_Heat_cDNA_P Parameter: Timepoint (hr) Value: 8
  misc_feature: MA Experiment 20000113 PARAMETER Experiment Name: At_42deg_Heat_cDNA_P Parameter: Tissue Value: Aerial
  misc_feature: MA Experiment ID: 20000117 Result: Up-regulated in Transcription
  misc_feature: MA Experiment 20000117 PARAMETER Experiment Name: At_100uM_ABA_Mutants_cDNA_P Parameter: Plant Line Value: Columbia
  misc_feature: MA Experiment 20000117 PARAMETER Experiment Name: At_100uM_ABA_Mutants_cDNA_P Parameter: Timepoint (hr) Value: 6
  misc_feature: MA Experiment 20000117 PARAMETER Experiment Name: At_100uM_ABA_Mutants_cDNA_P Parameter: Tissue Value: Aerial
  misc_feature: MA Experiment 20000117 PARAMETER Experiment Name: At_100uM_ABA_Mutants_cDNA_P Parameter: Treatment Value: 100uM ABA vs. No Treatment
  misc_feature: MA Experiment ID: 20000173 Result: Down-regulated in Transcription
  misc_feature: MA Experiment 20000173 PARAMETER Experiment Name: At_42deg_Heat_P Parameter: Age (day) Value: 14
  misc_feature: MA Experiment 20000173 PARAMETER Experiment Name: At_42deg_Heat_P Parameter: Organism Value: A. thaliana
  misc_feature: MA Experiment 20000173 PARAMETER Experiment Name: At_42deg_Heat_P Parameter: Plant Line Value: WS
  misc_feature: MA Experiment 20000173 PARAMETER Experiment Name: At_42deg_Heat_P Parameter: Temperature (deg C) Value: 42 vs. 22
  misc_feature: MA Experiment 20000173 PARAMETER Experiment Name: At_42deg_Heat_P Parameter: Timepoint (hr) Value: 6
  misc_feature: MA Experiment 20000173 PARAMETER Experiment Name: At_42deg_Heat_P Parameter: Tissue Value: Aerial
  misc_feature: MA Experiment ID: 20000179 Result: Up-regulated in Transcription
  misc_feature: MA Experiment 20000179 PARAMETER Experiment Name: At_Germinating_Seeds_P Parameter: Age (hr) Value: 6 vs. 0
  misc_feature: MA Experiment 20000179 PARAMETER Experiment Name: At_Germinating_Seeds_P Parameter: Tissue Value: Germinating Seeds
  misc_feature: MA Experiment ID: 20000180 Result: Up-regulated in Transcription
  misc_feature: MA Experiment 20000180 PARAMETER Experiment Name: At_Germinating_Seeds_P Parameter: Age (hr) Value: 24 vs. 0
  misc_feature: MA Experiment 20000180 PARAMETER Experiment Name: At_Germinating_Seeds_P Parameter: Tissue Value: Germinating Seeds
  misc_feature: MA Experiment ID: 20000184 Result: Down-regulated in Transcription
  misc_feature: MA Experiment 20000184 PARAMETER Experiment Name: At_Shoots__P Parameter: Age (day) Value: 7
  misc_feature: MA Experiment 20000184 PARAMETER Experiment Name: At_Shoots__P Parameter: Tissue Value: Shoots vs. Whole Plant
  misc_feature: MA Experiment ID: 20000437 Result: Up-regulated in Transcription
  misc_feature: MA Experiment 20000437 PARAMETER Experiment Name: At_Drought_P Parameter: Age (day) Value: 8
  misc_feature: MA Experiment 20000437 PARAMETER Experiment Name: At_Drought_P Parameter: Organism Value: A. thaliana
  misc_feature: MA Experiment 20000437 PARAMETER Experiment Name: At_Drought_P Parameter: Plant Line Value: WS
  misc_feature: MA Experiment 20000437 PARAMETER Experiment Name: At_Drought_P Parameter: Timepoint (hr) Value: 24
  misc_feature: MA Experiment 20000437 PARAMETER Experiment Name: At_Drought_P Parameter: Tissue Value: Whole Plant
  misc_feature: MA Experiment 20000437 PARAMETER Experiment Name: At_Drought_P Parameter: Treatment Value: Drought vs. No Drought
  misc_feature: MA Experiment ID: 20000438 Result: Down-regulated in Transcription
  misc_feature: MA Experiment 20000438 PARAMETER Experiment Name: At_Shoots__P Parameter: Age (day) Value: 14
  misc_feature: MA Experiment 20000438 PARAMETER Experiment Name: At_Shoots__P Parameter: Tissue Value: Shoots vs. Whole Plant
  misc_feature: MA Experiment ID: 20001558 Result: Down-regulated in Transcription
  misc_feature: MA Experiment 20001558 PARAMETER Experiment Name: At_Drought_Soil_Dry_P Parameter: Age (day) Value: 27
  misc_feature: MA Experiment 20001558 PARAMETER Experiment Name: At_Drought_Soil_Dry_P Parameter: Organism Value: A. thaliana
  misc_feature: MA Experiment 20001558 PARAMETER Experiment Name: At_Drought_Soil_Dry_P Parameter: Plant Line Value: WS
  misc_feature: MA Experiment 20001558 PARAMETER Experiment Name: At_Drought_Soil_Dry_P Parameter: Post Timepoint (hr) Value: 6
  misc_feature: MA Experiment 20001558 PARAMETER Experiment Name: At_Drought_Soil_Dry_P Parameter: Post-Treatment Value: Re-Water vs. No Drought
  misc_feature: MA Experiment 20001558 PARAMETER Experiment Name: At_Drought_Soil_Dry_P Parameter: Timepoint (day) Value: 13
  misc_feature: MA Experiment 20001558 PARAMETER Experiment Name: At_Drought_Soil_Dry_P Parameter: Treatment Value: Drought vs. No Drought
agaaaatcctaactccagtcttgcattctgggaatagtttagagatggggagattgttcttggtgaatttggaaggcaagtcttacagttgtaagcactgcaagaccaatcttgctctctgtgatgatgtcgtctctaagtcttttcagtcccgacatgggaaagcttacctcttcagtaaggtagtgaatgtgtatgctggcaagaaagaagataggatgatgatgacgggaatgcatacggtggtcgatatttactgtgtcaaatgcggctcttatgttggatggaaatatgagtttgcttttgagaagaatcaaaagtacaaggaaggaaaatctgttctcgaaaggtacaaggtctggggtccagatgggaacaattattgggtggctcaagaagttgaagccggagacagcgatactgatgatgcttgattctcatcattcatatctgatttgtacattccctccaactctttcatttttctttattctttttcctcattttgtaaaccatctatcttacattagaacagcttccgagaccaattgtttggtcattgctgcaactactttggacacataagttaaagatctcattatct

SEQ ID NO: 84106 - protein, 143 aa, Arabidopsis thaliana; identical to SEQ ID NO: 37359
  peptide (1)..(143): Ceres Seq. ID no. 12673160
  misc_feature (15)..(122): Pfam Name: Yippee putative zinc-binding protein Pfam Description: Yippee putative zinc-binding protein
  misc_feature (15)..(143): Homolog of NCBI NO: 18399156 NR Description: expressed protein; protein id: At3g11230.1,
  misc_feature (15)..(143): Homolog of NCBI NO: 21617953 NR Description: yippee-like protein [Arabidopsis thaliana]
  misc_feature (15)..(143): Homolog of NCBI NO: 15225631 NR Description: unknown protein; protein id: At2g40110.1, by cDNA: 16208. [Arabidopsis thaliana] >gi|25367152|pir||D84825
  misc_feature (15)..(142): Homolog of NCBI NO: 27923880 NR Description: Yippee-like protein >gi|24745964|dbj|BAC23053.1|
  misc_feature (15)..(142): Homolog of NCBI NO: 28273361 NR Description: putative zinc binding protein [Oryza sativa
  misc_feature (15)..(135): Homolog of NCBI NO: 15228759 NR Description: Yippee-like protein; protein id: At3g55890.1, by cDNA: gi_15293034, supported by cDNA: gi_20259292 [Arabidopsis
  misc_feature (15)..(117): Homolog of NCBI NO: 15232001 NR Description: Yippee-like protein; protein id: At3g08990.1
  misc_feature (15)..(143): Homolog of NCBI NO: 15238881 NR Description: zinc-binding protein-like; protein id:
  misc_feature (15)..(117): Homolog of NCBI NO: 34393694 NR Description: Yippee-like protein [Oryza sativa (japonica
  misc_feature (26)..(115): Homolog of NCBI NO: 20840809 NR Description: similar to hypothetical protein FLJ30213 [Homo [Mus musculus] >gi|27701004|ref|XP_230277.1| similar to

SEQ ID NO: 84107 - protein, 129 aa, Arabidopsis thaliana; identical to SEQ ID NO: 37360
  peptide (1)..(129): Ceres Seq. ID no. 12673161
  misc_feature (1)..(108): Pfam Name: Yippee putative zinc-binding protein Pfam Description: Yippee putative zinc-binding protein
  misc_feature (1)..(129): Homolog of NCBI NO: 18399156 NR Description: expressed protein; protein id: At3g11230.1,
  misc_feature (1)..(129): Homolog of NCBI NO: 21617953 NR Description: yippee-like protein [Arabidopsis thaliana]
  misc_feature (1)..(129): Homolog of NCBI NO: 15225631 NR Description: unknown protein; protein id: At2g40110.1, by cDNA: 16208. [Arabidopsis thaliana] >gi|25367152|pir||D84825
  misc_feature (1)..(128): Homolog of NCBI NO: 27923880 NR Description: Yippee-like protein >gi|24745964|dbj|BAC23053.1|
  misc_feature (1)..(128): Homolog of NCBI NO: 28273361 NR Description: putative zinc binding protein [Oryza sativa
  misc_feature (1)..(121): Homolog of NCBI NO: 15228759 NR Description: Yippee-like protein; protein id: At3g55890.1, by cDNA: gi_15293034, supported by cDNA: gi_20259292 [Arabidopsis
  misc_feature (1)..(103): Homolog of NCBI NO: 15232001 NR Description: Yippee-like protein; protein id: At3g08990.1
  misc_feature (1)..(129): Homolog of NCBI NO: 15238881 NR Description: zinc-binding protein-like; protein id:
  misc_feature (1)..(103): Homolog of NCBI NO: 34393694 NR Description: Yippee-like protein [Oryza sativa (japonica
  misc_feature (12)..(101): Homolog of NCBI NO: 20840809 NR Description: similar to hypothetical protein FLJ30213 [Homo [Mus musculus] >gi|27701004|ref|XP_230277.1| similar to

SEQ ID NO: 84108 - protein, 102 aa, Arabidopsis thaliana
  peptide (1)..(102): Ceres Seq. ID no. 12673162
MLDGNMSLLLRRIKSTRKENLFSKGTRSGVQMGTIIGWLKKLKPETAILMMLDSHHSYLICTFPPTLSFFFILFPHFVNHLSYIRTASETNCLVIAATTLDT

SEQ ID NO: 84109 - DNA, 591 bp, Arabidopsis thaliana
  misc_feature (1)..(591): Ceres Seq. ID no. 12673163
  misc_feature: MA Experiment ID: 20000173 Result: Down-regulated in Transcription
  misc_feature: MA Experiment 20000173 PARAMETER Experiment Name: At_42deg_Heat_P Parameter: Age (day) Value: 14
  misc_feature: MA Experiment 20000173 PARAMETER Experiment Name: At_42deg_Heat_P Parameter: Organism Value: A. thaliana
  misc_feature: MA Experiment 20000173 PARAMETER Experiment Name: At_42deg_Heat_P Parameter: Plant Line Value: WS
  misc_feature: MA Experiment 20000173 PARAMETER Experiment Name: At_42deg_Heat_P Parameter: Temperature (deg C) Value: 42 vs. 22
  misc_feature: MA Experiment 20000173 PARAMETER Experiment Name: At_42deg_Heat_P Parameter: Timepoint (hr) Value: 6
  misc_feature: MA Experiment 20000173 PARAMETER Experiment Name: At_42deg_Heat_P Parameter: Tissue Value: Aerial
  misc_feature: MA Experiment ID: 20000179 Result: Up-regulated in Transcription
  misc_feature: MA Experiment 20000179 PARAMETER Experiment Name: At_Germinating_Seeds_P Parameter: Age (hr) Value: 6 vs. 0
  misc_feature: MA Experiment 20000179 PARAMETER Experiment Name: At_Germinating_Seeds_P Parameter: Tissue Value: Germinating Seeds
  misc_feature: MA Experiment ID: 20000180 Result: Up-regulated in Transcription
  misc_feature: MA Experiment 20000180 PARAMETER Experiment Name: At_Germinating_Seeds_P Parameter: Age (hr) Value: 24 vs. 0
  misc_feature: MA Experiment 20000180 PARAMETER Experiment Name: At_Germinating_Seeds_P Parameter: Tissue Value: Germinating Seeds
  misc_feature: MA Experiment ID: 20000184 Result: Down-regulated in Transcription
  misc_feature: MA Experiment 20000184 PARAMETER Experiment Name: At_Shoots__P Parameter: Age (day) Value: 7
  misc_feature: MA Experiment 20000184 PARAMETER Experiment Name: At_Shoots__P Parameter: Tissue Value: Shoots vs. Whole Plant
  misc_feature: MA Experiment ID: 20000437 Result: Up-regulated in Transcription
  misc_feature: MA Experiment 20000437 PARAMETER Experiment Name: At_Drought_P Parameter: Age (day) Value: 8
  misc_feature: MA Experiment 20000437 PARAMETER Experiment Name: At_Drought_P Parameter: Organism Value: A. thaliana
  misc_feature: MA Experiment 20000437 PARAMETER Experiment Name: At_Drought_P Parameter: Plant Line Value: WS
  misc_feature: MA Experiment 20000437 PARAMETER Experiment Name: At_Drought_P Parameter: Timepoint (hr) Value: 24
  misc_feature: MA Experiment 20000437 PARAMETER Experiment Name: At_Drought_P Parameter: Tissue Value: Whole Plant
  misc_feature: MA Experiment 20000437 PARAMETER Experiment Name: At_Drought_P Parameter: Treatment Value: Drought vs. No Drought
  misc_feature: MA Experiment ID: 20000438 Result: Down-regulated in Transcription
  misc_feature: MA Experiment 20000438 PARAMETER Experiment Name: At_Shoots__P Parameter: Age (day) Value: 14
  misc_feature: MA Experiment 20000438 PARAMETER Experiment Name: At_Shoots__P Parameter: Tissue Value: Shoots vs. Whole Plant
  misc_feature: MA Experiment ID: 20001558 Result: Down-regulated in Transcription
  misc_feature: MA Experiment 20001558 PARAMETER Experiment Name: At_Drought_Soil_Dry_P Parameter: Age (day) Value: 27
  misc_feature: MA Experiment 20001558 PARAMETER Experiment Name: At_Drought_Soil_Dry_P Parameter: Organism Value: A. thaliana
  misc_feature: MA Experiment 20001558 PARAMETER Experiment Name: At_Drought_Soil_Dry_P Parameter: Plant Line Value: WS
  misc_feature: MA Experiment 20001558 PARAMETER Experiment Name: At_Drought_Soil_Dry_P Parameter: Post Timepoint (hr) Value: 6
  misc_feature: MA Experiment 20001558 PARAMETER Experiment Name: At_Drought_Soil_Dry_P Parameter: Post-Treatment Value: Re-Water vs. No Drought
  misc_feature: MA Experiment 20001558 PARAMETER Experiment Name: At_Drought_Soil_Dry_P Parameter: Timepoint (day) Value: 13
  misc_feature: MA Experiment 20001558 PARAMETER Experiment Name: At_Drought_Soil_Dry_P Parameter: Treatment Value: Drought vs. No Drought
gcttttatagattctgggaatagtttagagatggggagattgttcttggtgaatttggaaggcaagtcttacagttgtaagcactgcaagaccaatcttgctctctgtgatgatgtcgtctctaagtcttttcagtcccgacatgggaaagcttacctcttcagtaaggtagtgaatgtgtatgctggcaagaaagaagataggatgatgatgacgggaatgcatacggtggtcgatatttactgtgtcaaatgcggctcttatgttggatggaaatatgagtttgcttttgagaagaatcaaaagtacaaggaaggaaaatctgttctcgaaaggtacaaggtctggggtccagatgggaacaattattgggtggctcaagaagttgaagccggagacagcgatactgatgatgcttgattctcatcattcatatctgatttgtacattccctccaactctttcatttttctttattctttttcctcattttgtaaaccatctatcttacattagaacagcttccgagaccaattgtttggtcattgctgcaactactttggacacataagttaaagatctcattatctt

SEQ ID NO: 84110 - protein, 139 aa, Arabidopsis thaliana
  peptide (1)..(139): Ceres Seq. ID no. 12673164
  misc_feature (11)..(118): Pfam Name: Yippee putative zinc-binding protein Pfam Description: Yippee putative zinc-binding protein
  misc_feature (11)..(139): Homolog of NCBI NO: 18399156 NR Description: expressed protein; protein id: At3g11230.1,
  misc_feature (11)..(139): Homolog of NCBI NO: 21617953 NR Description: yippee-like protein [Arabidopsis thaliana]
  misc_feature (11)..(139): Homolog of NCBI NO: 15225631 NR Description: unknown protein; protein id: At2g40110.1, by cDNA: 16208. [Arabidopsis thaliana] >gi|25367152|pir||D84825
  misc_feature (11)..(138): Homolog of NCBI NO: 27923880 NR Description: Yippee-like protein >gi|24745964|dbj|BAC23053.1|
  misc_feature (11)..(138): Homolog of NCBI NO: 28273361 NR Description: putative zinc binding protein [Oryza sativa
  misc_feature (11)..(131): Homolog of NCBI NO: 15228759 NR Description: Yippee-like protein; protein id: At3g55890.1, by cDNA: gi_15293034, supported by cDNA: gi_20259292 [Arabidopsis
  misc_feature (11)..(113): Homolog of NCBI NO: 15232001 NR Description: Yippee-like protein; protein id: At3g08990.1
  misc_feature (11)..(139): Homolog of NCBI NO: 15238881 NR Description: zinc-binding protein-like; protein id:
  misc_feature (11)..(113): Homolog of NCBI NO: 34393694 NR Description: Yippee-like protein [Oryza sativa (japonica
  misc_feature (22)..(111): Homolog of NCBI NO: 20840809 NR Description: similar to hypothetical protein FLJ30213 [Homo [Mus musculus] >gi|27701004|ref|XP_230277.1| similar to
AFIDSGNSLEMGRLFLVNLEGKSYSCKHCKTNLALCDDVVSKSFQSRHGKAYLFSKVVNVYAGKKEDRMMMTGMHTVVDIYCVKCGSYVGWKYEFAFEKNQKYKEGKSVLERYKVWGPDGNNYWVAQEVEAGDSDTDDA

SEQ ID NO: 84111 - protein, 129 aa, Arabidopsis thaliana; identical to SEQ ID NO: 37360
  peptide (1)..(129): Ceres Seq. ID no. 12673165
  misc_feature (1)..(108): Pfam Name: Yippee putative zinc-binding protein Pfam Description: Yippee putative zinc-binding protein
  misc_feature (1)..(129): Homolog of NCBI NO: 18399156 NR Description: expressed protein; protein id: At3g11230.1,
  misc_feature (1)..(129): Homolog of NCBI NO: 21617953 NR Description: yippee-like protein [Arabidopsis thaliana]
  misc_feature (1)..(129): Homolog of NCBI NO: 15225631 NR Description: unknown protein; protein id: At2g40110.1, by cDNA: 16208. [Arabidopsis thaliana] >gi|25367152|pir||D84825
  misc_feature (1)..(128): Homolog of NCBI NO: 27923880 NR Description: Yippee-like protein >gi|24745964|dbj|BAC23053.1|
  misc_feature (1)..(128): Homolog of NCBI NO: 28273361 NR Description: putative zinc binding protein [Oryza sativa
  misc_feature (1)..(121): Homolog of NCBI NO: 15228759 NR Description: Yippee-like protein; protein id: At3g55890.1, by cDNA: gi_15293034, supported by cDNA: gi_20259292 [Arabidopsis
  misc_feature (1)..(103): Homolog of NCBI NO: 15232001 NR Description: Yippee-like protein; protein id: At3g08990.1
  misc_feature (1)..(129): Homolog of NCBI NO: 15238881 NR Description: zinc-binding protein-like; protein id:
  misc_feature (1)..(103): Homolog of NCBI NO: 34393694 NR Description: Yippee-like protein [Oryza sativa (japonica
  misc_feature (12)..(101): Homolog of NCBI NO: 20840809 NR Description: similar to hypothetical protein FLJ30213 [Homo [Mus musculus] >gi|27701004|ref|XP_230277.1| similar to

SEQ ID NO: 84112 - protein, 102 aa, Arabidopsis thaliana; identical to SEQ ID NO: 84108
  peptide (1)..(102): Ceres Seq. ID no. 12673166

SEQ ID NO: 84113 - DNA, 1263 bp, Arabidopsis thaliana
  misc_feature (1)..(1263): Ceres Seq. ID no. 12673184
  misc_feature: MA Experiment ID: 108434 Result: Down-regulated in Transcription
  misc_feature: MA Experiment 108434 PARAMETER Experiment Name: At_Root_Tips_cDNA_P Parameter: Tissue Value: Root Tips
  misc_feature: MA Experiment ID: 108435 Result: Up-regulated in Transcription
  misc_feature: MA Experiment 108435 PARAMETER Experiment Name: At_stm_Mutants_cDNA_P Parameter: Plant Line Value: wt Landsburg vs stm
  misc_feature: MA Experiment 108435 PARAMETER Experiment Name: At_stm_Mutants_cDNA_P Parameter: Tissue Value: Shoot Apical Meristem Region
  misc_feature: MA Experiment ID: 108464 Result: Down-regulated in Transcription
  misc_feature: MA Experiment 108464 PARAMETER Experiment Name: At_Germinating_Seeds_cDNA_P Parameter: Age (day) Value: 4 vs. 0
  misc_feature: MA Experiment 108464 PARAMETER Experiment Name: At_Germinating_Seeds_cDNA_P Parameter: Tissue Value: Germinating Seeds
  misc_feature: MA Experiment ID: 108473 Result: Down-regulated in Transcription
  misc_feature: MA Experiment 108473 PARAMETER Experiment Name: At_Drought_Flowers_cDNA_P Parameter: Timepoint (hr) Value: 7 d
  misc_feature: MA Experiment 108473 PARAMETER Experiment Name: At_Drought_Flowers_cDNA_P Parameter: Tissue Value: Flower
  misc_feature: MA Experiment 108473 PARAMETER Experiment Name: At_Drought_Flowers_cDNA_P Parameter: Treatment Value: Drought vs. No Drought
  misc_feature: MA Experiment ID: 108569 Result: Up-regulated in Transcription
  misc_feature: MA Experiment 108569 PARAMETER Experiment Name: At_0.001%_MeJA__cDNA_P Parameter: Timepoint (hr) Value: 6
  misc_feature: MA Experiment 108569 PARAMETER Experiment Name: At_0.001%_MeJA__cDNA_P Parameter: Tissue Value: Aerial
  misc_feature: MA Experiment 108569 PARAMETER Experiment Name: At_0.001%_MeJA__cDNA_P Parameter: Treatment Value: 0.001% MeJA vs. No Treatment
  misc_feature: MA Experiment ID: 108574 Result: Up-regulated in Transcription
  misc_feature: MA Experiment 108574 PARAMETER Experiment Name: At_Wounding__cDNA_P Parameter: Timepoint (hr) Value: 1
  misc_feature: MA Experiment 108574 PARAMETER Experiment Name: At_Wounding__cDNA_P Parameter: Tissue Value: Aerial
  misc_feature: MA Experiment 108574 PARAMETER Experiment Name: At_Wounding__cDNA_P Parameter: Treatment Value: Wounding vs. No Wounding
  misc_feature: MA Experiment ID: 108576 Result: Down-regulated in Transcription
  misc_feature: MA Experiment 108576 PARAMETER Experiment Name: At_42deg_Heat_cDNA_P Parameter: Temperature (deg C) Value: 42 vs. 22
  misc_feature: MA Experiment 108576 PARAMETER Experiment Name: At_42deg_Heat_cDNA_P Parameter: Timepoint (hr) Value: 1
  misc_feature: MA Experiment 108576 PARAMETER Experiment Name: At_42deg_Heat_cDNA_P Parameter: Tissue Value: Aerial
  misc_feature: MA Experiment ID: 108585 Result: Up-regulated in Transcription
  misc_feature: MA Experiment 108585 PARAMETER Experiment Name: At_5mM_NaNP_cDNA_P Parameter: Timepoint (hr) Value: 6
  misc_feature: MA Experiment 108585 PARAMETER Experiment Name: At_5mM_NaNP_cDNA_P Parameter: Tissue Value: Aerial
  misc_feature: MA Experiment 108585 PARAMETER Experiment Name: At_5mM_NaNP_cDNA_P Parameter: Treatment Value: null
  misc_feature: MA Experiment ID: 108595 Result: Up-regulated in Transcription
  misc_feature: MA Experiment 108595 PARAMETER Experiment Name: At_Ler-pi_Ovule_cDNA_P Parameter: Plant Line Value: null
  misc_feature: MA Experiment ID: 108668 Result: Down-regulated in Transcription
  misc_feature: MA Experiment 108668 PARAMETER Experiment Name: At_2mM_SA_cDNA_P Parameter: Plant Line Value: WS
  misc_feature: MA Experiment 108668 PARAMETER Experiment Name: At_2mM_SA_cDNA_P Parameter: Timepoint (hr) Value: 6
  misc_feature: MA Experiment 108668 PARAMETER Experiment Name: At_2mM_SA_cDNA_P Parameter: Treatment Value: 2mM SA vs. No Treatment
  misc_feature: MA Experiment ID: 20000070 Result: Up-regulated in Transcription
  misc_feature: MA Experiment 20000070 PARAMETER Experiment Name: At_100uM_ABA_Mutants_cDNA_P Parameter: Plant Line Value: CS24
  misc_feature: MA Experiment 20000070 PARAMETER Experiment Name: At_100uM_ABA_Mutants_cDNA_P Parameter: Timepoint (hr) Value: 6
  misc_feature: MA Experiment 20000070 PARAMETER Experiment Name: At_100uM_ABA_Mutants_cDNA_P Parameter: Tissue Value: Aerial
  misc_feature: MA Experiment 20000070 PARAMETER Experiment Name: At_100uM_ABA_Mutants_cDNA_P Parameter: Treatment Value: 100uM ABA vs. No Treatment
  misc_feature: MA Experiment ID: 20000087 Result: Up-regulated in Transcription
  misc_feature: MA Experiment 20000087 PARAMETER Experiment Name: At_100uM_ABA_Mutants_cDNA_P Parameter: Plant Line Value: WS
  misc_feature: MA Experiment 20000087 PARAMETER Experiment Name: At_100uM_ABA_Mutants_cDNA_P Parameter: Timepoint (hr) Value: 6
  misc_feature: MA Experiment 20000087 PARAMETER Experiment Name: At_100uM_ABA_Mutants_cDNA_P Parameter: Tissue Value: Aerial
  misc_feature: MA Experiment 20000087 PARAMETER Experiment Name: At_100uM_ABA_Mutants_cDNA_P Parameter: Treatment Value: 100uM ABA vs. No Treatment
  misc_feature: MA Experiment ID: 20000112 Result: Down-regulated in Transcription
  misc_feature: MA Experiment 20000112 PARAMETER Experiment Name: At_42deg_Heat_cDNA_P Parameter: Temperature (deg C) Value: 42 vs. 22
  misc_feature: MA Experiment 20000112 PARAMETER Experiment Name: At_42deg_Heat_cDNA_P Parameter: Timepoint (hr) Value: 2
  misc_feature: MA Experiment 20000112 PARAMETER Experiment Name: At_42deg_Heat_cDNA_P Parameter: Tissue Value: Aerial
  misc_feature: MA Experiment ID: 20000113 Result: Down-regulated in Transcription
  misc_feature: MA Experiment 20000113 PARAMETER Experiment Name: At_42deg_Heat_cDNA_P Parameter: Temperature (deg C) Value: 42 vs. 22
  misc_feature: MA Experiment 20000113 PARAMETER Experiment Name: At_42deg_Heat_cDNA_P Parameter: Timepoint (hr) Value: 8
  misc_feature: MA Experiment 20000113 PARAMETER Experiment Name: At_42deg_Heat_cDNA_P Parameter: Tissue Value: Aerial
  misc_feature: MA Experiment ID: 20000180 Result: Up-regulated in Transcription
  misc_feature: MA Experiment 20000180 PARAMETER Experiment Name: At_Germinating_Seeds_P Parameter: Age (hr) Value: 24 vs. 0
  misc_feature: MA Experiment 20000180 PARAMETER Experiment Name: At_Germinating_Seeds_P Parameter: Tissue Value: Germinating Seeds
  misc_feature: MA Experiment ID: 20000185 Result: Down-regulated in Transcription
  misc_feature: MA Experiment 20000185 PARAMETER Experiment Name: At_Roots__P Parameter: Age (day) Value: 7 vs. 21
  misc_feature: MA Experiment 20000185 PARAMETER Experiment Name: At_Roots__P Parameter: Organism Value: A. thaliana
  misc_feature: MA Experiment 20000185 PARAMETER Experiment Name: At_Roots__P Parameter: Tissue Value: Roots vs. Whole Plant
  misc_feature: MA Experiment ID: 20000211 Result: Up-regulated in Transcription
  misc_feature: MA Experiment 20000211 PARAMETER Experiment Name: At_0.001percent_MeJA__P Parameter: Age (day) Value: 14
  misc_feature: MA Experiment 20000211 PARAMETER Experiment Name: At_0.001percent_MeJA__P Parameter: Organism Value: A. thaliana
  misc_feature: MA Experiment 20000211 PARAMETER Experiment Name: At_0.001percent_MeJA__P Parameter: Plant Line Value: WS
  misc_feature: MA Experiment 20000211 PARAMETER Experiment Name: At_0.001percent_MeJA__P Parameter: Timepoint (hr) Value: 1
  misc_feature: MA Experiment 20000211 PARAMETER Experiment Name: At_0.001percent_MeJA__P Parameter: Tissue Value: Aerial
  misc_feature: MA Experiment 20000211 PARAMETER Experiment Name: At_0.001percent_MeJA__P Parameter: Treatment Value: 0.001percent MeJA vs. No Treatment
  misc_feature: MA Experiment ID: 20000224 Result: Up-regulated in Transcription
  misc_feature: MA Experiment ID: 20000264 Result: Up-regulated in Transcription
  misc_feature: MA Experiment 20000264 PARAMETER Experiment Name: At_Open_Flower_P Parameter: Age (day) Value: 21
  misc_feature: MA Experiment 20000264 PARAMETER Experiment Name: At_Open_Flower_P Parameter: Plant Line Value: WS
  misc_feature: MA Experiment 20000264 PARAMETER Experiment Name: At_Open_Flower_P Parameter: Tissue Value: Open Flower vs. Whole Plant
  misc_feature: MA Experiment ID: 20000265 Result: Up-regulated in Transcription
  misc_feature: MA Experiment 20000265 PARAMETER Experiment Name: At_Open_Flower_P Parameter: Age (day) Value: 21
  misc_feature: MA Experiment 20000265 PARAMETER Experiment Name: At_Open_Flower_P Parameter: Plant Line Value: WS
  misc_feature: MA Experiment 20000265 PARAMETER Experiment Name: At_Open_Flower_P Parameter: Tissue Value: Closed Flower vs. Whole Plant
  misc_feature: MA Experiment ID: 20000286 Result: Up-regulated in Transcription
  misc_feature: MA Experiment 20000286 PARAMETER Experiment Name: At_Open_Flower_P Parameter: Age (day) Value: 21
  misc_feature: MA Experiment 20000286 PARAMETER Experiment Name: At_Open_Flower_P Parameter: Plant Line Value: WS
  misc_feature: MA Experiment 20000286 PARAMETER Experiment Name: At_Open_Flower_P Parameter: Tissue Value: Half Open vs. Whole Plant
  misc_feature: MA Experiment ID: 20000437 Result: Down-regulated in Transcription
  misc_feature: MA Experiment 20000437 PARAMETER Experiment Name: At_Drought_P Parameter: Age (day) Value: 8
  misc_feature: MA Experiment 20000437 PARAMETER Experiment Name: At_Drought_P Parameter: Organism Value: A. thaliana
  misc_feature: MA Experiment 20000437 PARAMETER Experiment Name: At_Drought_P Parameter: Plant Line Value: WS
  misc_feature: MA Experiment 20000437 PARAMETER Experiment Name: At_Drought_P Parameter: Timepoint (hr) Value: 24
  misc_feature: MA Experiment 20000437 PARAMETER Experiment Name: At_Drought_P Parameter: Tissue Value: Whole Plant
  misc_feature: MA Experiment 20000437 PARAMETER Experiment Name: At_Drought_P Parameter: Treatment Value: Drought vs. No Drought
  misc_feature: MA Experiment ID: 20000438 Result: Down-regulated in Transcription
  misc_feature: MA Experiment 20000438 PARAMETER Experiment Name: At_Shoots__P Parameter: Age (day) Value: 14
  misc_feature: MA Experiment 20000438 PARAMETER Experiment Name: At_Shoots__P Parameter: Tissue Value: Shoots vs. Whole Plant
  misc_feature: MA Experiment ID: 20000495 Result: Up-regulated in Transcription
  misc_feature: MA Experiment 20000495 PARAMETER Experiment Name: At_Guard_Cells_P Parameter: Harvest Date Value: 8/2/2002
  misc_feature: MA Experiment 20000495 PARAMETER Experiment Name: At_Guard_Cells_P Parameter: Organism Value: A. thaliana
  misc_feature: MA Experiment 20000495 PARAMETER Experiment Name: At_Guard_Cells_P Parameter: Tissue Value: Guard Cells vs. Leaves
  misc_feature: MA Experiment ID: 20000794 Result: Down-regulated in Transcription
  misc_feature: MA Experiment 20000794 PARAMETER Experiment Name: At_Petals_P Parameter: Age (day) Value: 23-25 days
  misc_feature: MA Experiment 20000794 PARAMETER Experiment Name: At_Petals_P Parameter: Plant Line Value: WS
  misc_feature: MA Experiment 20000794 PARAMETER Experiment Name: At_Petals_P Parameter: Tissue Value: Petals vs. Whole plant
  misc_feature: MA Experiment ID: 20001248 Result: Down-regulated in Transcription
  misc_feature: MA Experiment 20001248 PARAMETER Experiment Name: At_Far-red-induction_P Parameter: Age (day) Value: 7
  misc_feature: MA Experiment 20001248 PARAMETER Experiment Name: At_Far-red-induction_P Parameter: Light Value: Far-red vs. White
  misc_feature: MA Experiment 20001248 PARAMETER Experiment Name: At_Far-red-induction_P Parameter: Organism Value: A. thaliana
  misc_feature: MA Experiment 20001248 PARAMETER Experiment Name: At_Far-red-induction_P Parameter: Plant Line Value: Columbia
  misc_feature: MA Experiment 20001248 PARAMETER Experiment Name: At_Far-red-induction_P Parameter: Timepoint (hr) Value: 4
  misc_feature: MA Experiment 20001248 PARAMETER Experiment Name: At_Far-red-induction_P Parameter: Tissue Value: Whole Plant
  misc_feature: MA Experiment ID: 20001450 Result: Down-regulated in Transcription
  misc_feature: MA Experiment 20001450 PARAMETER Experiment Name: At_Far-red-induction_P Parameter: Age (day) Value: 7
  misc_feature: MA Experiment 20001450 PARAMETER Experiment Name: At_Far-red-induction_P Parameter: Light Value: Far-red vs. White
  misc_feature: MA Experiment 20001450 PARAMETER Experiment Name: At_Far-red-induction_P Parameter: Organism Value: A. thaliana
  misc_feature: MA Experiment 20001450 PARAMETER Experiment Name: At_Far-red-induction_P Parameter: Plant Line Value: Columbia
  misc_feature: MA Experiment 20001450 PARAMETER Experiment Name: At_Far-red-induction_P Parameter: Timepoint (hr) Value: 8
  misc_feature: MA Experiment 20001450 PARAMETER Experiment Name: At_Far-red-induction_P Parameter: Tissue Value: Whole Plant
  misc_feature: MA Experiment ID: 20001451 Result: Down-regulated in Transcription
  misc_feature: MA Experiment 20001451 PARAMETER Experiment Name: At_Far-red-induction_P Parameter: Age (day) Value: 7
  misc_feature: MA Experiment 20001451 PARAMETER Experiment Name: At_Far-red-induction_P Parameter: Light Value: Far-red vs. White
  misc_feature: MA Experiment 20001451 PARAMETER Experiment Name: At_Far-red-induction_P Parameter: Organism Value: A. thaliana
  misc_feature: MA Experiment 20001451 PARAMETER Experiment Name: At_Far-red-induction_P Parameter: Plant Line Value: Columbia
  misc_feature: MA Experiment 20001451 PARAMETER Experiment Name: At_Far-red-induction_P Parameter: Timepoint (hr) Value: 24
  misc_feature: MA Experiment 20001451 PARAMETER Experiment Name: At_Far-red-induction_P Parameter: Tissue Value: Whole Plant
  misc_feature: MA Experiment ID: 20001560 Result: Up-regulated in Transcription
  misc_feature: MA Experiment 20001560 PARAMETER Experiment Name: At_Drought_Soil_Dry_P Parameter: Age (day) Value: 28
  misc_feature: MA Experiment 20001560 PARAMETER Experiment Name: At_Drought_Soil_Dry_P Parameter: Organism Value: A. thaliana
  misc_feature: MA Experiment 20001560 PARAMETER Experiment Name: At_Drought_Soil_Dry_P Parameter: Plant Line Value: WS
  misc_feature: MA Experiment 20001560 PARAMETER Experiment Name: At_Drought_Soil_Dry_P Parameter: Post Timepoint (hr) Value: None
  misc_feature: MA Experiment 20001560 PARAMETER Experiment Name: At_Drought_Soil_Dry_P Parameter: Post-Treatment Value: None
  misc_feature: MA Experiment 20001560 PARAMETER Experiment Name: At_Drought_Soil_Dry_P Parameter: Timepoint (day) Value: 14
  misc_feature: MA Experiment 20001560 PARAMETER Experiment Name: At_Drought_Soil_Dry_P Parameter: Treatment Value: Drought vs. No Drought
  misc_feature: MA Experiment ID: 20001911 Result: Down-regulated in Transcription
  misc_feature: MA Experiment 20001911 PARAMETER Experiment Name: At_Drought_Reproduction_P Parameter: Age (day) Value: 40
  misc_feature: MA Experiment 20001911 PARAMETER Experiment Name: At_Drought_Reproduction_P Parameter: Organism Value: A. thaliana
  misc_feature: MA Experiment 20001911 PARAMETER Experiment Name: At_Drought_Reproduction_P Parameter: Plant Line Value: WS
  misc_feature: MA Experiment 20001911 PARAMETER Experiment Name: At_Drought_Reproduction_P Parameter: Timepoint (day) Value: 10
  misc_feature: MA Experiment 20001911 PARAMETER Experiment Name: At_Drought_Reproduction_P Parameter: Tissue Value: Flowers
  misc_feature: MA Experiment 20001911 PARAMETER Experiment Name: At_Drought_Reproduction_P Parameter: Treatment Value: Drought vs. No Drought
tgtgaattaaatttatgttgtgaaaagaatattgtacgttgggagtagtgtagaaccctaactgtacaaaatcagtaacattacacagctgtgttccattgaagtctctgcttatatacaagaacttgctcattcctcaaagcatccacacataatcacgatgaagctctttgttcatctctctatcttcttctccatcctcttcatcactctcccatcttcttacagctgcaccgaaaaatgacaagaatgccctccttcaaatcaagaaagcacttggcaatcctccccttctatcctcctggaacccccgaaccgactgttgtaccggctggaccggcgtcgaatgcactaaccgtcgcgttaccggtctcagcgttacctccggcgaagtctccggtcagatctcgtaccagatcggcgacctcgttgacctccgtacactagatttcagctacctgccacacctcaccggaaacatcccacgcaccatcaccaaactcaagaacctcaacactctctacttgaagcacactagtctctccggtccgattcctgattacatcagcgagctcaagagcctcacgttcttggacctttcttttaaccaatttaccggtccaattcccggttcgctatctcagatgccgaagcttgaagccattcaaatcaacgataataagctaaccggttctataccaaactctttcggttcttttgttggcaacgtccctaatctctacttgtctaacaataagctgtcaggaaaaataccggaatcgttgtctaaatacgacttcaacgcagtggatttgtcgggaaatggtttcgaaggagatgcctttatgttcttcggacggaacaaaacaacagtacgagtggatttgtcgagaaacatgtttaatttcgatctcgtcaaggttaagttcgctagaagcatagtttcgttggatctgagccagaaccatatctacgggaagataccaccagcactgactaaactacacctcgagcatttcaacgtgagcgacaaccatctctgcggaaaaatcccaagtggcggtctacttcagacctttgaaccatctgccttcgctcacaacatctgtctttgtggaactccccttaaggcttgttaatttggtttaatcttggcggaagaataaaaataatgttgaatatgttatgatgatgtgttcattatcaccgccaaaccaagtttattgtttctttgttatgaatttaatttaatggcaagaattg

SEQ ID NO: 84114 - protein, 164 aa, Arabidopsis thaliana; identical to SEQ ID NO: 31013
  peptide (1)..(164): Ceres Seq. ID no. 12673185
  misc_feature (121)..(143): Pfam Name: Leucine Rich Repeat Pfam Description: Leucine Rich Repeat
  misc_feature (1)..(164): Homolog of NCBI NO: 9294113 NR Description: leucine-rich repeat protein FLR1 [Arabidopsis
  misc_feature (1)..(164): Homolog of NCBI NO: 16323089 NR Description: At3g12148/T23B7.11 [Arabidopsis thaliana]
  misc_feature (1)..(164): Homolog of NCBI NO: 7637423 NR Description: leucine-rich repeat protein FLR1 [Arabidopsis
  misc_feature (1)..(41): Homolog of NCBI NO: 12322044 NR Description: unknown protein; 756-145 [Arabidopsis thaliana]
  misc_feature (1)..(164): Homolog of NCBI NO: 18148925 NR Description: polygalacturonase-inhibitor protein [Citrus sp.
  misc_feature (1)..(164): Homolog of NCBI NO: 34068091 NR Description: polygalacturonase inhibiting protein [Prunus
  misc_feature (1)..(164): Homolog of NCBI NO: 21667647 NR Description: polygalacturonase-inhibiting protein [Vitis
  misc_feature (1)..(164): Homolog of NCBI NO: 18148376 NR Description: polygalacturonase-inhibitor protein [Citrus sp.
  misc_feature (1)..(164): Homolog of NCBI NO: 15240182 NR Description: polygalacturonase inhibiting protein (PGIP1); id: At5g06860.1, supported by cDNA: 5344., supported by cDNA:
  misc_feature (1)..(164): Homolog of NCBI NO: 21593869 NR Description: polygalacturonase inhibiting protein 1

SEQ ID NO: 84115 - protein, 97 aa, Arabidopsis thaliana
  peptide (1)..(97): Ceres Seq. ID no. 12673186
  misc_feature (54)..(76): Pfam Name: Leucine Rich Repeat Pfam Description: Leucine Rich Repeat
  misc_feature (1)..(97): Homolog of NCBI NO: 9294113 NR Description: leucine-rich repeat protein FLR1 [Arabidopsis
  misc_feature (1)..(97): Homolog of NCBI NO: 16323089 NR Description: At3g12148/T23B7.11 [Arabidopsis thaliana]
  misc_feature (1)..(97): Homolog of NCBI NO: 7637423 NR Description: leucine-rich repeat protein FLR1 [Arabidopsis
  misc_feature (1)..(97): Homolog of NCBI NO: 18148925 NR Description: polygalacturonase-inhibitor protein [Citrus sp.
  misc_feature (1)..(97): Homolog of NCBI NO: 34068091 NR Description: polygalacturonase inhibiting protein [Prunus
  misc_feature (1)..(97): Homolog of NCBI NO: 21667647 NR Description: polygalacturonase-inhibiting protein [Vitis
  misc_feature (1)..(97): Homolog of NCBI NO: 18148376 NR Description: polygalacturonase-inhibitor protein [Citrus sp.
  misc_feature (1)..(97): Homolog of NCBI NO: 15240182 NR Description: polygalacturonase inhibiting protein (PGIP1); id: At5g06860.1, supported by cDNA: 5344., supported by cDNA:
  misc_feature (1)..(97): Homolog of NCBI NO: 21593869 NR Description: polygalacturonase inhibiting protein 1
  misc_feature (1)..(95): Homolog of NCBI NO: 3337095 NR Description: polygalacturonase inhibitor (PGIP) [Citrus iyo]
MFFGRNKTTVRVDLSRNMFNFDLVKVKFARSIVSLDLSQNHIYGKIPPALTKLHLEHFNVSDNHLCGKIPSGGLLQTFEPSAFAHNICLCGTPLKAC

SEQ ID NO: 84116 - DNA, 1764 bp, Arabidopsis thaliana
  misc_feature (1)..(1764): Ceres Seq. ID no. 12673205
  misc_feature: MA Experiment ID: 108433 Result: Up-regulated in Transcription
  misc_feature: MA Experiment 108433 PARAMETER Experiment Name: At_rhl_Mutant2_cDNA_P Parameter: Age (day) Value: 7
  misc_feature: MA Experiment 108433 PARAMETER Experiment Name: At_rhl_Mutant2_cDNA_P Parameter: Organism Value: A. thaliana
  misc_feature: MA Experiment 108433 PARAMETER Experiment Name: At_rhl_Mutant2_cDNA_P Parameter: Plant Line Value: rhl Mutant vs. wt landsburg
  misc_feature: MA Experiment 108433 PARAMETER Experiment Name: At_rhl_Mutant2_cDNA_P Parameter: Tissue Value: Roots
  misc_feature: MA Experiment ID: 20000441 Result: Down-regulated in Transcription
  misc_feature: MA Experiment 20000441 PARAMETER Experiment Name: At_1uM_BR-BRZ__P Parameter: Tissue Value: Shoot Apices
  misc_feature: MA Experiment 20000441 PARAMETER Experiment Name: At_1uM_BR-BRZ__P Parameter: Treatment Value: 1uM BR vs. No Treatment
  misc_feature: MA Experiment ID: 20001458 Result: Up-regulated in Transcription
  misc_feature: MA Experiment 20001458 PARAMETER Experiment Name: At_50mM_NH4NO3_L-to-H_P Parameter: Age (day) Value: Undefined
  misc_feature: MA Experiment 20001458 PARAMETER Experiment Name: At_50mM_NH4NO3_L-to-H_P Parameter: Organism Value: Undefined
  misc_feature: MA Experiment 20001458 PARAMETER Experiment Name: At_50mM_NH4NO3_L-to-H_P Parameter: Plant Line Value: Undefined
  misc_feature: MA Experiment 20001458 PARAMETER Experiment Name: At_50mM_NH4NO3_L-to-H_P Parameter: Timepoint (hr) Value: 2
  misc_feature: MA Experiment 20001458 PARAMETER Experiment Name: At_50mM_NH4NO3_L-to-H_P Parameter: Tissue Value: Siliques
  misc_feature: MA Experiment 20001458 PARAMETER Experiment Name: At_50mM_NH4NO3_L-to-H_P Parameter: Treatment Value: 50mM NH4NO3 vs. 100mM Manitol
agatttgttttctttctctctcgtcatctctcttcctctctgtaatcccaaccggagttacgattccttcttatcgtaactcctgcttccgatctcgatccaattttcacttttgttttgtccgaacggtaaatcatttcgcggctttttttttttaagggaaggaggaataagcaaattttgatttgattccgtttttttgggggtgttagtgatcttttagatgaagtaaagaaattttgattattgaggggattatgtgagttatggtatcatcggcaactatattgcggatggtagcaccatgttggaggcgaccttctgttaaaggagatcattctactagagacgctaatggtcgatgtgatggtcttctttggtataaagattctggtaaccatgttgctggagagttctctatgtctgttattcaagctaataatcttctcgaagatcatagcaagcttgagtctggacctgttagtatgtttgattctggtcctcaagctacttttgttggtgtttatgatggtcatggtggtcctgaagctgcccgtttcgttaataaacacctcttcgacaacatcaggaagtttacatcagagaatcatggaatgtctgccaatgttataactaaagcgtttttagctacggaagaagattttctttctcttgtccggcggcagtggcagattaaaccacagattgcttctgttggagcttgttgtctggtagggatcatatgtagtggattgttgtatattgcaaacgctggagattctcgggttgtgctaggaagactggaaaaagcgtttaaaattgtcaaggccgttcagttatcgtctgagcataatgcaagtcttgaatctgtgagagaggagttgcgctcgttgcatccaaatgatcctcagattgtggtcttgaagcacaaagtttggcgtgtcaaaggtattatacaggtaaaaatactttcacggtaatgcgagttgctgacttctagactcttttcttgcaagtagcttgactgtgaaagatacaactaagtaagccctatgcatgtataagaagaggatttttcgctagatataacccgtggctggttcttgaaggtttcacggtcgattggtgatgcatacttaaagaaagcagaattcaaccgggaaccattgttggcaaagttcagggtccctgaggttttccataagcccatccttagagcagagccggcaattacagtacacaaaatccatccagaagatcagtttcttatatttgcatcagacggcttgtgggagcacttgtccaatcaagaagctgttgacattgtgaacacatgcccgcgcaatgggattgcaaggaagctcataaaaacagctctaagagaggcagcaaagaagagagagatgagatattcggatctaaaaaagatcgatagaggagtgcggagacattttcatgatgatataacagtcatagttgtgtttcttgattcacatctcgtcagtcgcagtacctcacgccgacctctcctctccatctcaggtggtggtgatttagctggaccttctacttgactctactctcaccacatctatatatatcttatatatacattatccactatatataaaaacacattgcaaaacgcaattcaagttccttctttttttttttctctatatataaaaatttcctcttaactctgttttttattcatcccaaaaaaaaatgaagagttgaaatccaatgtataggtcttttggc

SEQ ID NO: 84117 - protein, 237 aa, Arabidopsis thaliana; identical to SEQ ID NO: 43004
  peptide (1)..(237): Ceres Seq. ID no. 12673206
  misc_feature (47)..(232): Pfam Name: Protein phosphatase 2C Pfam Description: Protein phosphatase 2C
  misc_feature (1)..(232): Homolog of NCBI NO: 9294356 NR Description: protein phosphatase 2C [Arabidopsis thaliana]
  misc_feature (10)..(232): Homolog of NCBI NO: 15230540 NR Description: protein phosphatase 2C, putative; protein id: [Arabidopsis thaliana] >gi|12321955|gb|AAG51012.1|AC069474_11
  misc_feature (1)..(232): Homolog of NCBI NO: 30694180 NR Description: protein phosphatase 2C - like protein thaliana] >gi|15020818|emb|CAC44619.1| Ser/Thr protein
  misc_feature (28)..(232): Homolog of NCBI NO: 11282002 NR Description: protein phosphatase 2C-like protein - Arabidopsis
  misc_feature (6)..(232): Homolog of NCBI NO: 18855039 NR Description: putative protein phosphatase [Oryza sativa]
  misc_feature (7)..(232): Homolog of NCBI NO: 7768153 NR Description: protein phosphatase 2C (PP2C) [Fagus sylvatica]
  misc_feature (7)..(232): Homolog of NCBI NO: 11282004 NR Description: protein phosphatase 2C homolog [imported] - ice plant >gi|4206122|gb|AAD11430.1| protein phosphatase 2C
  misc_feature (5)..(232): Homolog of NCBI NO: 20340237 NR Description: protein phosphatase 2c-like protein
  misc_feature (5)..(232): Homolog of NCBI NO: 11282001 NR Description: protein phosphatase 2C-like protein - Arabidopsis
  misc_feature (1)..(232): Homolog of NCBI NO: 37536574 NR Description: putative protein phosphatase 2C [Oryza sativa

SEQ ID NO: 84118 - protein, 228 aa, Arabidopsis thaliana; identical to SEQ ID NO: 43005
  peptide (1)..(228): Ceres Seq. ID no. 12673207
  misc_feature (38)..(223): Pfam Name: Protein phosphatase 2C Pfam Description: Protein phosphatase 2C
  misc_feature (1)..(223): Homolog of NCBI NO: 9294356 NR Description: protein phosphatase 2C [Arabidopsis thaliana]
  misc_feature (1)..(223): Homolog of NCBI NO: 15230540 NR Description: protein phosphatase 2C, putative; protein id: [Arabidopsis thaliana] >gi|12321955|gb|AAG51012.1|AC069474_11
  misc_feature (1)..(223): Homolog of NCBI NO: 30694180 NR Description: protein phosphatase 2C - like protein thaliana] >gi|15020818|emb|CAC44619.1| Ser/Thr protein
  misc_feature (19)..(223): Homolog of NCBI NO: 11282002 NR Description: protein phosphatase 2C-like protein - Arabidopsis
  misc_feature (1)..(223): Homolog of NCBI NO: 18855039 NR Description: putative protein phosphatase [Oryza sativa]
  misc_feature (1)..(223): Homolog of NCBI NO: 7768153 NR Description: protein phosphatase 2C (PP2C) [Fagus sylvatica]
  misc_feature (1)..(223): Homolog of NCBI NO: 11282004 NR Description: protein phosphatase 2C homolog [imported] - ice plant >gi|4206122|gb|AAD11430.1| protein phosphatase 2C
  misc_feature (1)..(223): Homolog of NCBI NO: 20340237 NR Description: protein phosphatase 2c-like protein
  misc_feature (1)..(223): Homolog of NCBI NO: 11282001 NR Description: protein phosphatase 2C-like protein - Arabidopsis
  misc_feature (1)..(223): Homolog of NCBI NO: 37536574 NR Description: putative protein phosphatase 2C [Oryza sativa

SEQ ID NO: 84119 - protein, 186 aa, Arabidopsis thaliana; identical to SEQ ID NO: 43006
  peptide (1)..(186): Ceres Seq. ID no. 12673208
  misc_feature (1)..(181): Pfam Name: Protein phosphatase 2C Pfam Description: Protein phosphatase 2C
  misc_feature (1)..(181): Homolog of NCBI NO: 9294356 NR Description: protein phosphatase 2C [Arabidopsis thaliana]
  misc_feature (1)..(181): Homolog of NCBI NO: 15230540 NR Description: protein phosphatase 2C, putative; protein id: [Arabidopsis thaliana] >gi|12321955|gb|AAG51012.1|AC069474_11
  misc_feature (1)..(181): Homolog of NCBI NO: 30694180 NR Description: protein phosphatase 2C - like protein thaliana] >gi|15020818|emb|CAC44619.1| Ser/Thr protein
  misc_feature (1)..(181): Homolog of NCBI NO: 11282002 NR Description: protein phosphatase 2C-like protein - Arabidopsis
  misc_feature (1)..(181): Homolog of NCBI NO: 18855039 NR Description: putative protein phosphatase [Oryza sativa]
  misc_feature (1)..(181): Homolog of NCBI NO: 7768153 NR Description: protein phosphatase 2C (PP2C) [Fagus sylvatica]
  misc_feature (1)..(181): Homolog of NCBI NO: 11282004 NR Description: protein phosphatase 2C homolog [imported] - ice plant >gi|4206122|gb|AAD11430.1| protein phosphatase 2C
  misc_feature (1)..(181): Homolog of NCBI NO: 20340237 NR Description: protein phosphatase 2c-like protein
  misc_feature (1)..(181): Homolog of NCBI NO: 11282001 NR Description: protein phosphatase 2C-like protein - Arabidopsis
  misc_feature (1)..(181): Homolog of NCBI NO: 37536574 NR Description: putative protein phosphatase 2C [Oryza sativa

SEQ ID NO: 84120 - DNA, 1257 bp, Arabidopsis thaliana
  misc_feature (1)..(1257): Ceres Seq. ID no. 12673209
  misc_feature: MA Experiment ID: 108595 Result: Up-regulated in Transcription
  misc_feature: MA Experiment 108595 PARAMETER Experiment Name: At_Ler-pi_Ovule_cDNA_P Parameter: Plant Line Value: null
  misc_feature: MA Experiment ID: 20001905 Result: Up-regulated in Transcription
  misc_feature: MA Experiment 20001905 PARAMETER Experiment Name: At_Drought_Reproduction_P Parameter: Age (day) Value: 40
  misc_feature: MA Experiment 20001905 PARAMETER Experiment Name: At_Drought_Reproduction_P Parameter: Organism Value: A. thaliana
  misc_feature: MA Experiment 20001905 PARAMETER Experiment Name: At_Drought_Reproduction_P Parameter: Plant Line Value: WS
  misc_feature: MA Experiment 20001905 PARAMETER Experiment Name: At_Drought_Reproduction_P Parameter: Timepoint (day) Value: 10
  misc_feature: MA Experiment 20001905 PARAMETER Experiment Name: At_Drought_Reproduction_P Parameter: Tissue Value: Rosettes
  misc_feature: MA Experiment 20001905 PARAMETER Experiment Name: At_Drought_Reproduction_P Parameter: Treatment Value: Drought vs. No Drought
acggagattgtaacaaggaaaccgccgtcgccggatctgatagtgcatatccatgaagtagaagacgaagaaacttactttctgatcttagaacggagtatatgtacagaagattcgcgtccctcaatttttgatctcaagggtcgggtttacctttttttccttcttatttttggtggctttgcgttttctcattcgacgatttctggatttggggatttcaaaaccatgaggaagaagctcgatactcggttcccagctgctcgtattaaaaagattatgcaagctgatgaggatgttggcaagatagctttggcagtgcctgtcttagtctcaaaatctttggagttgttcttgcaagacctttgtgatcgtacatatgaaattacccttgaaagaggtgccaagactgtgagctcattgcacctaaaacattgtgtggaaagatataacgtgtttgattttctgagggaagttgtgagtaaggtgcctgactatggccattcccaagggcaaggacatggtgatgttaccatggatgatcgcagcatctccaagagaaggaagcccatcagcgatgaagtgaatgacagtgacgaggaatataagaaaagcaaaacgcaagagatagggagtgctaagaccagtggcaggggtggtagaggaagagggcgaggaagaggtcgtggtggacgagctgcaaaagcagccgaaagagagggtctcaaccgcgagatggaagtagaagccgccaattctggacagccaccaccagaagacaatgtcaagatgcatgcgtcagagtcatcaccacaagaggatgagaagaaaggcatcgacggcacagcagcatcgaacgaagacaccaagcaacaccttcaaagtcccaaagaaggcattgactttgatctcaacgctgaatccctcgacctaaacgagaccaaactggcaccagccacaggcacaaccacaaccacaactgcagcaacagactctgaggagtattcgggctggcctatgatggacataagcaaaatggatccagcacagcttgctagtctgggtaagaggatagacgaggatgaggaagattatgacgaagaaggctaagtcataacagcactataggatatatagagtagcagcgtttagcagtttgtctagaaaatgcttcttctgtcatcaaaatcttctcctgtttccatttattgtatgaaccaaagattgcatgcactctatgaaacttaatttattctc

SEQ ID NO: 84121 - protein, 369 aa, Arabidopsis thaliana; identical to SEQ ID NO: 38640
  peptide (1)..(369): Ceres Seq. ID no. 12673210
  misc_feature (83)..(147): Pfam Name: Histone-like transcription factor (CBF/NF-Y) and Pfam Description: Histone-like transcription factor (CBF/NF-Y)
  misc_feature (77)..(369): Homolog of NCBI NO: 30682195 NR Description: transcription factor Hap5a, putative [Arabidopsis >gi|15795167|dbj|BAB03155.1| gene_id:MQC3.30~unknown protein thaliana] >gi|18087597|gb|AAL58929.1|AF462841_1 At3g12480/MQC3.32
  misc_feature (88)..(369): Homolog of NCBI NO: 12321975 NR Description: unknown protein; 69004-67516 [Arabidopsis
  misc_feature (77)..(271): Homolog of NCBI NO: 18481624 NR Description: repressor protein [Oryza sativa]
  misc_feature (77)..(275): Homolog of NCBI NO: 18481626 NR Description: repressor protein [Zea mays]
  misc_feature (105)..(316): Homolog of NCBI NO: 15239766 NR Description: putative protein; protein id: At5g19490.1
  misc_feature (78)..(337): Homolog of NCBI NO: 24657218 NR Description: CG10318-PA [Drosophila melanogaster]
  misc_feature (78)..(337): Homolog of NCBI NO: 10242351 NR Description: NC2alpha [Drosophila melanogaster]
  misc_feature (78)..(190): Homolog of NCBI NO: 27661225 NR Description: similar to RIKEN cDNA 2310074H19 [Mus musculus]
  misc_feature (78)..(190): Homolog of NCBI NO: 18426973 NR Description: DR1-associated protein 1; negative cofactor 2 DR1- associated corepressor [Homo sapiens]
  misc_feature (78)..(196): Homolog of NCBI NO: 28279647 NR Description: Similar to Dr1 associated protein 1 (negative

SEQ ID NO: 84122 - protein, 293 aa, Arabidopsis thaliana; identical to SEQ ID NO: 38641
  peptide (1)..(293): Ceres Seq. ID no. 12673211
  misc_feature (7)..(71): Pfam Name: Histone-like transcription factor (CBF/NF-Y) and Pfam Description: Histone-like transcription factor (CBF/NF-Y)
  misc_feature (1)..(293): Homolog of NCBI NO: 30682195 NR Description: transcription factor Hap5a, putative [Arabidopsis >gi|15795167|dbj|BAB03155.1| gene_id:MQC3.30~unknown protein thaliana] >gi|18087597|gb|AAL58929.1|AF462841_1 At3g12480/MQC3.32
  misc_feature (12)..(293): Homolog of NCBI NO: 12321975 NR Description: unknown protein; 69004-67516 [Arabidopsis
  misc_feature (1)..(195): Homolog of NCBI NO: 18481624 NR Description: repressor protein [Oryza sativa]
  misc_feature (1)..(199): Homolog of NCBI NO: 18481626 NR Description: repressor protein [Zea mays]
  misc_feature (29)..(240): Homolog of NCBI NO: 15239766 NR Description: putative protein; protein id: At5g19490.1
  misc_feature (2)..(261): Homolog of NCBI NO: 24657218 NR Description: CG10318-PA [Drosophila melanogaster]
  misc_feature (2)..(261): Homolog of NCBI NO: 10242351 NR Description: NC2alpha [Drosophila melanogaster]
  misc_feature (2)..(114): Homolog of NCBI NO: 27661225 NR Description: similar to RIKEN cDNA 2310074H19 [Mus musculus]
  misc_feature (2)..(114): Homolog of NCBI NO: 18426973 NR Description: DR1-associated protein 1; negative cofactor 2 DR1- associated corepressor [Homo sapiens]
  misc_feature (2)..(120): Homolog of NCBI NO: 28279647 NR Description: Similar to Dr1 associated protein 1 (negative

SEQ ID NO: 84123 - protein, 276 aa, Arabidopsis thaliana; identical to SEQ ID NO: 38642
  peptide (1)..(276): Ceres Seq. ID no. 12673212
  misc_feature (1)..(54): Pfam Name: Histone-like transcription factor (CBF/NF-Y) and Pfam Description: Histone-like transcription factor (CBF/NF-Y)
  misc_feature (1)..(276): Homolog of NCBI NO: 30682195 NR Description: transcription factor Hap5a, putative [Arabidopsis >gi|15795167|dbj|BAB03155.1| gene_id:MQC3.30~unknown protein thaliana] >gi|18087597|gb|AAL58929.1|AF462841_1 At3g12480/MQC3.32
  misc_feature (1)..(276): Homolog of NCBI NO: 12321975 NR Description: unknown protein; 69004-67516 [Arabidopsis
  misc_feature (1)..(178): Homolog of NCBI NO: 18481624 NR Description: repressor protein [Oryza sativa]
  misc_feature (1)..(182): Homolog of NCBI NO: 18481626 NR Description: repressor protein [Zea mays]
  misc_feature (12)..(223): Homolog of NCBI NO: 15239766 NR Description: putative protein; protein id: At5g19490.1
  misc_feature (1)..(244): Homolog of NCBI NO: 24657218 NR Description: CG10318-PA [Drosophila melanogaster]
  misc_feature (1)..(244): Homolog of NCBI NO: 10242351 NR Description: NC2alpha [Drosophila melanogaster]
  misc_feature (1)..(97): Homolog of NCBI NO: 27661225 NR Description: similar to RIKEN cDNA 2310074H19 [Mus musculus]
  misc_feature (1)..(97): Homolog of NCBI NO: 18426973 NR Description: DR1-associated protein 1; negative cofactor 2 DR1- associated corepressor [Homo sapiens]
  misc_feature (1)..(103): Homolog of NCBI NO: 28279647 NR Description: Similar to Dr1 associated protein 1 (negative

SEQ ID NO: 84124 - DNA, 1641 bp, Arabidopsis thaliana
  misc_feature (1)..(1641): Ceres Seq. ID no. 12673217
  misc_feature: MA Experiment ID: 108435 Result: Down-regulated in Transcription
  misc_feature: MA Experiment 108435 PARAMETER Experiment Name: At_stm_Mutants_cDNA_P Parameter: Plant Line Value: wt Landsburg vs stm
  misc_feature: MA Experiment 108435 PARAMETER Experiment Name: At_stm_Mutants_cDNA_P Parameter: Tissue Value: Shoot Apical Meristem Region
  misc_feature: MA Experiment ID: 108461 Result: Up-regulated in Transcription
  misc_feature: MA Experiment 108461 PARAMETER Experiment Name: At_Germinating_Seeds_cDNA_P Parameter: Age (day) Value: 1 vs. 0
  misc_feature: MA Experiment 108461 PARAMETER Experiment Name: At_Germinating_Seeds_cDNA_P Parameter: Tissue Value: Germinating Seeds
  misc_feature: MA Experiment ID: 108462 Result: Up-regulated in Transcription
  misc_feature: MA Experiment 108462 PARAMETER Experiment Name: At_Germinating_Seeds_cDNA_P Parameter: Age (day) Value: 2 vs. 0
  misc_feature: MA Experiment 108462 PARAMETER Experiment Name: At_Germinating_Seeds_cDNA_P Parameter: Tissue Value: Germinating Seeds
  misc_feature: MA Experiment ID: 108463 Result: Up-regulated in Transcription
  misc_feature: MA Experiment 108463 PARAMETER Experiment Name: At_Germinating_Seeds_cDNA_P Parameter: Age (day) Value: 3 vs. 0
  misc_feature: MA Experiment 108463 PARAMETER Experiment Name: At_Germinating_Seeds_cDNA_P Parameter: Tissue Value: Germinating Seeds
  misc_feature: MA Experiment ID: 108464 Result: Up-regulated in Transcription
  misc_feature: MA Experiment 108464 PARAMETER Experiment Name: At_Germinating_Seeds_cDNA_P Parameter: Age (day) Value: 4 vs. 0
  misc_feature: MA Experiment 108464 PARAMETER Experiment Name: At_Germinating_Seeds_cDNA_P Parameter: Tissue Value: Germinating Seeds
  misc_feature: MA Experiment ID: 108488 Result: Up-regulated in Transcription
  misc_feature: MA Experiment ID: 108595 Result: Down-regulated in Transcription
  misc_feature: MA Experiment 108595 PARAMETER Experiment Name: At_Ler-pi_Ovule_cDNA_P Parameter: Plant Line Value: null
  misc_feature: MA Experiment ID: 20000069 Result: Down-regulated in Transcription
  misc_feature: MA Experiment 20000069 PARAMETER Experiment Name: At_100uM_ABA_Mutants_cDNA_P Parameter: Plant Line Value: CS23
  misc_feature: MA Experiment 20000069 PARAMETER Experiment Name: At_100uM_ABA_Mutants_cDNA_P Parameter: Timepoint (hr) Value: 6
  misc_feature: MA Experiment 20000069 PARAMETER Experiment Name: At_100uM_ABA_Mutants_cDNA_P Parameter: Tissue Value: Aerial
  misc_feature: MA Experiment 20000069 PARAMETER Experiment Name: At_100uM_ABA_Mutants_cDNA_P Parameter: Treatment Value: 100uM ABA vs. No Treatment
  misc_feature: MA Experiment ID: 20000070 Result: Down-regulated in Transcription
  misc_feature: MA Experiment 20000070 PARAMETER Experiment Name: At_100uM_ABA_Mutants_cDNA_P Parameter: Plant Line Value: CS24
  misc_feature: MA Experiment 20000070 PARAMETER Experiment Name: At_100uM_ABA_Mutants_cDNA_P Parameter: Timepoint (hr) Value: 6
  misc_feature: MA Experiment 20000070 PARAMETER Experiment Name: At_100uM_ABA_Mutants_cDNA_P Parameter: Tissue Value: Aerial
  misc_feature: MA Experiment 20000070 PARAMETER Experiment Name: At_100uM_ABA_Mutants_cDNA_P Parameter: Treatment Value: 100uM ABA vs. No Treatment
  misc_feature: MA Experiment ID: 20000071 Result: Down-regulated in Transcription
  misc_feature: MA Experiment 20000071 PARAMETER Experiment Name: At_100uM_ABA_Mutants_cDNA_P Parameter: Plant Line Value: CS8104
  misc_feature: MA Experiment 20000071 PARAMETER Experiment Name: At_100uM_ABA_Mutants_cDNA_P Parameter: Timepoint (hr) Value: 6
  misc_feature: MA Experiment 20000071 PARAMETER Experiment Name: At_100uM_ABA_Mutants_cDNA_P Parameter: Tissue Value: Aerial
  misc_feature: MA Experiment 20000071 PARAMETER Experiment Name: At_100uM_ABA_Mutants_cDNA_P Parameter: Treatment Value: 100uM ABA vs. No Treatment
  misc_feature: MA Experiment ID: 20000087 Result: Down-regulated in Transcription
  misc_feature: MA Experiment 20000087 PARAMETER Experiment Name: At_100uM_ABA_Mutants_cDNA_P Parameter: Plant Line Value: WS
  misc_feature: MA Experiment 20000087 PARAMETER Experiment Name: At_100uM_ABA_Mutants_cDNA_P Parameter: Timepoint (hr) Value: 6
  misc_feature: MA Experiment 20000087 PARAMETER Experiment Name: At_100uM_ABA_Mutants_cDNA_P Parameter: Tissue Value: Aerial
  misc_feature: MA Experiment 20000087 PARAMETER Experiment Name: At_100uM_ABA_Mutants_cDNA_P Parameter: Treatment Value: 100uM ABA vs. No Treatment
  misc_feature: MA Experiment ID: 20000117 Result: Down-regulated in Transcription
  misc_feature: MA Experiment 20000117 PARAMETER Experiment Name: At_100uM_ABA_Mutants_cDNA_P Parameter: Plant Line Value: Columbia
  misc_feature: MA Experiment 20000117 PARAMETER Experiment Name: At_100uM_ABA_Mutants_cDNA_P Parameter: Timepoint (hr) Value: 6
  misc_feature: MA Experiment 20000117 PARAMETER Experiment Name: At_100uM_ABA_Mutants_cDNA_P Parameter: Tissue Value: Aerial
  misc_feature: MA Experiment 20000117 PARAMETER Experiment Name: At_100uM_ABA_Mutants_cDNA_P Parameter: Treatment Value: 100uM ABA vs. No Treatment
  misc_feature: MA Experiment ID: 20000179 Result: Up-regulated in Transcription
  misc_feature: MA Experiment 20000179 PARAMETER Experiment Name: At_Germinating_Seeds_P Parameter: Age (hr) Value: 6 vs. 0
  misc_feature: MA Experiment 20000179 PARAMETER Experiment Name: At_Germinating_Seeds_P Parameter: Tissue Value: Germinating Seeds
  misc_feature: MA Experiment ID: 20000180 Result: Up-regulated in Transcription
  misc_feature: MA Experiment 20000180 PARAMETER Experiment Name: At_Germinating_Seeds_P Parameter: Age (hr) Value: 24 vs. 0
  misc_feature: MA Experiment 20000180 PARAMETER Experiment Name: At_Germinating_Seeds_P Parameter: Tissue Value: Germinating Seeds
  misc_feature: MA Experiment ID: 20000184 Result: Up-regulated in Transcription
  misc_feature: MA Experiment 20000184 PARAMETER Experiment Name: At_Shoots__P Parameter: Age (day) Value: 7
  misc_feature: MA Experiment 20000184 PARAMETER Experiment Name: At_Shoots__P Parameter: Tissue Value: Shoots vs. Whole Plant
  misc_feature: MA Experiment ID: 20000185 Result: Down-regulated in Transcription
  misc_feature: MA Experiment 20000185 PARAMETER Experiment Name: At_Roots__P Parameter: Age (day) Value: 7 vs. 21
  misc_feature: MA Experiment 20000185 PARAMETER Experiment Name: At_Roots__P Parameter: Organism Value: A. thaliana
  misc_feature: MA Experiment 20000185 PARAMETER Experiment Name: At_Roots__P Parameter: Tissue Value: Roots vs. Whole Plant
  misc_feature: MA Experiment ID: 20000227 Result: Up-regulated in Transcription
  misc_feature: MA Experiment 20000227 PARAMETER Experiment Name: At_Root-Tips-vs-Tops_P Parameter: Tissue Value: Root Tips vs. Root Tops
  misc_feature: MA Experiment ID: 20000234 Result: Up-regulated in Transcription
  misc_feature: MA Experiment 20000234 PARAMETER Experiment Name: At_Siliques_P Parameter: Age (day) Value: 21
  misc_feature: MA Experiment 20000234 PARAMETER Experiment Name: At_Siliques_P Parameter: Organism Value: A. thaliana
  misc_feature: MA Experiment 20000234 PARAMETER Experiment Name: At_Siliques_P Parameter: Plant Line Value: WS
  misc_feature: MA Experiment 20000234 PARAMETER Experiment Name: At_Siliques_P Parameter: Tissue Value: Less Than 5mm Siliques vs. Whole Plant
  misc_feature: MA Experiment ID: 20000437 Result: Down-regulated in Transcription
  misc_feature: MA Experiment 20000437 PARAMETER Experiment Name: At_Drought_P Parameter: Age (day) Value: 8
  misc_feature: MA Experiment 20000437 PARAMETER Experiment Name: At_Drought_P Parameter: Organism Value: A. thaliana
  misc_feature: MA Experiment 20000437 PARAMETER Experiment Name: At_Drought_P Parameter: Plant Line Value: WS
  misc_feature: MA Experiment 20000437 PARAMETER Experiment Name: At_Drought_P Parameter: Timepoint (hr) Value: 24
  misc_feature: MA Experiment 20000437 PARAMETER Experiment Name: At_Drought_P Parameter: Tissue Value: Whole Plant
  misc_feature: MA Experiment 20000437 PARAMETER Experiment Name: At_Drought_P Parameter: Treatment Value: Drought vs. No Drought
  misc_feature: MA Experiment ID: 20000439 Result: Down-regulated in Transcription
  misc_feature: MA Experiment 20000439 PARAMETER Experiment Name: At_Roots__P Parameter: Age (day) Value: 14 vs. 21
  misc_feature: MA Experiment 20000439 PARAMETER Experiment Name: At_Roots__P Parameter: Organism Value: A. thaliana
  misc_feature: MA Experiment 20000439 PARAMETER Experiment Name: At_Roots__P Parameter: Tissue Value: Roots vs. Whole Plant
  misc_feature: MA Experiment ID: 20000451 Result: Up-regulated in Transcription
  misc_feature: MA Experiment 20000451 PARAMETER Experiment Name: At_CS6879_Shoots-Roots_P Parameter: Age (day) Value: 14
  misc_feature: MA Experiment 20000451 PARAMETER Experiment Name: At_CS6879_Shoots-Roots_P Parameter: Organism Value: A. thaliana
  misc_feature: MA Experiment 20000451 PARAMETER Experiment Name: At_CS6879_Shoots-Roots_P Parameter: Plant Line Value: CS6879 vs. WS
  misc_feature: MA Experiment 20000451 PARAMETER Experiment Name: At_CS6879_Shoots-Roots_P Parameter: Tissue Value: Roots
  misc_feature: MA Experiment ID: 20000452 Result: Up-regulated in Transcription
  misc_feature: MA Experiment 20000452 PARAMETER Experiment Name: At_CS6879_Shoots-Roots_P Parameter: Age (day) Value: 14
  misc_feature: MA Experiment 20000452 PARAMETER Experiment Name: At_CS6879_Shoots-Roots_P Parameter: Organism Value: A. thaliana
  misc_feature: MA Experiment 20000452 PARAMETER Experiment Name: At_CS6879_Shoots-Roots_P Parameter: Plant Line Value: CS6879 vs. WS
  misc_feature: MA Experiment 20000452 PARAMETER Experiment Name: At_CS6879_Shoots-Roots_P Parameter: Tissue Value: Shoots
  misc_feature: MA Experiment ID: 20000527 Result: Up-regulated in Transcription
  misc_feature: MA Experiment 20000527 PARAMETER Experiment Name: At_10percent_PEG_P Parameter: Age (day) Value: 20
  misc_feature: MA Experiment 20000527 PARAMETER Experiment Name: At_10percent_PEG_P Parameter: Organism Value: A. thaliana
  misc_feature: MA Experiment 20000527 PARAMETER Experiment Name: At_10percent_PEG_P Parameter: Plant Line Value: WS
  misc_feature: MA Experiment 20000527 PARAMETER Experiment Name: At_10percent_PEG_P Parameter: Timepoint (day) Value: 20
  misc_feature: MA Experiment 20000527 PARAMETER Experiment Name: At_10percent_PEG_P Parameter: Tissue Value: Whole Plant
  misc_feature: MA Experiment 20000527 PARAMETER Experiment Name: At_10percent_PEG_P Parameter: Treatment Value: 10percent PEG vs. No Treatment
  misc_feature: MA Experiment ID: 20001450 Result: Down-regulated in Transcription
  misc_feature: MA Experiment 20001450 PARAMETER Experiment Name: At_Far-red-induction_P Parameter: Age (day) Value: 7
  misc_feature: MA Experiment 20001450 PARAMETER Experiment Name: At_Far-red-induction_P Parameter: Light Value: Far-red vs. White
  misc_feature: MA Experiment 20001450 PARAMETER Experiment Name: At_Far-red-induction_P Parameter: Organism Value: A. thaliana
  misc_feature: MA Experiment 20001450 PARAMETER Experiment Name: At_Far-red-induction_P Parameter: Plant Line Value: Columbia
  misc_feature: MA Experiment 20001450 PARAMETER Experiment Name: At_Far-red-induction_P Parameter: Timepoint (hr) Value: 8
  misc_feature: MA Experiment 20001450 PARAMETER Experiment Name: At_Far-red-induction_P Parameter: Tissue Value: Whole Plant
  misc_feature: MA Experiment ID: 20001757 Result: Up-regulated in Transcription
  misc_feature: MA Experiment 20001757 PARAMETER Experiment Name: At_50mM_NH4NO3_L-to-H_P Parameter: Timepoint (hr) Value: 6
  misc_feature: MA Experiment 20001757 PARAMETER Experiment Name: At_50mM_NH4NO3_L-to-H_P Parameter: Tissue Value: Leaf
  misc_feature: MA Experiment 20001757 PARAMETER Experiment Name: At_50mM_NH4NO3_L-to-H_P Parameter: Treatment Value: 50mM NH4NO3 vs 100mM Mannitol
  misc_feature: MA Experiment ID: 20001905 Result: Down-regulated in Transcription
  misc_feature: MA Experiment 20001905 PARAMETER Experiment Name: At_Drought_Reproduction_P Parameter: Age (day) Value: 40
  misc_feature: MA Experiment 20001905 PARAMETER Experiment Name: At_Drought_Reproduction_P Parameter: Organism Value: A. thaliana
  misc_feature: MA Experiment 20001905 PARAMETER Experiment Name: At_Drought_Reproduction_P Parameter: Plant Line Value: WS
  misc_feature: MA Experiment 20001905 PARAMETER Experiment Name: At_Drought_Reproduction_P Parameter: Timepoint (day) Value: 10
  misc_feature: MA Experiment 20001905 PARAMETER Experiment Name: At_Drought_Reproduction_P Parameter: Tissue Value: Rosettes
  misc_feature: MA Experiment 20001905 PARAMETER Experiment Name: At_Drought_Reproduction_P Parameter: Treatment Value: Drought vs. No Drought
attgtgagtcactctctctgtttctcatctcctcatctttttatcttctttgattgatccacatggcttccgctgccgcaagttccgccttttcactccttaagtccaccggcgctgttgcttcctccgccggaactcgcgcacgtgcctcccttctgccaattccctctacctctgtttccgcgcgtcctctaggcttctccgccactctagattcccgtcgtttctctctccacgttgcttccaaagttgaatcggtgcgtgggaagggaagcagaggagtggtttctatggcgaagaagagcgtcggagatctgacctcagctgatttgaaggggaagaaggttttcgtgagagctgatctcaatgtacctctcgatgataatcagactatcactgacgataccagaatccgtgccgccattccaacgatcaagtatttgattgaaaatggtgctaaagttatcctctccactcatctgggaaggccaaagggagtcaccccaaagtttagtttggctcctcttgtccctaggctctccgagcttcttggtattgaggtcacgaaagctgatgattgtattggcccagaagtggaaagcttggtggcttctctacctgaaggtggagttttgcttcttgagaacgtcaggttttacaaggaggaagagaagaacgatcctgagtttgctaagaagcttgcttctctagctgacctttatgtcaatgatgctttcggaactgctcacagagctcatgcttctaccgaaggagtcactaagttcttgaagccttcagttgctggtttccttttgcaaaaggaactggactacctagttggtgctgtttcaaacccaaagagaccatttgcagccatagtgggtggttccaaagtctcatccaagattggagttattgaatcgcttctggagaagtgtgatattcttcttcttggtggtggaatgatcttcacattctacaaggcacagggtctttcagttggttcgtcccttgttgaagaagacaagcttgaattggctacagaactccttgccaaagctaaggccaaaggagtctctcttttgttgccaacagatgttgtagttgctgacaagtttgctcctgatgccaacagcaagattgtgcctgcatcaggcattgaggacggatggatgggactggacattggtccagactctatcaaaactttcaacgaagctctggacacaacacaaacagtcatttggaatggacctatgggagttttcgagatggaaaagtttgcggctggaacagaggcgatagcgaataaactagcagagctaagtgaaaaaggagtgacaacgataataggaggaggagactcagtggctgcagtggagaaagtaggagtagcaggagtcatgagtcacatctccactggtggtggagccagcttggagctgttggaaggaaaagtacttcccggtgtgatcgcccttgatgaagcaatcccagtcactgtttagaaactcttaccatctataaggcaaacgctgtatacttaaaagagtttctttcgctttaaatctacctatgcaaaactttactatgtatcagagtctcattccccggaaaagaaaactcacatattaaaattct

SEQ ID NO: 84125 - protein, 481 aa, Arabidopsis thaliana; identical to SEQ ID NO: 35239
  peptide (1)..(481): Ceres Seq. ID no. 12673218
  misc_feature (78)..(477): Pfam Name: Phosphoglycerate kinase Pfam Description: Phosphoglycerate kinase
  misc_feature (1)..(481): Homolog of NCBI NO: 15230595 NR Description: phosphoglycerate kinase, putative; protein id: supported by cDNA: 21955., supported by cDNA: gi_13430643, by cDNA: gi_15010643, supported by cDNA: gi_16226507,
  misc_feature (1)..(481): Homolog of NCBI NO: 12644295 NR Description: PHOSPHOGLYCERATE KINASE, CHLOROPLAST PRECURSOR
  misc_feature (1)..(481): Homolog of NCBI NO: 15223484 NR Description: phosphoglycerate kinase, putative; protein id: supported by cDNA: gi_15810504, supported by cDNA: gi_20466263 thaliana] >gi|25288114|pir||D96603 probable
  misc_feature (83)..(481): Homolog of NCBI NO: 2129669 NR Description: phosphoglycerate kinase (EC 2.7.2.3) OBP44 - thaliana (fragment) >gi|1022805|gb|AAB60303.1| phosphoglycerate
  misc_feature (1)..(481): Homolog of NCBI NO: 3738261 NR Description: chloroplast phosphoglycerate kinase [Populus
  misc_feature (1)..(481): Homolog of NCBI NO: 2499497 NR Description: Phosphoglycerate kinase, chloroplast precursor
  misc_feature (1)..(481): Homolog of NCBI NO: 7434544 NR Description: phosphoglycerate kinase (EC 2.7.2.3) precursor,
  misc_feature (55)..(481): Homolog of NCBI NO: 1346698 NR Description: Phosphoglycerate kinase, chloroplast precursor
  misc_feature (1)..(477): Homolog of NCBI NO: 129915 NR Description: Phosphoglycerate kinase, chloroplast precursor
  misc_feature (55)..(465): Homolog of NCBI NO: 282833 NR Description: phosphoglycerate kinase (EC 2.7.2.3) - spinach

SEQ ID NO: 84126 - protein, 405 aa, Arabidopsis thaliana; identical to SEQ ID NO: 35240
  peptide (1)..(405): Ceres Seq. ID no. 12673219
  misc_feature (2)..(401): Pfam Name: Phosphoglycerate kinase Pfam Description: Phosphoglycerate kinase
  misc_feature (1)..(405): Homolog of NCBI NO: 15230595 NR Description: phosphoglycerate kinase, putative; protein id: supported by cDNA: 21955., supported by cDNA: gi_13430643, by cDNA: gi_15010643, supported by cDNA: gi_16226507,
  misc_feature (1)..(405): Homolog of NCBI NO: 12644295 NR Description: PHOSPHOGLYCERATE KINASE, CHLOROPLAST PRECURSOR
  misc_feature (1)..(405): Homolog of NCBI NO: 15223484 NR Description: phosphoglycerate kinase, putative; protein id: supported by cDNA: gi_15810504, supported by cDNA: gi_20466263 thaliana] >gi|25288114|pir||D96603 probable
  misc_feature (7)..(405): Homolog of NCBI NO: 2129669 NR Description: phosphoglycerate kinase (EC 2.7.2.3) OBP44 - thaliana (fragment) >gi|1022805|gb|AAB60303.1| phosphoglycerate
  misc_feature (1)..(405): Homolog of NCBI NO: 3738261 NR Description: chloroplast phosphoglycerate kinase [Populus
  misc_feature (1)..(405): Homolog of NCBI NO: 2499497 NR Description: Phosphoglycerate kinase, chloroplast precursor
  misc_feature (1)..(405): Homolog of NCBI NO: 7434544 NR Description: phosphoglycerate kinase (EC 2.7.2.3) precursor,
  misc_feature (1)..(405): Homolog of NCBI NO: 1346698 NR Description: Phosphoglycerate kinase, chloroplast precursor
  misc_feature (1)..(401): Homolog of NCBI NO: 129915 NR Description: Phosphoglycerate kinase, chloroplast precursor
  misc_feature (1)..(389): Homolog of NCBI NO: 282833 NR Description: phosphoglycerate kinase (EC 2.7.2.3) - spinach

SEQ ID NO: 84127 - DNA, 813 bp, Arabidopsis thaliana
  misc_feature (1)..(813): Ceres Seq. ID no. 12673220
  misc_feature: MA Experiment ID: 108595 Result: Up-regulated in Transcription
  misc_feature: MA Experiment 108595 PARAMETER Experiment Name: At_Ler-pi_Ovule_cDNA_P Parameter: Plant Line Value: null
  misc_feature: MA Experiment ID: 20000171 Result: Down-regulated in Transcription
  misc_feature: MA Experiment 20000171 PARAMETER Experiment Name: At_42deg_Heat_P Parameter: Age (day) Value: 14
  misc_feature: MA Experiment 20000171 PARAMETER Experiment Name: At_42deg_Heat_P Parameter: Organism Value: A. thaliana
  misc_feature: MA Experiment 20000171 PARAMETER Experiment Name: At_42deg_Heat_P Parameter: Plant Line Value: WS
  misc_feature: MA Experiment 20000171 PARAMETER Experiment Name: At_42deg_Heat_P Parameter: Temperature (deg C) Value: 42 vs. 22
  misc_feature: MA Experiment 20000171 PARAMETER Experiment Name: At_42deg_Heat_P Parameter: Timepoint (hr) Value: 1
  misc_feature: MA Experiment 20000171 PARAMETER Experiment Name: At_42deg_Heat_P Parameter: Tissue Value: Aerial
  misc_feature: MA Experiment ID: 20000173 Result: Down-regulated in Transcription
  misc_feature: MA Experiment 20000173 PARAMETER Experiment Name: At_42deg_Heat_P Parameter: Age (day) Value: 14
  misc_feature: MA Experiment 20000173 PARAMETER Experiment Name: At_42deg_Heat_P Parameter: Organism Value: A. thaliana
  misc_feature: MA Experiment 20000173 PARAMETER Experiment Name: At_42deg_Heat_P Parameter: Plant Line Value: WS
  misc_feature: MA Experiment 20000173 PARAMETER Experiment Name: At_42deg_Heat_P Parameter: Temperature (deg C) Value: 42 vs. 22
  misc_feature: MA Experiment 20000173 PARAMETER Experiment Name: At_42deg_Heat_P Parameter: Timepoint (hr) Value: 6
  misc_feature: MA Experiment 20000173 PARAMETER Experiment Name: At_42deg_Heat_P Parameter: Tissue Value: Aerial
  misc_feature: MA Experiment ID: 20000437 Result: Down-regulated in Transcription
  misc_feature: MA Experiment 20000437 PARAMETER Experiment Name: At_Drought_P Parameter: Age (day) Value: 8
  misc_feature: MA Experiment 20000437 PARAMETER Experiment Name: At_Drought_P Parameter: Organism Value: A. thaliana
  misc_feature: MA Experiment 20000437 PARAMETER Experiment Name: At_Drought_P Parameter: Plant Line Value: WS
  misc_feature: MA Experiment 20000437 PARAMETER Experiment Name: At_Drought_P Parameter: Timepoint (hr) Value: 24
  misc_feature: MA Experiment 20000437 PARAMETER Experiment Name: At_Drought_P Parameter: Tissue Value: Whole Plant
  misc_feature: MA Experiment 20000437 PARAMETER Experiment Name: At_Drought_P Parameter: Treatment Value: Drought vs. No Drought
  misc_feature: MA Experiment ID: 20001248 Result: Up-regulated in Transcription
  misc_feature: MA Experiment 20001248 PARAMETER Experiment Name: At_Far-red-induction_P Parameter: Age (day) Value: 7
  misc_feature: MA Experiment 20001248 PARAMETER Experiment Name: At_Far-red-induction_P Parameter: Light Value: Far-red vs. White
  misc_feature: MA Experiment 20001248 PARAMETER Experiment Name: At_Far-red-induction_P Parameter: Organism Value: A. thaliana
  misc_feature: MA Experiment 20001248 PARAMETER Experiment Name: At_Far-red-induction_P Parameter: Plant Line Value: Columbia
  misc_feature: MA Experiment 20001248 PARAMETER Experiment Name: At_Far-red-induction_P Parameter: Timepoint (hr) Value: 4
  misc_feature: MA Experiment 20001248 PARAMETER Experiment Name: At_Far-red-induction_P Parameter: Tissue Value: Whole Plant
  misc_feature: MA Experiment ID: 20001451 Result: Up-regulated in Transcription
  misc_feature: MA Experiment 20001451 PARAMETER Experiment Name: At_Far-red-induction_P Parameter: Age (day) Value: 7
  misc_feature: MA Experiment 20001451 PARAMETER Experiment Name: At_Far-red-induction_P Parameter: Light Value: Far-red vs. White
  misc_feature: MA Experiment 20001451 PARAMETER Experiment Name: At_Far-red-induction_P Parameter: Organism Value: A. thaliana
  misc_feature: MA Experiment 20001451 PARAMETER Experiment Name: At_Far-red-induction_P Parameter: Plant Line Value: Columbia
  misc_feature: MA Experiment 20001451 PARAMETER Experiment Name: At_Far-red-induction_P Parameter: Timepoint (hr) Value: 24
  misc_feature: MA Experiment 20001451 PARAMETER Experiment Name: At_Far-red-induction_P Parameter: Tissue Value: Whole Plant
agaatcgtatttgtgggtatctagaagaggcgttaggattgtctccaagctgggtgttttttcatcttgatggccaactaatcgaatctcctactctaaagatatttttgtttatttctgtcatgtgtgatttggtcgcgcgtacgggtcgtctccagcagcggtacgaggatggctctcgtctcgtcgccgggtgtattccgtttaggtatgtaaattctgacaaagatggtaattctgaatctgggaaagtgattcaagtgttgatgatcagctcgtctagtggacctggacttttgtttcccaagggaggatgggagaatgatgagacagtcagggaggctgcagcgagggaagcagtggaagaagcaggatttgttatttttttttggggaattatgagttcaagagcaaatcacaccaagatgagtttagcccagaaggtttatgtaaagcggcaatgtacgcgttgtatgtgaaagaagagctagcgacgtggccggaacatgagacgagaacacgtaaatggctgacaattgaagaagcggtagagagttgcaggcacccttggatgaaggacgcattggtggaaggattctgtaaatggcataaggagaagatggttaaaggagaggagataactggtgaacattgaagcaaatgtgcataaacctctgagcgttggtttcattcctttcgattttgtttttacctttttgtttttgtttttgaagtcttatgcatggataatctcttgtgactgcgaaacgtaatagtttcgaagatttaaagttcaattattgccctattttc

SEQ ID NO: 84128 - protein, 158 aa, Arabidopsis thaliana
  peptide (1)..(158): Ceres Seq. ID no. 12673221
  misc_feature (59)..(124): Pfam Name: NUDIX domain Pfam Description: NUDIX domain
  misc_feature (41)..(124): Homolog of NCBI NO: 18399682 NR Description: expressed protein; protein id: At3g12600.1 thaliana] >gi|9294354|dbj|BAB02251.1| to unknown protein [Arabidopsis thaliana]
  misc_feature (41)..(124): Homolog of NCBI NO: 38175436 NR Description: MutT-like protein [Oryza sativa (japonica
  misc_feature (41)..(124): Homolog of NCBI NO: 34900054 NR Description: MutT-like protein~contains ESTs
  misc_feature (41)..(124): Homolog of NCBI NO: 18391450 NR Description: expressed protein; protein id: At1g12880.1, by cDNA: gi_15810278, supported by cDNA: gi_20258974 [Arabidopsis >gi|15810279|gb|AAL07027.1| unknown protein [Arabidopsis
  misc_feature (41)..(124): Homolog of NCBI NO: 15231598 NR Description: MutT-like protein; protein id: At3g26690.1
  misc_feature (41)..(124): Homolog of NCBI NO: 25518008 NR Description: F13K23.14 protein - Arabidopsis thaliana
  misc_feature (30)..(124): Homolog of NCBI NO: 15221055 NR Description: unknown protein; protein id: At1g18300.1 thaliana] >gi|6714298|gb|AAF25994.1|AC013354_13 F15H18.18 thaliana] >gi|8671772|gb|AAF78378.1|AC069551_11 T10O22.27
  misc_feature (40)..(126): Homolog of NCBI NO: 15223919 NR Description: hypothetical protein; protein id: At1g14860.1
  misc_feature (40)..(124): Homolog of NCBI NO: 18379275 NR Description: expressed protein; protein id: At2g01670.1, by cDNA: 8247., supported by cDNA: gi_13272382, supported by gi_15293192, supported by cDNA: gi_15724325 [Arabidopsis
  misc_feature (40)..(124): Homolog of NCBI NO: 21595695 NR Description: unknown [Arabidopsis thaliana]
NRICGYLEEALGLSPSWVFFHLDGQLIESPTLKIFLFISVMCDLVARTGRLQQRYEDGSRLVAGCIPFRYVNSDKDGNSESGKVIQVLMISSSSGPGLLFPKGGWENDETVREAAAREAVEEAGFVIFFWGIMSSRANHTKMSLAQKVYVKRQCTRCM

SEQ ID NO: 84129 - protein, 118 aa, Arabidopsis thaliana
  peptide (1)..(118): Ceres Seq. ID no. 12673222
  misc_feature (19)..(84): Pfam Name: NUDIX domain Pfam Description: NUDIX domain
  misc_feature (1)..(84): Homolog of NCBI NO: 18399682 NR Description: expressed protein; protein id: At3g12600.1 thaliana] >gi|9294354|dbj|BAB02251.1| to unknown protein [Arabidopsis thaliana]
  misc_feature (1)..(84): Homolog of NCBI NO: 38175436 NR Description: MutT-like protein [Oryza sativa (japonica
  misc_feature (1)..(84): Homolog of NCBI NO: 34900054 NR Description: MutT-like protein~contains ESTs
  misc_feature (1)..(84): Homolog of NCBI NO: 18391450 NR Description: expressed protein; protein id: At1g12880.1, by cDNA: gi_15810278, supported by cDNA: gi_20258974 [Arabidopsis >gi|15810279|gb|AAL07027.1| unknown protein [Arabidopsis
  misc_feature (1)..(84): Homolog of NCBI NO: 15231598 NR Description: MutT-like protein; protein id: At3g26690.1
  misc_feature (1)..(84): Homolog of NCBI NO: 25518008 NR Description: F13K23.14 protein - Arabidopsis thaliana
  misc_feature (1)..(84): Homolog of NCBI NO: 15221055 NR Description: unknown protein; protein id: At1g18300.1 thaliana] >gi|6714298|gb|AAF25994.1|AC013354_13 F15H18.18 thaliana] >gi|8671772|gb|AAF78378.1|AC069551_11 T10O22.27
  misc_feature (1)..(86): Homolog of NCBI NO: 15223919 NR Description: hypothetical protein; protein id: At1g14860.1
  misc_feature (1)..(84): Homolog of NCBI NO: 18379275 NR Description: expressed protein; protein id: At2g01670.1, by cDNA: 8247., supported by cDNA: gi_13272382, supported by gi_15293192, supported by cDNA: gi_15724325 [Arabidopsis
  misc_feature (1)..(84): Homolog of NCBI NO: 21595695 NR Description: unknown [Arabidopsis thaliana]
MCDLVARTGRLQQRYEDGSRLVAGCIPFRYVNSDKDGNSESGKVIQVLMISSSSGPGLLFPKGGWENDETVREAAAREAVEEAGFVIFFWGIMSSRANHTKMSLAQKVYVKRQCTRCM

SEQ ID NO: 84130 - DNA, 4497 bp, Arabidopsis thaliana
  misc_feature (1)..(4497): Ceres Seq. ID no. 12673233
  misc_feature: MA Experiment ID: 20000315 Result: Down-regulated in Transcription
  misc_feature: MA Experiment 20000315 PARAMETER Experiment Name: At_14day_Shoots-Roots_Sub_P Parameter: Age (day) Value: 14
  misc_feature: MA Experiment 20000315 PARAMETER Experiment Name: At_14day_Shoots-Roots_Sub_P Parameter: Organism Value: A. thaliana
  misc_feature: MA Experiment 20000315 PARAMETER Experiment Name: At_14day_Shoots-Roots_Sub_P Parameter: Plant Line Value: WS
  misc_feature: MA Experiment 20000315 PARAMETER Experiment Name: At_14day_Shoots-Roots_Sub_P Parameter: Tissue Value: Shoots vs. Whole Plant
  misc_feature: MA Experiment ID: 20000347 Result: Up-regulated in Transcription
  misc_feature: MA Experiment 20000347 PARAMETER Experiment Name: At_2mM_SA_Sub_P Parameter: Age (day) Value: 14
  misc_feature: MA Experiment 20000347 PARAMETER Experiment Name: At_2mM_SA_Sub_P Parameter: Organism Value: A. thaliana
  misc_feature: MA Experiment 20000347 PARAMETER Experiment Name: At_2mM_SA_Sub_P Parameter: Plant Line Value: WS
  misc_feature: MA Experiment 20000347 PARAMETER Experiment Name: At_2mM_SA_Sub_P Parameter: Timepoint (hr) Value: 6
  misc_feature: MA Experiment 20000347 PARAMETER Experiment Name: At_2mM_SA_Sub_P Parameter: Tissue Value: Aerial
  misc_feature: MA Experiment 20000347 PARAMETER Experiment Name: At_2mM_SA_Sub_P Parameter: Treatment Value: 2mM SA vs. No Treatment
atgaaacagagttacgcgatggacaatcctatcgtttttttcctccttgagtccaattattttccaatgttctccattttctttaatcttcttttgttgctagttatgtttggttcctgtgtttacaagaaaaggttgggttgggaaaatagtgatgctttcacgaatgagaggtttaaggatatgtctttaacatacaataaactggtcgttatatgttgtgagactttgtctgccttgaattctgtgttgttgctgttaagttgcttcaacctgcataaaaatggttgggatcgcagcgaactgatgattctcttagatcttttatttacagccctttcttggggtgccatctctttctacatacgtagtcaatttacctattctcatgatcaaaagtttcctattttgcttagagtctggtgggttttgtattttatgttttcttgctaccgtcttttggtagacattgctctatacaagaagcaagaactggtgtcagttcaccttttattgtctgatgtactggccgtaagcgtggggttgtttctctgctattcatgtttgcagaagcaaggacaaggtgaaaggatcaacttattactcgaagaacccctcttgaatggagctgaatctagtgcggctactagtgtgcagttggataaggccgaagatgatgaggttgttacacctttttcgaacgctgggtttctaagccatgtgagtttctcttggatgagtcctttaattgtcttaggaaacgagaaaattatagacagcgaggatgttcctcaagttgacaatagtgacagagccgagaaactattttggatatttaggagtaagcttgaatgggacgatggtgaaagaaggatcaccacgtataagcttattaaggcactcttcttttcagtgtggcgagatattctattgtcaactctgtttgcttttgtctatacagtgtcttgctacgttgcaccgtatctcatggatactttcgttcagtacctgaacggtcaacgacagtattcaaatcaaggggttgttttagtgacaactttttttgttgctaagcttgtagaatgccaagcgcggaggaattggtatttcaggttgcagaaagctgggattggaatgagatcagtcctggtttcaatgatctacgaaaagggcttgacccttccctgttattcaaagcaaggacacaccagtggtgagatcataaatctcatgacagtagatgctgagagaatcagtgcttttagttggtatatgcatgatccatggatacttgtcttacaaatcagtttagcgttattgatcttgtacagaagccttgggctaggatcaattgcagcttttgctgcaacgtttttagttatgctgggaaatattcccttggcaaagttggaagagaagtttcagggaaatttaatggagtctaaagataacaggatgaagaaaacatcggaggccttactgaacatgaggattcttaaacttcaaggatgggagatgaagttccttcataagattcttgaccttagaggcattgaagcaggctggcttaagaaattcgtgtataactctgcggctatcagctctgttctctgggctgcaccttcgttcgtttctgcaacagcttttggagcttgtatgcttctgaagattcctcttgaatcgggaaagataatagctgctcttgcaacttttcgaattctgcaaactccgatatacaaacttcctgatacgatctccatgattgttcagacaaaggtatctcttgataggattgcaacttttctttgccttgatgatttgcagcaagatggtatggagagacttcctagtggaagttcaaaaatggatgtggaagtcagcaatggtgctttctcttgggatgactcttcacccatcccgacgctgaaagacataaggttcaaaatccctcatgggatgaacatcgctatatgtggtactgttggttcagggaaatcaagcttactctcgtccatactaggtgaagttcccaaaatatctggaaatcttaaggtttgtggaagaaaggcatacattgcacagtcgccttggatccagagtggcaaagtcgaagagaacattctgtttggtaagcccatgcaaagagaatggtaccaaagggtgcttgaagcgtgttctttgaataaggacttggaggtatttccgttccgtgatcagacagttattggagaaaggggtatcaatcttagcggtggacagaagcaacggatacagattgcacgtgctctttaccaagacgcagatatctatctgtttgatgacccttttagtgcagtagacgctcatactggatcacatctcttcaaggaagtcctgctggggcttctgagaaacaagacagtcatatatgtcactcatcaacttgaattcctgcctgaagctgatcttatactggtcatgaaagatgggaggatcacgcaagcagggaagtacaatgaaattcttgaatcaggaacagatttcatggaacttgtaggagctcacactgatgccttagctgcagttgattcatatgaaaaaggatctgcttcagcacaatcaacaacaagcaaagaaagcaaagtttccaacgatgaagaaaaacaagaggaagatttgcctagcccgaaaggacaactagttcaagaagaagagcgggagaaaggcaaagttgggttcactgtataccaaaagtatatgaaattggcgtatggaggagcacttgtgcctattatattggttgtacagattctctttcaggttctaaacatcgggagcaactattggatggcttgggtaactcctgtttctaaggatgtgaaacctctagtgagtggctctacattgattctagtctatgtatttctagccactgcgagctccttctgtatacttgtcagagcaatgctgtccgcgatgactggtttcaagatagctactgaactcttcaatcaaatgcattttcgcatttttcgtgcctccatgtcattctttgatgccaccccaattggccgaattttgaatagagcttctacagaccaaagtgccgtggatttgagattaccaagtcaattttcaaatcttgcaattgctgctgtaaacatcttggggattattggagtgatgggacaggttgcttggcaggtccttatcgtcttcatccctgtcatcgctgcatgcacctggtatcggcaatattacatatctgcggctcgggaactagcaagattatctggaataagcagatcgcctttggtgcagcatttttctgaaacactttcagggataacaactataaggagctttgatcaagaaccaagattccgcactgatatcatgagacttaacgattgttattctcggctgaggttccatgccatttctgcaatggagtggctctgcttccgtcttgatctcttatccactgtggcatttgcgctttcgcttgttatcttagtttctgtgcctgaaggagtcattaatccaagctttgcaggattggcggttacatatgcactcaatctaaatagcctgcaagcaactttaatatggacactttgcgatcttgagaacaaaatgatatccgtggagagaatgcttcaatacatagacatccccagtgaaccatctctcgttattgaatcaactaggcctgagaaatcttggccctgtcgcggagagattactatctgtaatctgcaagtacgatatgggccacatctgcctatggtgctgcgtgggctgacatgcacttttcgaggaggcctgaaaacgggaatcgttggaagaacaggatgtggcaaatccactctaattcaaaccctttttaggattgtggaacctgcagctggagaaatcaggatagatggaataaacatcttgaccattgggctgcatgacctgcgttccagactaagtatcatacctcaagaaccaaccatgtttgaaggcacggttcgcagtaacttggaccctcttgaggaatacgctgatgaccaaatctgggaggcactcgacaagtgtcaacttggggatgaaataaggaagaaagaactaaagctagattcccctgtaagtgagaatggacagaactggagtgttggtcagagacaactggtgtgtcttggacgagtcttgctaaagagaagcaaagtattgattcttgatgaagccacagcttctgtagatacagcgactgatactctgatacaggaaacactgagacaacatttctcgggctgtacagtaataacaatcgcacacagaatatcatctgttatagacagtgatatggtactgctcctagaccaagggttaatagaagaacacgattcaccggcgagattgctggaagacaagtcctcgtcattttcaaagcttgtggcagagtacacagcaagttcggattcaagattcaaaagaagttcaatgaaaacaaactagttataataaaattaa

SEQ ID NO: 84131 - protein, 1493 aa, Arabidopsis thaliana
  peptide (1)..(1493): Ceres Seq. ID no. 12673234
  misc_feature (919)..(1195): Pfam Name: ABC transporter transmembrane region Pfam Description: ABC transporter transmembrane region
  misc_feature (105)..(1481): Homolog of NCBI NO: 15227133 NR Description: glutathione-conjugate transporter AtMRP4; protein
  misc_feature (166)..(1484): Homolog of NCBI NO: 11277356 NR Description: ABC transporter-like protein - Arabidopsis
  misc_feature (166)..(1484): Homolog of NCBI NO: 22331862 NR Description: ABC transporter family protein; protein id:
  misc_feature (105)..(1482): Homolog of NCBI NO: 27368877 NR Description: MRP-like ABC transporter [Oryza sativa (japonica
  misc_feature (635)..(1483): Homolog of NCBI NO: 27368875 NR Description: MRP-like ABC transporter [Oryza sativa (japonica
  misc_feature (232)..(634): Homolog of NCBI NO: 27368875 NR Description: MRP-like ABC transporter [Oryza sativa (japonica
  misc_feature (233)..(1480): Homolog of NCBI NO: 30686160 NR Description: ABC transporter family protein [Arabidopsis
  misc_feature (224)..(885): Homolog of NCBI NO: 19172038 NR Description: ABC transporter ABCC.8 [Dictyostelium discoideum]
  misc_feature (887)..(1474): Homolog of NCBI NO: 19172038 NR Description: ABC transporter ABCC.8 [Dictyostelium discoideum]
  misc_feature (840)..(1470): Homolog of NCBI NO: 6978669 NR Description: ATP-binding cassette, sub-family C (CFTR/MRP), associated protein 2 [Rattus norvegicus]
MKQSYAMDNPIVFFLLESNYFPMFSIFFNLLLLLVMFGSCVYKKRLGWENSDAFTNERFKDMSLTYNKLVVICCETLSALNSVLLLLSCFNLHKNGWDRSELMILLDLLFTALSWGAISFYIRSQFTYSHDQKFPILLRVWWVLYFMFSCYRLLVDIALYKKQELVSVHLLLSDVLAVSVGLFLCYSCLQKQGQGERINLLLEEPLLNGAESSAATSVQLDKAEDDEVVTPFSNAGFLSHVSFSWMSPLIVLGNEKIIDSEDVPQVDNSDRAEKLFWIFRSKLEWDDGERRITTYKLIKALFFSVWRDILLSTLFAFVYTVSCYVAPYLMDTFVQYLNGQRQYSNQGVVLVTTFFVAKLVECQARRNWYFRLQKAGIGMRSVLVSMIYEKGLTLPCYSKQGHTSGEIINLMTVDAERISAFSWYMHDPWILVLQISLALLILYRSLGLGSIAAFAATFLVMLGNIPLAKLEEKFQGNLMESKDNRMKKTSEALLNMRILKLQGWEMKFLHKILDLRGIEAGWLKKFVYNSAAISSVLWAAPSFVSATAFGACMLLKIPLESGKIIAALATFRILQTPIYKLPDTISMIVQTKVSLDRIATFLCLDDLQQDGMERLPSGSSKMDVEVSNGAFSWDDSSPIPTLKDIRFKIPHGMNIAICGTVGSGKSSLLSSILGEVPKISGNLKVCGRKAYIAQSPWIQSGKVEENILFGKPMQREWYQRVLEACSLNKDLEVFPFRDQTVIGERGINLSGGQKQRIQIARALYQDADIYLFDDPFSAVDAHTGSHLFKEVLLGLLRNKTVIYVTHQLEFLPEADLILVMKDGRITQAGKYNEILESGTDFMELVGAHTDALAAVDSYEKGSASAQSTTSKESKVSNDEEKQEEDLPSPKGQLVQEEEREKGKVGFTVYQKYMKLAYGGALVPIILVVQILFQVLNIGSNYWMAWVTPVSKDVKPLVSGSTLILVYVFLATASSFCILVRAMLSAMTGFKIATELFNQMHFRIFRASMSFFDATPIGRILNRASTDQSAVDLRLPSQFSNLAIAAVNILGIIGVMGQVAWQVLIVFIPVIAACTWYRQYYISAARELARLSGISRSPLVQHFSETLSGITTIRSFDQEPRFRTDIMRLNDCYSRLRFHAISAMEWLCFRLDLLSTVAFALSLVILVSVPEGVINPSFAGLAVTYALNLNSLQATLIWTLCDLENKMISVERMLQYIDIPSEPSLVIESTRPEKSWPCRGEITICNLQVRYGPHLPMVLRGLTCTFRGGLKTGIVGRTGCGKSTLIQTLFRIVEPAAGEIRIDGINILTIGLHDLRSRLSIIPQEPTMFEGTVRSNLDPLEEYADDQIWEALDKCQLGDEIRKKELKLDSPVSENGQNWSVGQRQLVCLGRVLLKRSKVLILDEATASVDTATDTLIQETLRQHFSGCTVITIAHRISSVIDSDMVLLLDQGLIEEHDSPARLLEDKSSSFSKLVAEYTASSDSRFKRSSMKTN

SEQ ID NO: 84132 - protein, 1487 aa, Arabidopsis thaliana
  peptide (1)..(1487): Ceres Seq. ID no. 12673235
  misc_feature (913)..(1189): Pfam Name: ABC transporter transmembrane region Pfam Description: ABC transporter transmembrane region
  misc_feature (99)..(1475): Homolog of NCBI NO: 15227133 NR Description: glutathione-conjugate transporter AtMRP4; protein
  misc_feature (160)..(1478): Homolog of NCBI NO: 11277356 NR Description: ABC transporter-like protein - Arabidopsis
  misc_feature (160)..(1478): Homolog of NCBI NO: 22331862 NR Description: ABC transporter family protein; protein id:
  misc_feature (99)..(1476): Homolog of NCBI NO: 27368877 NR Description: MRP-like ABC transporter [Oryza sativa (japonica
  misc_feature (629)..(1477): Homolog of NCBI NO: 27368875 NR Description: MRP-like ABC transporter [Oryza sativa (japonica
  misc_feature (226)..(628): Homolog of NCBI NO: 27368875 NR Description: MRP-like ABC transporter [Oryza sativa (japonica
  misc_feature (227)..(1474): Homolog of NCBI NO: 30686160 NR Description: ABC transporter family protein [Arabidopsis
  misc_feature (218)..(879): Homolog of NCBI NO: 19172038 NR Description: ABC transporter ABCC.8 [Dictyostelium discoideum]
  misc_feature (881)..(1468): Homolog of NCBI NO: 19172038 NR Description: ABC transporter ABCC.8 [Dictyostelium discoideum]
  misc_feature (834)..(1464): Homolog of NCBI NO: 6978669 NR Description: ATP-binding cassette, sub-family C (CFTR/MRP), associated protein 2 [Rattus norvegicus]
MDNPIVFFLLESNYFPMFSIFFNLLLLLVMFGSCVYKKRLGWENSDAFTNERFKDMSLTYNKLVVICCETLSALNSVLLLLSCFNLHKNGWDRSELMILLDLLFTALSWGAISFYIRSQFTYSHDQKFPILLRVWWVLYFMFSCYRLLVDIALYKKQELVSVHLLLSDVLAVSVGLFLCYSCLQKQGQGERINLLLEEPLLNGAESSAATSVQLDKAEDDEVVTPFSNAGFLSHVSFSWMSPLIVLGNEKIIDSEDVPQVDNSDRAEKLFWIFRSKLEWDDGERRITTYKLIKALFFSVWRDILLSTLFAFVYTVSCYVAPYLMDTFVQYLNGQRQYSNQGVVLVTTFFVAKLVECQARRNWYFRLQKAGIGMRSVLVSMIYEKGLTLPCYSKQGHTSGEIINLMTVDAERISAFSWYMHDPWILVLQISLALLILYRSLGLGSIAAFAATFLVMLGNIPLAKLEEKFQGNLMESKDNRMKKTSEALLNMRILKLQGWEMKFLHKILDLRGIEAGWLKKFVYNSAAISSVLWAAPSFVSATAFGACMLLKIPLESGKIIAALATFRILQTPIYKLPDTISMIVQTKVSLDRIATFLCLDDLQQDGMERLPSGSSKMDVEVSNGAFSWDDSSPIPTLKDIRFKIPHGMNIAICGTVGSGKSSLLSSILGEVPKISGNLKVCGRKAYIAQSPWIQSGKVEENILFGKPMQREWYQRVLEACSLNKDLEVFPFRDQTVIGERGINLSGGQKQRIQIARALYQDADIYLFDDPFSAVDAHTGSHLFKEVLLGLLRNKTVIYVTHQLEFLPEADLILVMKDGRITQAGKYNEILESGTDFMELVGAHTDALAAVDSYEKGSASAQSTTSKESKVSNDEEKQEEDLPSPKGQLVQEEEREKGKVGFTVYQKYMKLAYGGALVPIILVVQILFQVLNIGSNYWMAWVTPVSKDVKPLVSGSTLILVYVFLATASSFCILVRAMLSAMTGFKIATELFNQMHFRIFRASMSFFDATPIGRILNRASTDQSAVDLRLPSQFSNLAIAAVNILGIIGVMGQVAWQVLIVFIPVIAACTWYRQYYISAARELARLSGISRSPLVQHFSETLSGITTIRSFDQEPRFRTDIMRLNDCYSRLRFHAISAMEWLCFRLDLLSTVAFALSLVILVSVPEGVINPSFAGLAVTYALNLNSLQATLIWTLCDLENKMISVERMLQYIDIPSEPSLVIESTRPEKSWPCRGEITICNLQVRYGPHLPMVLRGLTCTFRGGLKTGIVGRTGCGKSTLIQTLFRIVEPAAGEIRIDGINILTIGLHDLRSRLSIIPQEPTMFEGTVRSNLDPLEEYADDQIWEALDKCQLGDEIRKKELKLDSPVSENGQNWSVGQRQLVCLGRVLLKRSKVLILDEATASVDTATDTLIQETLRQHFSGCTVITIAHRISSVIDSDMVLLLDQGLIEEHDSPARLLEDKSSSFSKLVAEYTASSDSRFKRSSMKTN

SEQ ID NO: 84133 - protein, 1471 aa, Arabidopsis thaliana
  peptide (1)..(1471): Ceres Seq. ID no. 12673236
  misc_feature (897)..(1173): Pfam Name: ABC transporter transmembrane region Pfam Description: ABC transporter transmembrane region
  misc_feature (83)..(1459): Homolog of NCBI NO: 15227133 NR Description: glutathione-conjugate transporter AtMRP4; protein
  misc_feature (144)..(1462): Homolog of NCBI NO: 11277356 NR Description: ABC transporter-like protein - Arabidopsis
  misc_feature (144)..(1462): Homolog of NCBI NO: 22331862 NR Description: ABC transporter family protein; protein id:
  misc_feature (83)..(1460): Homolog of NCBI NO: 27368877 NR Description: MRP-like ABC transporter [Oryza sativa (japonica
  misc_feature (613)..(1461): Homolog of NCBI NO: 27368875 NR Description: MRP-like ABC transporter [Oryza sativa (japonica
  misc_feature (210)..(612): Homolog of NCBI NO: 27368875 NR Description: MRP-like ABC transporter [Oryza sativa (japonica
  misc_feature (211)..(1458): Homolog of NCBI NO: 30686160 NR Description: ABC transporter family protein [Arabidopsis
  misc_feature (202)..(863): Homolog of NCBI NO: 19172038 NR Description: ABC transporter ABCC.8 [Dictyostelium discoideum]
  misc_feature (865)..(1452): Homolog of NCBI NO: 19172038 NR Description: ABC transporter ABCC.8 [Dictyostelium discoideum]
  misc_feature (818)..(1448): Homolog of NCBI NO: 6978669 NR Description: ATP-binding cassette, sub-family C (CFTR/MRP), associated protein 2 [Rattus norvegicus]
MFSIFFNLLLLLVMFGSCVYKKRLGWENSDAFTNERFKDMSLTYNKLVVICCETLSALNSVLLLLSCFNLHKNGWDRSELMILLDLLFTALSWGAISFYIRSQFTYSHDQKFPILLRVWWVLYFMFSCYRLLVDIALYKKQELVSVHLLLSDVLAVSVGLFLCYSCLQKQGQGERINLLLEEPLLNGAESSAATSVQLDKAEDDEVVTPFSNAGFLSHVSFSWMSPLIVLGNEKIIDSEDVPQVDNSDRAEKLFWIFRSKLEWDDGERRITTYKLIKALFFSVWRDILLSTLFAFVYTVSCYVAPYLMDTFVQYLNGQRQYSNQGVVLVTTFFVAKLVECQARRNWYFRLQKAGIGMRSVLVSMIYEKGLTLPCYSKQGHTSGEIINLMTVDAERISAFSWYMHDPWILVLQISLALLILYRSLGLGSIAAFAATFLVMLGNIPLAKLEEKFQGNLMESKDNRMKKTSEALLNMRILKLQGWEMKFLHKILDLRGIEAGWLKKFVYNSAAISSVLWAAPSFVSATAFGACMLLKIPLESGKIIAALATFRILQTPIYKLPDTISMIVQTKVSLDRIATFLCLDDLQQDGMERLPSGSSKMDVEVSNGAFSWDDSSPIPTLKDIRFKIPHGMNIAICGTVGSGKSSLLSSILGEVPKISGNLKVCGRKAYIAQSPWIQSGKVEENILFGKPMQREWYQRVLEACSLNKDLEVFPFRDQTVIGERGINLSGGQKQRIQIARALYQDADIYLFDDPFSAVDAHTGSHLFKEVLLGLLRNKTVIYVTHQLEFLPEADLILVMKDGRITQAGKYNEILESGTDFMELVGAHTDALAAVDSYEKGSASAQSTTSKESKVSNDEEKQEEDLPSPKGQLVQEEEREKGKVGFTVYQKYMKLAYGGALVPIILVVQILFQVLNIGSNYWMAWVTPVSKDVKPLVSGSTLILVYVFLATASSFCILVRAMLSAMTGFKIATELFNQMHFRIFRASMSFFDATPIGRILNRASTDQSAVDLRLPSQFSNLAIAAVNILGIIGVMGQVAWQVLIVFIPVIAACTWYRQYYISAARELARLSGISRSPLVQHFSETLSGITTIRSFDQEPRFRTDIMRLNDCYSRLRFHAISAMEWLCFRLDLLSTVAFALSLVILVSVPEGVINPSFAGLAVTYALNLNSLQATLIWTLCDLENKMISVERMLQYIDIPSEPSLVIESTRPEKSWPCRGEITICNLQVRYGPHLPMVLRGLTCTFRGGLKTGIVGRTGCGKSTLIQTLFRIVEPAAGEIRIDGINILTIGLHDLRSRLSIIPQEPTMFEGTVRSNLDPLEEYADDQIWEALDKCQLGDEIRKKELKLDSPVSENGQNWSVGQRQLVCLGRVLLKRSKVLILDEATASVDTATDTLIQETLRQHFSGCTVITIAHRISSVIDSDMVLLLDQGLIEEHDSPARLLEDKSSSFSKLVAEYTASSDSRFKRSSMKTN

SEQ ID NO: 84134 - DNA, 1319 bp, Arabidopsis thaliana
  misc_feature (1)..(1319): Ceres Seq. ID no. 12673253
  misc_feature: MA Experiment ID: 108434 Result: Up-regulated in Transcription
  misc_feature: MA Experiment 108434 PARAMETER Experiment Name: At_Root_Tips_cDNA_P Parameter: Tissue Value: Root Tips
  misc_feature: MA Experiment ID: 108461 Result: Down-regulated in Transcription
  misc_feature: MA Experiment 108461 PARAMETER Experiment Name: At_Germinating_Seeds_cDNA_P Parameter: Age (day) Value: 1 vs. 0
  misc_feature: MA Experiment 108461 PARAMETER Experiment Name: At_Germinating_Seeds_cDNA_P Parameter: Tissue Value: Germinating Seeds
  misc_feature: MA Experiment ID: 108462 Result: Down-regulated in Transcription
  misc_feature: MA Experiment 108462 PARAMETER Experiment Name: At_Germinating_Seeds_cDNA_P Parameter: Age (day) Value: 2 vs. 0
  misc_feature: MA Experiment 108462 PARAMETER Experiment Name: At_Germinating_Seeds_cDNA_P Parameter: Tissue Value: Germinating Seeds
  misc_feature: MA Experiment ID: 108463 Result: Down-regulated in Transcription
  misc_feature: MA Experiment 108463 PARAMETER Experiment Name: At_Germinating_Seeds_cDNA_P Parameter: Age (day) Value: 3 vs. 0
  misc_feature: MA Experiment 108463 PARAMETER Experiment Name: At_Germinating_Seeds_cDNA_P Parameter: Tissue Value: Germinating Seeds
  misc_feature: MA Experiment ID: 108464 Result: Down-regulated in Transcription
  misc_feature: MA Experiment 108464 PARAMETER Experiment Name: At_Germinating_Seeds_cDNA_P Parameter: Age (day) Value: 4 vs. 0
  misc_feature: MA Experiment 108464 PARAMETER Experiment Name: At_Germinating_Seeds_cDNA_P Parameter: Tissue Value: Germinating Seeds
  misc_feature: MA Experiment ID: 108573 Result: Down-regulated in Transcription
  misc_feature: MA Experiment 108573 PARAMETER Experiment Name: At_Drought_cDNA_P Parameter: Timepoint (hr) Value: 6
  misc_feature: MA Experiment 108573 PARAMETER Experiment Name: At_Drought_cDNA_P Parameter: Tissue Value: Aerial
  misc_feature: MA Experiment 108573 PARAMETER Experiment Name: At_Drought_cDNA_P Parameter: Treatment Value: Drought vs. No Drought
  misc_feature: MA Experiment ID: 20000113 Result: Down-regulated in Transcription
  misc_feature: MA Experiment 20000113 PARAMETER Experiment Name: At_42deg_Heat_cDNA_P Parameter: Temperature (deg C) Value: 42 vs. 22
  misc_feature: MA Experiment 20000113 PARAMETER Experiment Name: At_42deg_Heat_cDNA_P Parameter: Timepoint (hr) Value: 8
  misc_feature: MA Experiment 20000113 PARAMETER Experiment Name: At_42deg_Heat_cDNA_P Parameter: Tissue Value: Aerial
  misc_feature: MA Experiment ID: 20000171 Result: Down-regulated in Transcription
  misc_feature: MA Experiment 20000171 PARAMETER Experiment Name: At_42deg_Heat_P Parameter: Age (day) Value: 14
  misc_feature: MA Experiment 20000171 PARAMETER Experiment Name: At_42deg_Heat_P Parameter: Organism Value: A. thaliana
  misc_feature: MA Experiment 20000171 PARAMETER Experiment Name: At_42deg_Heat_P Parameter: Plant Line Value: WS
  misc_feature: MA Experiment 20000171 PARAMETER Experiment Name: At_42deg_Heat_P Parameter: Temperature (deg C) Value: 42 vs. 22
  misc_feature: MA Experiment 20000171 PARAMETER Experiment Name: At_42deg_Heat_P Parameter: Timepoint (hr) Value: 1
  misc_feature: MA Experiment 20000171 PARAMETER Experiment Name: At_42deg_Heat_P Parameter: Tissue Value: Aerial
  misc_feature: MA Experiment ID: 20000173 Result: Down-regulated in Transcription
  misc_feature: MA Experiment 20000173 PARAMETER Experiment Name: At_42deg_Heat_P Parameter: Age (day) Value: 14
  misc_feature: MA Experiment 20000173 PARAMETER Experiment Name: At_42deg_Heat_P Parameter: Organism Value: A. thaliana
  misc_feature: MA Experiment 20000173 PARAMETER Experiment Name: At_42deg_Heat_P Parameter: Plant Line Value: WS
  misc_feature: MA Experiment 20000173 PARAMETER Experiment Name: At_42deg_Heat_P Parameter: Temperature (deg C) Value: 42 vs. 22
  misc_feature: MA Experiment 20000173 PARAMETER Experiment Name: At_42deg_Heat_P Parameter: Timepoint (hr) Value: 6
  misc_feature: MA Experiment 20000173 PARAMETER Experiment Name: At_42deg_Heat_P Parameter: Tissue Value: Aerial
  misc_feature: MA Experiment ID: 20000180 Result: Down-regulated in Transcription
  misc_feature: MA Experiment 20000180 PARAMETER Experiment Name: At_Germinating_Seeds_P Parameter: Age (hr) Value: 24 vs. 0
  misc_feature: MA Experiment 20000180 PARAMETER Experiment Name: At_Germinating_Seeds_P Parameter: Tissue Value: Germinating Seeds
  misc_feature: MA Experiment ID: 20000227 Result: Up-regulated in Transcription
  misc_feature: MA Experiment 20000227 PARAMETER Experiment Name: At_Root-Tips-vs-Tops_P Parameter: Tissue Value: Root Tips vs. Root Tops
  misc_feature: MA Experiment ID: 20000286 Result: Up-regulated in Transcription
  misc_feature: MA Experiment 20000286 PARAMETER Experiment Name: At_Open_Flower_P Parameter: Age (day) Value: 21
  misc_feature: MA Experiment 20000286 PARAMETER Experiment Name: At_Open_Flower_P Parameter: Plant Line Value: WS
  misc_feature: MA Experiment 20000286 PARAMETER Experiment Name: At_Open_Flower_P Parameter: Tissue Value: Half Open vs. Whole Plant
  misc_feature: MA Experiment ID: 20001247 Result: Down-regulated in Transcription
  misc_feature: MA Experiment 20001247 PARAMETER Experiment Name: At_Far-red-induction_P Parameter: Age (day) Value: 7
  misc_feature: MA Experiment 20001247 PARAMETER Experiment Name: At_Far-red-induction_P Parameter: Light Value: Far-red vs. White
  misc_feature: MA Experiment 20001247 PARAMETER Experiment Name: At_Far-red-induction_P Parameter: Organism Value: A. thaliana
  misc_feature: MA Experiment 20001247 PARAMETER Experiment Name: At_Far-red-induction_P Parameter: Plant Line Value: Columbia
  misc_feature: MA Experiment 20001247 PARAMETER Experiment Name: At_Far-red-induction_P Parameter: Timepoint (hr) Value: 1
  misc_feature: MA Experiment 20001247 PARAMETER Experiment Name: At_Far-red-induction_P Parameter: Tissue Value: Whole Plant
  misc_feature: MA Experiment ID: 20001451 Result: Down-regulated in Transcription
  misc_feature: MA Experiment 20001451 PARAMETER Experiment Name: At_Far-red-induction_P Parameter: Age (day) Value: 7
  misc_feature: MA Experiment 20001451 PARAMETER Experiment Name: At_Far-red-induction_P Parameter: Light Value: Far-red vs. White
  misc_feature: MA Experiment 20001451 PARAMETER Experiment Name: At_Far-red-induction_P Parameter: Organism Value: A. thaliana
  misc_feature: MA Experiment 20001451 PARAMETER Experiment Name: At_Far-red-induction_P Parameter: Plant Line Value: Columbia
  misc_feature: MA Experiment 20001451 PARAMETER Experiment Name: At_Far-red-induction_P Parameter: Timepoint (hr) Value: 24
  misc_feature: MA Experiment 20001451 PARAMETER Experiment Name: At_Far-red-induction_P Parameter: Tissue Value: Whole Plant
  misc_feature: MA Experiment ID: 20001557 Result: Up-regulated in Transcription
  misc_feature: MA Experiment 20001557 PARAMETER Experiment Name: At_Drought_Soil_Dry_P Parameter: Age (day) Value: 27
  misc_feature: MA Experiment 20001557 PARAMETER Experiment Name: At_Drought_Soil_Dry_P Parameter: Organism Value: A. thaliana
  misc_feature: MA Experiment 20001557 PARAMETER Experiment Name: At_Drought_Soil_Dry_P Parameter: Plant Line Value: WS
  misc_feature: MA Experiment 20001557 PARAMETER Experiment Name: At_Drought_Soil_Dry_P Parameter: Post Timepoint (hr) Value: 3
  misc_feature: MA Experiment 20001557 PARAMETER Experiment Name: At_Drought_Soil_Dry_P Parameter: Post-Treatment Value: Re-Water vs. No Drought
  misc_feature: MA Experiment 20001557 PARAMETER Experiment Name: At_Drought_Soil_Dry_P Parameter: Timepoint (day) Value: 13
  misc_feature: MA Experiment 20001557 PARAMETER Experiment Name: At_Drought_Soil_Dry_P Parameter: Treatment Value: Drought vs. No Drought
  misc_feature: MA Experiment ID: 20001558 Result: Up-regulated in Transcription
  misc_feature: MA Experiment 20001558 PARAMETER Experiment Name: At_Drought_Soil_Dry_P Parameter: Age (day) Value: 27
  misc_feature: MA Experiment 20001558 PARAMETER Experiment Name: At_Drought_Soil_Dry_P Parameter: Organism Value: A. thaliana
  misc_feature: MA Experiment 20001558 PARAMETER Experiment Name: At_Drought_Soil_Dry_P Parameter: Plant Line Value: WS
  misc_feature: MA Experiment 20001558 PARAMETER Experiment Name: At_Drought_Soil_Dry_P Parameter: Post Timepoint (hr) Value: 6
  misc_feature: MA Experiment 20001558 PARAMETER Experiment Name: At_Drought_Soil_Dry_P Parameter: Post-Treatment Value: Re-Water vs. No Drought
  misc_feature: MA Experiment 20001558 PARAMETER Experiment Name: At_Drought_Soil_Dry_P Parameter: Timepoint (day) Value: 13
  misc_feature: MA Experiment 20001558 PARAMETER Experiment Name: At_Drought_Soil_Dry_P Parameter: Treatment Value: Drought vs. No Drought
aacactccgatccaaaaaaaagaagagaaaaacctttgcatacagctaaaaacgatgtcgtctctctctcgctttctccttcgtggcaacttcagcttcagcacccacacgaatcgccgcttcttctccgccgttaccgctgctgcagccacaccctcgccacccaaaccgtccctcatcaccctcgtaaatgacgaacgcgaccccaaattcatcacggagaagttcaagaaagcctgccaagcagagtggttccggaagaatatagctgtctatgagagaaccgttcgccgtctcgccgcagccaagaagtttgagtgggtcgaggagatcctggaggagcagaacaagtatccaaacatgtcaaaggaaggattcgtggcgaggattatcaatctctatggacgagtcggtatgtttgagaatgcacagaaagtgttcgacgaaatgcctgagagaaactgcaagagaacagcgttgtctttcaacgcattactgaatgcctgtgtgaactccaagaagtttgatttggttgaaggtatcttcaaggagttgccaggtaagctctcgattgaaccagatgttgcatcttacaatactttgatcaagggattgtgtggaaagggttccttcactgaagctgttgcgttgattgatgagattgagaacaagggtttgaaacctgatcatatcaccttcaagaaggagaacagatatgggctagaatggtagagaagaatgttaagcgagacatccgtagttacaatgctcggttgttaggactagccatggagaataaatcagaagagatggttagtctctttgacaaacttaagggtaatgagctcaaacctgatgttttcacattcactgccatgattaaaggatttgtcagtgaaggaaaattagatgaagccataacgtggtacaaggaaatcgagaagaatggttgtcgcccgttgaaatttgtctttaactcattgcttcctgcaatatgtaaggcgggcgatttagagtctgcttatgagctctgcaaggaaatatttgctaagcgtctgctagtcgatgaggctgtcctgcaggaggtagttgatgcattggtgaaagggtccaagcaagacgaagctgaagagattgtcgagctagcaaagacgaatgactatttgcagtgcaagcttcgtctctttcccaaagagtagttaattggcaaggcttattgactagtttttaatttagtctgtgtttccctctttttaatgtcttgttgcaaactgcgagtgcggtgatttaataattgaactatctctatctgtagtgtg

SEQ ID NO: 84135 - protein, 243 aa, Arabidopsis thaliana
  peptide (1)..(243): Ceres Seq. ID no. 12673254
  misc_feature (19)..(233): Homolog of NCBI NO: 18399887 NR Description: Expressed protein; protein id: At3g13160.1, by cDNA: 93242. [Arabidopsis thaliana]
  misc_feature (19)..(233): Homolog of NCBI NO: 21617993 NR Description: unknown [Arabidopsis thaliana]
  misc_feature (19)..(233): Homolog of NCBI NO: 15222796 NR Description: unknown protein; protein id: At1g55890.1, by cDNA: gi_18650653 [Arabidopsis thaliana]
  misc_feature (64)..(233): Homolog of NCBI NO: 15231160 NR Description: hypothetical protein; protein id: At3g13150.1 thaliana] >gi|10172602|dbj|BAB01406.1| gene_id:MJG19.10~similar
  misc_feature (66)..(233): Homolog of NCBI NO: 34910148 NR Description: B1070A12.17 [Oryza sativa (japonica
  misc_feature (39)..(233): Homolog of NCBI NO: 15234493 NR Description: salt-inducible like protein; protein id: supported by cDNA: gi_17381285 [Arabidopsis thaliana]
  misc_feature (16)..(233): Homolog of NCBI NO: 25455786 NR Description: membrane-associated salt-inducible protein like
  misc_feature (19)..(233): Homolog of NCBI NO: 18407365 NR Description: expressed protein; protein id: At1g61870.1, by cDNA: 16387., supported by cDNA: gi_16226402, supported by
  misc_feature (12)..(233): Homolog of NCBI NO: 21553755 NR Description: putative membrane-associated salt-inducible
  misc_feature (56)..(233): Homolog of NCBI NO: 15220068 NR Description: hypothetical protein; protein id: At1g80150.1
NTPIQKKEEKNLCIQLKTMSSLSRFLLRGNFSFSTHTNRRFFSAVTAAAATPSPPKPSLITLVNDERDPKFITEKFKKACQAEWFRKNIAVYERTVRRLAAAKKFEWVEEILEEQNKYPNMSKEGFVARIINLYGRVGMFENAQKVFDEMPERNCKRTALSFNALLNACVNSKKFDLVEGIFKELPGKLSIEPDVASYNTLIKGLCGKGSFTEAVALIDEIENKGLKPDHITFKKENRYGLEW

SEQ ID NO: 84136 - protein, 225 aa, Arabidopsis thaliana
  peptide (1)..(225): Ceres Seq. ID no. 12673255
  misc_feature (1)..(215): Homolog of NCBI NO: 18399887 NR Description: Expressed protein; protein id: At3g13160.1, by cDNA: 93242. [Arabidopsis thaliana]
  misc_feature (1)..(215): Homolog of NCBI NO: 21617993 NR Description: unknown [Arabidopsis thaliana]
  misc_feature (1)..(215): Homolog of NCBI NO: 15222796 NR Description: unknown protein; protein id: At1g55890.1, by cDNA: gi_18650653 [Arabidopsis thaliana]
  misc_feature (46)..(215): Homolog of NCBI NO: 15231160 NR Description: hypothetical protein; protein id: At3g13150.1 thaliana] >gi|10172602|dbj|BAB01406.1| gene_id:MJG19.10~similar
  misc_feature (48)..(215): Homolog of NCBI NO: 34910148 NR Description: B1070A12.17 [Oryza sativa (japonica
  misc_feature (21)..(215): Homolog of NCBI NO: 15234493 NR Description: salt-inducible like protein; protein id: supported by cDNA: gi_17381285 [Arabidopsis thaliana]
  misc_feature (1)..(215): Homolog of NCBI NO: 25455786 NR Description: membrane-associated salt-inducible protein like
  misc_feature (1)..(215): Homolog of NCBI NO: 18407365 NR Description: expressed protein; protein id: At1g61870.1, by cDNA: 16387., supported by cDNA: gi_16226402, supported by
  misc_feature (1)..(215): Homolog of NCBI NO: 21553755 NR Description: putative membrane-associated salt-inducible
  misc_feature (38)..(215): Homolog of NCBI NO: 15220068 NR Description: hypothetical protein; protein id: At1g80150.1
MSSLSRFLLRGNFSFSTHTNRRFFSAVTAAAATPSPPKPSLITLVNDERDPKFITEKFKKACQAEWFRKNIAVYERTVRRLAAAKKFEWVEEILEEQNKYPNMSKEGFVARIINLYGRVGMFENAQKVFDEMPERNCKRTALSFNALLNACVNSKKFDLVEGIFKELPGKLSIEPDVASYNTLIKGLCGKGSFTEAVALIDEIENKGLKPDHITFKKENRYGLEW

SEQ ID NO: 84137 - protein, 157 aa, Arabidopsis thaliana
  peptide (1)..(157): Ceres Seq. ID no. 12673256
  misc_feature (46)..(80): Pfam Name: PPR repeat Pfam Description: PPR repeat
  misc_feature (1)..(157): Homolog of NCBI NO: 18399887 NR Description: Expressed protein; protein id: At3g13160.1, by cDNA: 93242. [Arabidopsis thaliana]
  misc_feature (1)..(157): Homolog of NCBI NO: 21617993 NR Description: unknown [Arabidopsis thaliana]
  misc_feature (1)..(157): Homolog of NCBI NO: 15222796 NR Description: unknown protein; protein id: At1g55890.1, by cDNA: gi_18650653 [Arabidopsis thaliana]
  misc_feature (4)..(137): Homolog of NCBI NO: 18399887 NR Description: Expressed protein; protein id: At3g13160.1, by cDNA: 93242. [Arabidopsis thaliana]
  misc_feature (4)..(137): Homolog of NCBI NO: 21617993 NR Description: unknown [Arabidopsis thaliana]
  misc_feature (1)..(147): Homolog of NCBI NO: 15222796 NR Description: unknown protein; protein id: At1g55890.1, by cDNA: gi_18650653 [Arabidopsis thaliana]
  misc_feature (1)..(148): Homolog of NCBI NO: 15231160 NR Description: hypothetical protein; protein id: At3g13150.1 thaliana] >gi|10172602|dbj|BAB01406.1| gene_id:MJG19.10~similar
  misc_feature (2)..(141): Homolog of NCBI NO: 15231160 NR Description: hypothetical protein; protein id: At3g13150.1 thaliana] >gi|10172602|dbj|BAB01406.1| gene_id:MJG19.10~similar
  misc_feature (1)..(146): Homolog of NCBI NO: 34910148 NR Description: B1070A12.17 [Oryza sativa (japonica
  misc_feature (1)..(142): Homolog of NCBI NO: 15234493 NR Description: salt-inducible like protein; protein id: supported by cDNA: gi_17381285 [Arabidopsis thaliana]
MVEKNVKRDIRSYNARLLGLAMENKSEEMVSLFDKLKGNELKPDVFTFTAMIKGFVSEGKLDEAITWYKEIEKNGCRPLKFVFNSLLPAICKAGDLESAYELCKEIFAKRLLVDEAVLQEVVDALVKGSKQDEAEEIVELAKTNDYLQCKLRLFPKE

SEQ ID NO: 84138 - DNA, 1309 bp, Arabidopsis thaliana
  misc_feature (1)..(1309): Ceres Seq. ID no. 12673281
  misc_feature: MA Experiment ID: 108434 Result: Down-regulated in Transcription
  misc_feature: MA Experiment 108434 PARAMETER Experiment Name: At_Root_Tips_cDNA_P Parameter: Tissue Value: Root Tips
  misc_feature: MA Experiment ID: 108435 Result: Down-regulated in Transcription
  misc_feature: MA Experiment 108435 PARAMETER Experiment Name: At_stm_Mutants_cDNA_P Parameter: Plant Line Value: wt Landsburg vs stm
  misc_feature: MA Experiment 108435 PARAMETER Experiment Name: At_stm_Mutants_cDNA_P Parameter: Tissue Value: Shoot Apical Meristem Region
  misc_feature: MA Experiment ID: 108462 Result: Up-regulated in Transcription
  misc_feature: MA Experiment 108462 PARAMETER Experiment Name: At_Germinating_Seeds_cDNA_P Parameter: Age (day) Value: 2 vs. 0
  misc_feature: MA Experiment 108462 PARAMETER Experiment Name: At_Germinating_Seeds_cDNA_P Parameter: Tissue Value: Germinating Seeds
  misc_feature: MA Experiment ID: 108463 Result: Up-regulated in Transcription
  misc_feature: MA Experiment 108463 PARAMETER Experiment Name: At_Germinating_Seeds_cDNA_P Parameter: Age (day) Value: 3 vs. 0
  misc_feature: MA Experiment 108463 PARAMETER Experiment Name: At_Germinating_Seeds_cDNA_P Parameter: Tissue Value: Germinating Seeds
  misc_feature: MA Experiment ID: 108464 Result: Up-regulated in Transcription
  misc_feature: MA Experiment 108464 PARAMETER Experiment Name: At_Germinating_Seeds_cDNA_P Parameter: Age (day) Value: 4 vs. 0
  misc_feature: MA Experiment 108464 PARAMETER Experiment Name: At_Germinating_Seeds_cDNA_P Parameter: Tissue Value: Germinating Seeds
  misc_feature: MA Experiment ID: 108572 Result: Up-regulated in Transcription
  misc_feature: MA Experiment 108572 PARAMETER Experiment Name: At_Drought_cDNA_P Parameter: Timepoint (hr) Value: 1
  misc_feature: MA Experiment 108572 PARAMETER Experiment Name: At_Drought_cDNA_P Parameter: Tissue Value: Aerial
  misc_feature: MA Experiment 108572 PARAMETER Experiment Name: At_Drought_cDNA_P Parameter: Treatment Value: Drought vs. No Drought
  misc_feature: MA Experiment ID: 108573 Result: Up-regulated in Transcription
  misc_feature: MA Experiment 108573 PARAMETER Experiment Name: At_Drought_cDNA_P Parameter: Timepoint (hr) Value: 6
  misc_feature: MA Experiment 108573 PARAMETER Experiment Name: At_Drought_cDNA_P Parameter: Tissue Value: Aerial
  misc_feature: MA Experiment 108573 PARAMETER Experiment Name: At_Drought_cDNA_P Parameter: Treatment Value: Drought vs. No Drought
  misc_feature: MA Experiment ID: 108577 Result: Down-regulated in Transcription
  misc_feature: MA Experiment 108577 PARAMETER Experiment Name: At_42deg_Heat_cDNA_P Parameter: Temperature (deg C) Value: 42 vs. 22
  misc_feature: MA Experiment 108577 PARAMETER Experiment Name: At_42deg_Heat_cDNA_P Parameter: Timepoint (hr) Value: 6
  misc_feature: MA Experiment 108577 PARAMETER Experiment Name: At_42deg_Heat_cDNA_P Parameter: Tissue Value: Aerial
  misc_feature: MA Experiment ID: 108579 Result: Down-regulated in Transcription
  misc_feature: MA Experiment 108579 PARAMETER Experiment Name: At_4deg_Cold_cDNA_P Parameter: Temperature (deg C) Value: 4 vs. 22
  misc_feature: MA Experiment 108579 PARAMETER Experiment Name: At_4deg_Cold_cDNA_P Parameter: Timepoint (hr) Value: 6
  misc_feature: MA Experiment 108579 PARAMETER Experiment Name: At_4deg_Cold_cDNA_P Parameter: Tissue Value: Aerial
  misc_feature: MA Experiment ID: 108595 Result: Down-regulated in Transcription
  misc_feature: MA Experiment 108595 PARAMETER Experiment Name: At_Ler-pi_Ovule_cDNA_P Parameter: Plant Line Value: null
  misc_feature: MA Experiment ID: 20000069 Result: Up-regulated in Transcription
  misc_feature: MA Experiment 20000069 PARAMETER Experiment Name: At_100uM_ABA_Mutants_cDNA_P Parameter: Plant Line Value: CS23
  misc_feature: MA Experiment 20000069 PARAMETER Experiment Name: At_100uM_ABA_Mutants_cDNA_P Parameter: Timepoint (hr) Value: 6
  misc_feature: MA Experiment 20000069 PARAMETER Experiment Name: At_100uM_ABA_Mutants_cDNA_P Parameter: Tissue Value: Aerial
  misc_feature: MA Experiment 20000069 PARAMETER Experiment Name: At_100uM_ABA_Mutants_cDNA_P Parameter: Treatment Value: 100uM ABA vs. No Treatment
  misc_feature: MA Experiment ID: 20000070 Result: Up-regulated in Transcription
  misc_feature: MA Experiment 20000070 PARAMETER Experiment Name: At_100uM_ABA_Mutants_cDNA_P Parameter: Plant Line Value: CS24
  misc_feature: MA Experiment 20000070 PARAMETER Experiment Name: At_100uM_ABA_Mutants_cDNA_P Parameter: Timepoint (hr) Value: 6
  misc_feature: MA Experiment 20000070 PARAMETER Experiment Name: At_100uM_ABA_Mutants_cDNA_P Parameter: Tissue Value: Aerial
  misc_feature: MA Experiment 20000070 PARAMETER Experiment Name: At_100uM_ABA_Mutants_cDNA_P Parameter: Treatment Value: 100uM ABA vs. No Treatment
  misc_feature: MA Experiment ID: 20000071 Result: Up-regulated in Transcription
  misc_feature: MA Experiment 20000071 PARAMETER Experiment Name: At_100uM_ABA_Mutants_cDNA_P Parameter: Plant Line Value: CS8104
  misc_feature: MA Experiment 20000071 PARAMETER Experiment Name: At_100uM_ABA_Mutants_cDNA_P Parameter: Timepoint (hr) Value: 6
  misc_feature: MA Experiment 20000071 PARAMETER Experiment Name: At_100uM_ABA_Mutants_cDNA_P Parameter: Tissue Value: Aerial
  misc_feature: MA Experiment 20000071 PARAMETER Experiment Name: At_100uM_ABA_Mutants_cDNA_P Parameter: Treatment Value: 100uM ABA vs. No Treatment
  misc_feature: MA Experiment ID: 20000072 Result: Up-regulated in Transcription
  misc_feature: MA Experiment 20000072 PARAMETER Experiment Name: At_100uM_ABA_Mutants_cDNA_P Parameter: Plant Line Value: CS8105
  misc_feature: MA Experiment 20000072 PARAMETER Experiment Name: At_100uM_ABA_Mutants_cDNA_P Parameter: Timepoint (hr) Value: 6
  misc_feature: MA Experiment 20000072 PARAMETER Experiment Name: At_100uM_ABA_Mutants_cDNA_P Parameter: Tissue Value: Aerial
  misc_feature: MA Experiment 20000072 PARAMETER Experiment Name: At_100uM_ABA_Mutants_cDNA_P Parameter: Treatment Value: 100uM ABA vs. No Treatment
  misc_feature: MA Experiment ID: 20000087 Result: Up-regulated in Transcription
  misc_feature: MA Experiment 20000087 PARAMETER Experiment Name: At_100uM_ABA_Mutants_cDNA_P Parameter: Plant Line Value: WS
  misc_feature: MA Experiment 20000087 PARAMETER Experiment Name: At_100uM_ABA_Mutants_cDNA_P Parameter: Timepoint (hr) Value: 6
  misc_feature: MA Experiment 20000087 PARAMETER Experiment Name: At_100uM_ABA_Mutants_cDNA_P Parameter: Tissue Value: Aerial
  misc_feature: MA Experiment 20000087 PARAMETER Experiment Name: At_100uM_ABA_Mutants_cDNA_P Parameter: Treatment Value: 100uM ABA vs. No Treatment
  misc_feature: MA Experiment ID: 20000088 Result: Up-regulated in Transcription
  misc_feature: MA Experiment 20000088 PARAMETER Experiment Name: At_100uM_ABA_Mutants_cDNA_P Parameter: Plant Line Value: Landsberg
  misc_feature: MA Experiment 20000088 PARAMETER Experiment Name: At_100uM_ABA_Mutants_cDNA_P Parameter: Timepoint (hr) Value: 6
  misc_feature: MA Experiment 20000088 PARAMETER Experiment Name: At_100uM_ABA_Mutants_cDNA_P Parameter: Tissue Value: Aerial
  misc_feature: MA Experiment 20000088 PARAMETER Experiment Name: At_100uM_ABA_Mutants_cDNA_P Parameter: Treatment Value: 100uM ABA vs. No Treatment
  misc_feature: MA Experiment ID: 20000089 Result: Up-regulated in Transcription
  misc_feature: MA Experiment ID: 20000090 Result: Up-regulated in Transcription
  misc_feature: MA Experiment ID: 20000117 Result: Up-regulated in Transcription
  misc_feature: MA Experiment 20000117 PARAMETER Experiment Name: At_100uM_ABA_Mutants_cDNA_P Parameter: Plant Line Value: Columbia
  misc_feature: MA Experiment 20000117 PARAMETER Experiment Name: At_100uM_ABA_Mutants_cDNA_P Parameter: Timepoint (hr) Value: 6
  misc_feature: MA Experiment 20000117 PARAMETER Experiment Name: At_100uM_ABA_Mutants_cDNA_P Parameter: Tissue Value: Aerial
  misc_feature: MA Experiment 20000117 PARAMETER Experiment Name: At_100uM_ABA_Mutants_cDNA_P Parameter: Treatment Value: 100uM ABA vs. No Treatment
  misc_feature: MA Experiment ID: 20000227 Result: Down-regulated in Transcription
  misc_feature: MA Experiment 20000227 PARAMETER Experiment Name: At_Root-Tips-vs-Tops_P Parameter: Tissue Value: Root Tips vs. Root Tops
  misc_feature: MA Experiment ID: 20000234 Result: Down-regulated in Transcription
  misc_feature: MA Experiment 20000234 PARAMETER Experiment Name: At_Siliques_P Parameter: Age (day) Value: 21
  misc_feature: MA Experiment 20000234 PARAMETER Experiment Name: At_Siliques_P Parameter: Organism Value: A. thaliana
  misc_feature: MA Experiment 20000234 PARAMETER Experiment Name: At_Siliques_P Parameter: Plant Line Value: WS
  misc_feature: MA Experiment 20000234 PARAMETER Experiment Name: At_Siliques_P Parameter: Tissue Value: Less Than 5mm Siliques vs. Whole Plant
  misc_feature: MA Experiment ID: 20000235 Result: Down-regulated in Transcription
  misc_feature: MA Experiment 20000235 PARAMETER Experiment Name: At_Siliques_P Parameter: Age (day) Value: 21
  misc_feature: MA Experiment 20000235 PARAMETER Experiment Name: At_Siliques_P Parameter: Organism Value: A. thaliana
  misc_feature: MA Experiment 20000235 PARAMETER Experiment Name: At_Siliques_P Parameter: Plant Line Value: WS
  misc_feature: MA Experiment 20000235 PARAMETER Experiment Name: At_Siliques_P Parameter: Tissue Value: 5-10mm Siliques vs. Whole Plant
  misc_feature: MA Experiment ID: 20000264 Result: Down-regulated in Transcription
  misc_feature: MA Experiment 20000264 PARAMETER Experiment Name: At_Open_Flower_P Parameter: Age (day) Value: 21
  misc_feature: MA Experiment 20000264 PARAMETER Experiment Name: At_Open_Flower_P Parameter: Plant Line Value: WS
  misc_feature: MA Experiment 20000264 PARAMETER Experiment Name: At_Open_Flower_P Parameter: Tissue Value: Open Flower vs. Whole Plant
  misc_feature: MA Experiment ID: 20000265 Result: Down-regulated in Transcription
  misc_feature: MA Experiment 20000265 PARAMETER Experiment Name: At_Open_Flower_P Parameter: Age (day) Value: 21
  misc_feature: MA Experiment 20000265 PARAMETER Experiment Name: At_Open_Flower_P Parameter: Plant Line Value: WS
  misc_feature: MA Experiment 20000265 PARAMETER Experiment Name: At_Open_Flower_P Parameter: Tissue Value: Closed Flower vs. Whole Plant
  misc_feature: MA Experiment ID: 20000286 Result: Down-regulated in Transcription
  misc_feature: MA Experiment 20000286 PARAMETER Experiment Name: At_Open_Flower_P Parameter: Age (day) Value: 21
  misc_feature: MA Experiment 20000286 PARAMETER Experiment Name: At_Open_Flower_P Parameter: Plant Line Value: WS
  misc_feature: MA Experiment 20000286 PARAMETER Experiment Name: At_Open_Flower_P Parameter: Tissue Value: Half Open vs. Whole Plant
  misc_feature: MA Experiment ID: 20000437 Result: Up-regulated in Transcription
  misc_feature: MA Experiment 20000437 PARAMETER Experiment Name: At_Drought_P Parameter: Age (day) Value: 8
  misc_feature: MA Experiment 20000437 PARAMETER Experiment Name: At_Drought_P Parameter: Organism Value: A. thaliana
  misc_feature: MA Experiment 20000437 PARAMETER Experiment Name: At_Drought_P Parameter: Plant Line Value: WS
  misc_feature: MA Experiment 20000437 PARAMETER Experiment Name: At_Drought_P Parameter: Timepoint (hr) Value: 24
  misc_feature: MA Experiment 20000437 PARAMETER Experiment Name: At_Drought_P Parameter: Tissue Value: Whole Plant
  misc_feature: MA Experiment 20000437 PARAMETER Experiment Name: At_Drought_P Parameter: Treatment Value: Drought vs. No Drought
  misc_feature: MA Experiment ID: 20001248 Result: Up-regulated in Transcription
  misc_feature: MA Experiment 20001248 PARAMETER Experiment Name: At_Far-red-induction_P Parameter: Age (day) Value: 7
  misc_feature: MA Experiment 20001248 PARAMETER Experiment Name: At_Far-red-induction_P Parameter: Light Value: Far-red vs. White
  misc_feature: MA Experiment 20001248 PARAMETER Experiment Name: At_Far-red-induction_P Parameter: Organism Value: A. thaliana
  misc_feature: MA Experiment 20001248 PARAMETER Experiment Name: At_Far-red-induction_P Parameter: Plant Line Value: Columbia
  misc_feature: MA Experiment 20001248 PARAMETER Experiment Name: At_Far-red-induction_P Parameter: Timepoint (hr) Value: 4
  misc_feature: MA Experiment 20001248 PARAMETER Experiment Name: At_Far-red-induction_P Parameter: Tissue Value: Whole Plant
  misc_feature: MA Experiment ID: 20001450 Result: Up-regulated in Transcription
  misc_feature: MA Experiment 20001450 PARAMETER Experiment Name: At_Far-red-induction_P Parameter: Age (day) Value: 7
  misc_feature: MA Experiment 20001450 PARAMETER Experiment Name: At_Far-red-induction_P Parameter: Light Value: Far-red vs. White
  misc_feature: MA Experiment 20001450 PARAMETER Experiment Name: At_Far-red-induction_P Parameter: Organism Value: A. thaliana
  misc_feature: MA Experiment 20001450 PARAMETER Experiment Name: At_Far-red-induction_P Parameter: Plant Line Value: Columbia
  misc_feature: MA Experiment 20001450 PARAMETER Experiment Name: At_Far-red-induction_P Parameter: Timepoint (hr) Value: 8
  misc_feature: MA Experiment 20001450 PARAMETER Experiment Name: At_Far-red-induction_P Parameter: Tissue Value: Whole Plant
  misc_feature: MA Experiment ID: 20001451 Result: Up-regulated in Transcription
  misc_feature: MA Experiment 20001451 PARAMETER Experiment Name: At_Far-red-induction_P Parameter: Age (day) Value: 7
  misc_feature: MA Experiment 20001451 PARAMETER Experiment Name: At_Far-red-induction_P Parameter: Light Value: Far-red vs. White
  misc_feature: MA Experiment 20001451 PARAMETER Experiment Name: At_Far-red-induction_P Parameter: Organism Value: A. thaliana
  misc_feature: MA Experiment 20001451 PARAMETER Experiment Name: At_Far-red-induction_P Parameter: Plant Line Value: Columbia
  misc_feature: MA Experiment 20001451 PARAMETER Experiment Name: At_Far-red-induction_P Parameter: Timepoint (hr) Value: 24
  misc_feature: MA Experiment 20001451 PARAMETER Experiment Name: At_Far-red-induction_P Parameter: Tissue Value: Whole Plant
  misc_feature: MA Experiment ID: 20001557 Result: Down-regulated in Transcription
  misc_feature: MA Experiment 20001557 PARAMETER Experiment Name: At_Drought_Soil_Dry_P Parameter: Age (day) Value: 27
  misc_feature: MA Experiment 20001557 PARAMETER Experiment Name: At_Drought_Soil_Dry_P Parameter: Organism Value: A. thaliana
  misc_feature: MA Experiment 20001557 PARAMETER Experiment Name: At_Drought_Soil_Dry_P Parameter: Plant Line Value: WS
  misc_feature: MA Experiment 20001557 PARAMETER Experiment Name: At_Drought_Soil_Dry_P Parameter: Post Timepoint (hr) Value: 3
  misc_feature: MA Experiment 20001557 PARAMETER Experiment Name: At_Drought_Soil_Dry_P Parameter: Post-Treatment Value: Re-Water vs. No Drought
  misc_feature: MA Experiment 20001557 PARAMETER Experiment Name: At_Drought_Soil_Dry_P Parameter: Timepoint (day) Value: 13
  misc_feature: MA Experiment 20001557 PARAMETER Experiment Name: At_Drought_Soil_Dry_P Parameter: Treatment Value: Drought vs. No Drought
  misc_feature: MA Experiment ID: 20001558 Result: Down-regulated in Transcription
  misc_feature: MA Experiment 20001558 PARAMETER Experiment Name: At_Drought_Soil_Dry_P Parameter: Age (day) Value: 27
  misc_feature: MA Experiment 20001558 PARAMETER Experiment Name: At_Drought_Soil_Dry_P Parameter: Organism Value: A. thaliana
  misc_feature: MA Experiment 20001558 PARAMETER Experiment Name: At_Drought_Soil_Dry_P Parameter: Plant Line Value: WS
  misc_feature: MA Experiment 20001558 PARAMETER Experiment Name: At_Drought_Soil_Dry_P Parameter: Post Timepoint (hr) Value: 6
  misc_feature: MA Experiment 20001558 PARAMETER Experiment Name: At_Drought_Soil_Dry_P Parameter: Post-Treatment Value: Re-Water vs. No Drought
  misc_feature: MA Experiment 20001558 PARAMETER Experiment Name: At_Drought_Soil_Dry_P Parameter: Timepoint (day) Value: 13
  misc_feature: MA Experiment 20001558 PARAMETER Experiment Name: At_Drought_Soil_Dry_P Parameter: Treatment Value: Drought vs. No Drought
  misc_feature: MA Experiment ID: 20001560 Result: Down-regulated in Transcription
  misc_feature: MA Experiment 20001560 PARAMETER Experiment Name: At_Drought_Soil_Dry_P Parameter: Age (day) Value: 28
  misc_feature: MA Experiment 20001560 PARAMETER Experiment Name: At_Drought_Soil_Dry_P Parameter: Organism Value: A. thaliana
  misc_feature: MA Experiment 20001560 PARAMETER Experiment Name: At_Drought_Soil_Dry_P Parameter: Plant Line Value: WS
  misc_feature: MA Experiment 20001560 PARAMETER Experiment Name: At_Drought_Soil_Dry_P Parameter: Post Timepoint (hr) Value: None
  misc_feature: MA Experiment 20001560 PARAMETER Experiment Name: At_Drought_Soil_Dry_P Parameter: Post-Treatment Value: None
  misc_feature: MA Experiment 20001560 PARAMETER Experiment Name: At_Drought_Soil_Dry_P Parameter: Timepoint (day) Value: 14
  misc_feature: MA Experiment 20001560 PARAMETER Experiment Name: At_Drought_Soil_Dry_P Parameter: Treatment Value: Drought vs. No Drought
aaggtaaaagcaacataagcgtgaagtaccagctaccaaacgaagatcttgacgcgttgatttccgtatcaacggacgaagatgtagagaacatgatggacgaatacgaccgcgtcgcacagaatcaaaacccacgcgcctctcgtcttcgtctttttctcttcaccaaaaacgtcgccggagaagaagataacgatagtcgagctagcagtatcagctctctcctcgatagctctgttaatcgggagcaatggttcctcgacgctcttaacctcggttcttccgccgccgcaaccgcggtatctaacggtgggtccggtagagtctttgagcgagttagatctgaagtctcgtcgattgtttctgaagttcctgattatctctttggattggataatttcgatgaaactgctccgccgcatgagcttcgtgatcgtgatccgagagctaagatccaacgagaagtctcgacgctttcggatcctggttcgcctcgtcgcgatgttccttcgccgtatggttcgacgtcttcggctcctgtgatgcgaatatctacaccggaacttccaccaccagtttttattaaaccggaaagtccagaaccggtttcgactccgaaatccaatcctcaaccggaacaagtaatgcaacagagtaatctcccggttaactcgcaatggcaatatgcccctggcccaggccaacaggttcattaccagggtcataccattcaccaatcaccggtttattacgttcctggttcggttccgggtaatcatatggtccagcaaggaaatcatatggttcaaccgggtaatcatatggtacaaccggttcaaatgccgggtcagtatcttcaacaataccatcatgtaccaatgggataccaccaacctcagactcatcagatggctggtccgggtcaagtatatggtggaacggttaggccggttatgatggcagttgatggaatgaaccggacgggttattatggaatgaaaacacccggtccggttcaaatgtatcagcatcacactggtatggttgttcctggtgtagaagaacaacaacaatacagaaccgaaacggattcggatacgggtcgggcttcttagctgtttgaagaagaaatatgaaaaattatcacatccggggttttcgtcttttcattggagtcgttcttattcgttactgtgtgaactgtgtattattttttgttttacttttgtaaaatttatttttgtgtgtaataattttgtattacaaaatataatgaacagtaaaacccaataataataacattataatc

SEQ ID NO: 84139 - protein, 370 aa, Arabidopsis thaliana
  peptide (1)..(370): Ceres Seq. ID no. 12673282
  misc_feature (1)..(56): Pfam Name: PB1 domain Pfam Description: PB1 domain
  misc_feature (1)..(370): Homolog of NCBI NO: 18412822 NR Description: putative protein; protein id: At4g05150.1, by cDNA: gi_15809939 [Arabidopsis thaliana]
  misc_feature (1)..(370): Homolog of NCBI NO: 25407315 NR Description: hypothetical protein AT4g05150 [imported] - thaliana >gi|7267274|emb|CAB81057.1| putative protein
  misc_feature (1)..(203): Homolog of NCBI NO: 34895646 NR Description: P0480E02.2 [Oryza sativa (japonica
  misc_feature (1)..(204): Homolog of NCBI NO: 21553908 NR Description: unknown [Arabidopsis thaliana]
  misc_feature (1)..(204): Homolog of NCBI NO: 18379168 NR Description: expressed protein; protein id: At2g01190.1, by cDNA: 17996., supported by cDNA: gi_17979118 [Arabidopsis >gi|17979119|gb|AAL49817.1| unknown protein [Arabidopsis
  misc_feature (1)..(274): Homolog of NCBI NO: 25410886 NR Description: hypothetical protein At2g01190 [imported] -
  misc_feature (1)..(190): Homolog of NCBI NO: 15229599 NR Description: unknown protein; protein id: At3g18230.1 thaliana] >gi|9279657|dbj|BAB01173.1| contains similarity to
  misc_feature (1)..(328): Homolog of NCBI NO: 24414006 NR Description: contains EST D23238(C2469)~kinase-like protein
  misc_feature (5)..(316): Homolog of NCBI NO: 15232679 NR Description: protein kinase - like protein; protein id:
  misc_feature (7)..(277): Homolog of NCBI NO: 15219183 NR Description: putative Ser/Thr protein kinase; protein id:
GKSNISVKYQLPNEDLDALISVSTDEDVENMMDEYDRVAQNQNPRASRLRLFLFTKNVAGEEDNDSRASSISSLLDSSVNREQWFLDALNLGSSAAATAVSNGGSGRVFERVRSEVSSIVSEVPDYLFGLDNFDETAPPHELRDRDPRAKIQREVSTLSDPGSPRRDVPSPYGSTSSAPVMRISTPELPPPVFIKPESPEPVSTPKSNPQPEQVMQQSNLPVNSQWQYAPGPGQQVHYQGHTIHQSPVYYVPGSVPGNHMVQQGNHMVQPGNHMVQPVQMPGQYLQQYHHVPMGYHQPQTHQMAGPGQVYGGTVRPVMMAVDGMNRTGYYGMKTPGPVQMYQHHTGMVVPGVEEQQQYRTETDSDTGRAS

SEQ ID NO: 84140 - protein, 340 aa, Arabidopsis thaliana
  peptide (1)..(340): Ceres Seq. ID no. 12673283
  misc_feature (1)..(340): Homolog of NCBI NO: 18412822 NR Description: putative protein; protein id: At4g05150.1, by cDNA: gi_15809939 [Arabidopsis thaliana]
  misc_feature (1)..(340): Homolog of NCBI NO: 25407315 NR Description: hypothetical protein AT4g05150 [imported] - thaliana >gi|7267274|emb|CAB81057.1| putative protein
  misc_feature (1)..(173): Homolog of NCBI NO: 34895646 NR Description: P0480E02.2 [Oryza sativa (japonica
  misc_feature (1)..(174): Homolog of NCBI NO: 21553908 NR Description: unknown [Arabidopsis thaliana]
  misc_feature (1)..(174): Homolog of NCBI NO: 18379168 NR Description: expressed protein; protein id: At2g01190.1, by cDNA: 17996., supported by cDNA: gi_17979118 [Arabidopsis >gi|17979119|gb|AAL49817.1| unknown protein [Arabidopsis
  misc_feature (1)..(244): Homolog of NCBI NO: 25410886 NR Description: hypothetical protein At2g01190 [imported] -
  misc_feature (1)..(160): Homolog of NCBI NO: 15229599 NR Description: unknown protein; protein id: At3g18230.1 thaliana] >gi|9279657|dbj|BAB01173.1| contains similarity to
  misc_feature (1)..(298): Homolog of NCBI NO: 24414006 NR Description: contains EST D23238(C2469)~kinase-like protein
  misc_feature (1)..(286): Homolog of NCBI NO: 15232679 NR Description: protein kinase - like protein; protein id:
  misc_feature (1)..(247): Homolog of NCBI NO: 15219183 NR Description: putative Ser/Thr protein kinase; protein id:
MMDEYDRVAQNQNPRASRLRLFLFTKNVAGEEDNDSRASSISSLLDSSVNREQWFLDALNLGSSAAATAVSNGGSGRVFERVRSEVSSIVSEVPDYLFGLDNFDETAPPHELRDRDPRAKIQREVSTLSDPGSPRRDVPSPYGSTSSAPVMRISTPELPPPVFIKPESPEPVSTPKSNPQPEQVMQQSNLPVNSQWQYAPGPGQQVHYQGHTIHQSPVYYVPGSVPGNHMVQQGNHMVQPGNHMVQPVQMPGQYLQQYHHVPMGYHQPQTHQMAGPGQVYGGTVRPVMMAVDGMNRTGYYGMKTPGPVQMYQHHTGMVVPGVEEQQQYRTETDSDTGRAS

SEQ ID NO: 84141 - protein, 339 aa, Arabidopsis thaliana
  peptide (1)..(339): Ceres Seq. ID no. 12673284
  misc_feature (1)..(339): Homolog of NCBI NO: 18412822 NR Description: putative protein; protein id: At4g05150.1, by cDNA: gi_15809939 [Arabidopsis thaliana]
  misc_feature (1)..(339): Homolog of NCBI NO: 25407315 NR Description: hypothetical protein AT4g05150 [imported] - thaliana >gi|7267274|emb|CAB81057.1| putative protein
  misc_feature (1)..(172): Homolog of NCBI NO: 34895646 NR Description: P0480E02.2 [Oryza sativa (japonica
  misc_feature (1)..(173): Homolog of NCBI NO: 21553908 NR Description: unknown [Arabidopsis thaliana]
  misc_feature (1)..(173): Homolog of NCBI NO: 18379168 NR Description: expressed protein; protein id: At2g01190.1, by cDNA: 17996., supported by cDNA: gi_17979118 [Arabidopsis >gi|17979119|gb|AAL49817.1| unknown protein [Arabidopsis
  misc_feature (1)..(243): Homolog of NCBI NO: 25410886 NR Description: hypothetical protein At2g01190 [imported] -
  misc_feature (1)..(159): Homolog of NCBI NO: 15229599 NR Description: unknown protein; protein id: At3g18230.1 thaliana] >gi|9279657|dbj|BAB01173.1| contains similarity to
  misc_feature (1)..(297): Homolog of NCBI NO: 24414006 NR Description: contains EST D23238(C2469)~kinase-like protein
  misc_feature (1)..(285): Homolog of NCBI NO: 15232679 NR Description: protein kinase - like protein; protein id:
  misc_feature (1)..(246): Homolog of NCBI NO: 15219183 NR Description: putative Ser/Thr protein kinase; protein id:
MDEYDRVAQNQNPRASRLRLFLFTKNVAGEEDNDSRASSISSLLDSSVNREQWFLDALNLGSSAAATAVSNGGSGRVFERVRSEVSSIVSEVPDYLFGLDNFDETAPPHELRDRDPRAKIQREVSTLSDPGSPRRDVPSPYGSTSSAPVMRISTPELPPPVFIKPESPEPVSTPKSNPQPEQVMQQSNLPVNSQWQYAPGPGQQVHYQGHTIHQSPVYYVPGSVPGNHMVQQGNHMVQPGNHMVQPVQMPGQYLQQYHHVPMGYHQPQTHQMAGPGQVYGGTVRPVMMAVDGMNRTGYYGMKTPGPVQMYQHHTGMVVPGVEEQQQYRTETDSDTGRAS

SEQ ID NO: 84142 - DNA, 1669 bp, Arabidopsis thaliana
  misc_feature (1)..(1669): Ceres Seq. ID no. 12673366
  misc_feature: MA Experiment ID: 108434 Result: Up-regulated in Transcription
  misc_feature: MA Experiment 108434 PARAMETER Experiment Name: At_Root_Tips_cDNA_P Parameter: Tissue Value: Root Tips
  misc_feature: MA Experiment ID: 108461 Result: Up-regulated in Transcription
  misc_feature: MA Experiment 108461 PARAMETER Experiment Name: At_Germinating_Seeds_cDNA_P Parameter: Age (day) Value: 1 vs. 0
  misc_feature: MA Experiment 108461 PARAMETER Experiment Name: At_Germinating_Seeds_cDNA_P Parameter: Tissue Value: Germinating Seeds
  misc_feature: MA Experiment ID: 108463 Result: Up-regulated in Transcription
  misc_feature: MA Experiment 108463 PARAMETER Experiment Name: At_Germinating_Seeds_cDNA_P Parameter: Age (day) Value: 3 vs. 0
  misc_feature: MA Experiment 108463 PARAMETER Experiment Name: At_Germinating_Seeds_cDNA_P Parameter: Tissue Value: Germinating Seeds
  misc_feature: MA Experiment ID: 108464 Result: Up-regulated in Transcription
  misc_feature: MA Experiment 108464 PARAMETER Experiment Name: At_Germinating_Seeds_cDNA_P Parameter: Age (day) Value: 4 vs. 0
  misc_feature: MA Experiment 108464 PARAMETER Experiment Name: At_Germinating_Seeds_cDNA_P Parameter: Tissue Value: Germinating Seeds
  misc_feature: MA Experiment ID: 108569 Result: Up-regulated in Transcription
  misc_feature: MA Experiment 108569 PARAMETER Experiment Name: At_0.001%_MeJA__cDNA_P Parameter: Timepoint (hr) Value: 6
  misc_feature: MA Experiment 108569 PARAMETER Experiment Name: At_0.001%_MeJA__cDNA_P Parameter: Tissue Value: Aerial
  misc_feature: MA Experiment 108569 PARAMETER Experiment Name: At_0.001%_MeJA__cDNA_P Parameter: Treatment Value: 0.001% MeJA vs. No Treatment
  misc_feature: MA Experiment ID: 108573 Result: Up-regulated in Transcription
  misc_feature: MA Experiment 108573 PARAMETER Experiment Name: At_Drought_cDNA_P Parameter: Timepoint (hr) Value: 6
  misc_feature: MA Experiment 108573 PARAMETER Experiment Name: At_Drought_cDNA_P Parameter: Tissue Value: Aerial
  misc_feature: MA Experiment 108573 PARAMETER Experiment Name: At_Drought_cDNA_P Parameter: Treatment Value: Drought vs. No Drought
  misc_feature: MA Experiment ID: 108595 Result: Down-regulated in Transcription
  misc_feature: MA Experiment 108595 PARAMETER Experiment Name: At_Ler-pi_Ovule_cDNA_P Parameter: Plant Line Value: null
  misc_feature: MA Experiment ID: 20000087 Result: Down-regulated in Transcription
  misc_feature: MA Experiment 20000087 PARAMETER Experiment Name: At_100uM_ABA_Mutants_cDNA_P Parameter: Plant Line Value: WS
  misc_feature: MA Experiment 20000087 PARAMETER Experiment Name: At_100uM_ABA_Mutants_cDNA_P Parameter: Timepoint (hr) Value: 6
  misc_feature: MA Experiment 20000087 PARAMETER Experiment Name: At_100uM_ABA_Mutants_cDNA_P Parameter: Tissue Value: Aerial
  misc_feature: MA Experiment 20000087 PARAMETER Experiment Name: At_100uM_ABA_Mutants_cDNA_P Parameter: Treatment Value: 100uM ABA vs. No Treatment
  misc_feature: MA Experiment ID: 20000113 Result: Down-regulated in Transcription
  misc_feature: MA Experiment 20000113 PARAMETER Experiment Name: At_42deg_Heat_cDNA_P Parameter: Temperature (deg C) Value: 42 vs. 22
  misc_feature: MA Experiment 20000113 PARAMETER Experiment Name: At_42deg_Heat_cDNA_P Parameter: Timepoint (hr) Value: 8
  misc_feature: MA Experiment 20000113 PARAMETER Experiment Name: At_42deg_Heat_cDNA_P Parameter: Tissue Value: Aerial
  misc_feature: MA Experiment ID: 20000306 Result: Up-regulated in Transcription
  misc_feature: MA Experiment 20000306 PARAMETER Experiment Name: At_Germinating_Seeds_Sub_P Parameter: Age (hr) Value: 6 vs. 0
  misc_feature: MA Experiment 20000306 PARAMETER Experiment Name: At_Germinating_Seeds_Sub_P Parameter: Organism Value: A. thaliana
  misc_feature: MA Experiment 20000306 PARAMETER Experiment Name: At_Germinating_Seeds_Sub_P Parameter: Plant Line Value: WS
  misc_feature: MA Experiment 20000306 PARAMETER Experiment Name: At_Germinating_Seeds_Sub_P Parameter: Tissue Value: Germinating Seeds
  misc_feature: MA Experiment ID: 20000307 Result: Up-regulated in Transcription
  misc_feature: MA Experiment 20000307 PARAMETER Experiment Name: At_Germinating_Seeds_Sub_P Parameter: Age (hr) Value: 24 vs. 0
  misc_feature: MA Experiment 20000307 PARAMETER Experiment Name: At_Germinating_Seeds_Sub_P Parameter: Organism Value: A. thaliana
  misc_feature: MA Experiment 20000307 PARAMETER Experiment Name: At_Germinating_Seeds_Sub_P Parameter: Plant Line Value: WS
  misc_feature: MA Experiment 20000307 PARAMETER Experiment Name: At_Germinating_Seeds_Sub_P Parameter: Tissue Value: Germinating Seeds
tttttttgcttcttctaatagacttcttcgtcactgatctcccacgacgatctcccaaactcatttctctacgttcatcgatctctctctttctcgtttgctctacgaaaatcagccatggatgaagagtacgaggttattgttctcggcaccggtctcaaggagtgtatcctcagcggtctcctttccgtcgatggtgtcaaggtgcttcacatggacaggaatgactactatggtggagaatcaacttcccttaatctcaatcagctttggaagaagttcaggggagaagagaaggctcctgagcatttaggcgctagccgggattacaatgttgacatgatgcctaagtttatgatgggaaatggcaagcttgttcgtacccttattcatacagatgttacaaagtatttgtccttcaaagctgttgatggaagctatgttttcgtcaaaggaaaggttcaaaaggtgccagctactcctatggaggccctgaaatcttctctcatgggcatatttgagaaacgtcgagccggcaagtttttcagttttgttcaagaatacgatgagaaggacccaaaaacacacgatggaatggatttgaccagagttacaacaaaggaactgattgcgaaatatggtcttgatggcaacactattgactttattggtcacgcagtggcacttcacacgaatgaccaacatctcgaccaacccgcctttgatactgtaatgagaatgaagctctatgcggaatctcttgcacgtttccaaggaacatctccatatatttatcctctctatgggttgggagaactaccccaggcatttgcacgacttagtgctgtctatggtggcacatatatgttgaacaaacctgagtgcaaggtagagtttgacgagggaggtaaggttattggtgtaacatctgagggagagactgctaaatgcaaaaagattgtgtgtgacccttcatacctgccgaacaaggttaggaagattggcagggttgctcgggccatcgccattatgagccacccgattccgaacaccaatgattctcactcagtgcaggtcatcataccccagaaacagttggcccgcaaatcggatatgtatgtcttctgttgttcgtactcccacaacgttgctcccaagggaaaattcattgcatttgtgtctacagatgcagagactgataaccctcaaaccgaactaaagcctggaactgatcttttgggtcctgttgatgagatattcttcgacatgtatgatagatacgagcctgtcaacgagccagagttggacaactgctttatttcaacgagctatgatgctacaacacactttgagacaactgttgcggatgtgttgaacatgtataccctaatcaccggaaagcaactggacctaagtgttgacctgagtgccgcaagtgctgcagaggaatgaagaatcatcaccagatcgctccctctctagttgattttctaaaagcttgttttgctcatttctctgtttccgactcttgctttcgtgttcttttttggtttgaactttgaatacaaaatcagaatgatccttcatgttttagaaactaacaaccatgtgtctccgtttgatgttggattcctcggttaaagacttataaatgctctttaaaactcaa

SEQ ID NO: 84143 - protein, 444 aa, Arabidopsis thaliana; identical to SEQ ID NO: 26953
  peptide (1)..(444): Ceres Seq. ID no. 12673367
  misc_feature (1)..(438): Pfam Name: GDP dissociation inhibitor Pfam Description: GDP dissociation inhibitor
  misc_feature (1)..(444): Homolog of NCBI NO: 15232210 NR Description: Rab GDP dissociation inhibitor; protein id: supported by cDNA: gi_19698844, supported by cDNA: gi_2446980
  misc_feature (1)..(444): Homolog of NCBI NO: 15224814 NR Description: GDP dissociation inhibitor; protein id: supported by cDNA: 29536., supported by cDNA: gi_13605640, by cDNA: gi_15215777, supported by cDNA: gi_1655423, supported by
  misc_feature (1)..(444): Homolog of NCBI NO: 1550740 NR Description: GDP-associated inhibitor [Arabidopsis thaliana]
  misc_feature (1)..(444): Homolog of NCBI NO: 17473582 NR Description: GDP dissociation inhibitor [Arabidopsis thaliana]
  misc_feature (1)..(444): Homolog of NCBI NO: 21592535 NR Description: GDP dissociation inhibitor [Arabidopsis thaliana]
  misc_feature (1)..(444): Homolog of NCBI NO: 3175990 NR Description: GDP dissociation inhibitor [Cicer arietinum]
  misc_feature (1)..(444): Homolog of NCBI NO: 7489133 NR Description: GDP dissociation inhibitor - common tobacco
  misc_feature (1)..(444): Homolog of NCBI NO: 7489478 NR Description: GDP dissociation inhibitor protein - rice
  misc_feature (1)..(444): Homolog of NCBI NO: 7489479 NR Description: GDP dissociation inhibitor protein - rice
  misc_feature (1)..(444): Homolog of NCBI NO: 15242440 NR Description: GDP dissociation inhibitor; protein id:

SEQ ID NO: 84144 - protein, 412 aa, Arabidopsis thaliana; identical to SEQ ID NO: 26954
  peptide (1)..(412): Ceres Seq. ID no. 12673368
  misc_feature (1)..(406): Pfam Name: GDP dissociation inhibitor Pfam Description: GDP dissociation inhibitor
  misc_feature (1)..(412): Homolog of NCBI NO: 15232210 NR Description: Rab GDP dissociation inhibitor; protein id: supported by cDNA: gi_19698844, supported by cDNA: gi_2446980
  misc_feature (1)..(412): Homolog of NCBI NO: 15224814 NR Description: GDP dissociation inhibitor; protein id: supported by cDNA: 29536., supported by cDNA: gi_13605640, by cDNA: gi_15215777, supported by cDNA: gi_1655423, supported by
  misc_feature (1)..(412): Homolog of NCBI NO: 1550740 NR Description: GDP-associated inhibitor [Arabidopsis thaliana]
  misc_feature (1)..(412): Homolog of NCBI NO: 17473582 NR Description: GDP dissociation inhibitor [Arabidopsis thaliana]
  misc_feature (1)..(412): Homolog of NCBI NO: 21592535 NR Description: GDP dissociation inhibitor [Arabidopsis thaliana]
  misc_feature (1)..(412): Homolog of NCBI NO: 3175990 NR Description: GDP dissociation inhibitor [Cicer arietinum]
  misc_feature (1)..(412): Homolog of NCBI NO: 7489133 NR Description: GDP dissociation inhibitor - common tobacco
  misc_feature (1)..(412): Homolog of NCBI NO: 7489478 NR Description: GDP dissociation inhibitor protein - rice
  misc_feature (1)..(412): Homolog of NCBI NO: 7489479 NR Description: GDP dissociation inhibitor protein - rice
  misc_feature (1)..(412): Homolog of NCBI NO: 15242440 NR Description: GDP dissociation inhibitor; protein id:

SEQ ID NO: 84145 - protein, 370 aa, Arabidopsis thaliana; identical to SEQ ID NO: 26955
  peptide (1)..(370): Ceres Seq. ID no. 12673369
  misc_feature (1)..(364): Pfam Name: GDP dissociation inhibitor Pfam Description: GDP dissociation inhibitor
  misc_feature (1)..(370): Homolog of NCBI NO: 15232210 NR Description: Rab GDP dissociation inhibitor; protein id: supported by cDNA: gi_19698844, supported by cDNA: gi_2446980
  misc_feature (1)..(370): Homolog of NCBI NO: 15224814 NR Description: GDP dissociation inhibitor; protein id: supported by cDNA: 29536., supported by cDNA: gi_13605640, by cDNA: gi_15215777, supported by cDNA: gi_1655423, supported by
  misc_feature (1)..(370): Homolog of NCBI NO: 1550740 NR Description: GDP-associated inhibitor [Arabidopsis thaliana]
  misc_feature (1)..(370): Homolog of NCBI NO: 17473582 NR Description: GDP dissociation inhibitor [Arabidopsis thaliana]
  misc_feature (1)..(370): Homolog of NCBI NO: 21592535 NR Description: GDP dissociation inhibitor [Arabidopsis thaliana]
  misc_feature (1)..(370): Homolog of NCBI NO: 3175990 NR Description: GDP dissociation inhibitor [Cicer arietinum]
  misc_feature (1)..(370): Homolog of NCBI NO: 7489133 NR Description: GDP dissociation inhibitor - common tobacco
  misc_feature (1)..(370): Homolog of NCBI NO: 7489478 NR Description: GDP dissociation inhibitor protein - rice
  misc_feature (1)..(370): Homolog of NCBI NO: 7489479 NR Description: GDP dissociation inhibitor protein - rice
  misc_feature (1)..(370): Homolog of NCBI NO: 15242440 NR Description: GDP dissociation inhibitor; protein id:

SEQ ID NO: 84146 - DNA, 427 bp, Arabidopsis thaliana
  misc_feature (1)..(427): Ceres Seq. ID no. 12673393
  misc_feature: MA Experiment ID: 108434 Result: Up-regulated in Transcription
  misc_feature: MA Experiment 108434 PARAMETER Experiment Name: At_Root_Tips_cDNA_P Parameter: Tissue Value: Root Tips
  misc_feature: MA Experiment ID: 108462 Result: Down-regulated in Transcription
  misc_feature: MA Experiment 108462 PARAMETER Experiment Name: At_Germinating_Seeds_cDNA_P Parameter: Age (day) Value: 2 vs. 0
  misc_feature: MA Experiment 108462 PARAMETER Experiment Name: At_Germinating_Seeds_cDNA_P Parameter: Tissue Value: Germinating Seeds
  misc_feature: MA Experiment ID: 108463 Result: Down-regulated in Transcription
  misc_feature: MA Experiment 108463 PARAMETER Experiment Name: At_Germinating_Seeds_cDNA_P Parameter: Age (day) Value: 3 vs. 0
  misc_feature: MA Experiment 108463 PARAMETER Experiment Name: At_Germinating_Seeds_cDNA_P Parameter: Tissue Value: Germinating Seeds
  misc_feature: MA Experiment ID: 108573 Result: Down-regulated in Transcription
  misc_feature: MA Experiment 108573 PARAMETER Experiment Name: At_Drought_cDNA_P Parameter: Timepoint (hr) Value: 6
  misc_feature: MA Experiment 108573 PARAMETER Experiment Name: At_Drought_cDNA_P Parameter: Tissue Value: Aerial
  misc_feature: MA Experiment 108573 PARAMETER Experiment Name: At_Drought_cDNA_P Parameter: Treatment Value: Drought vs. No Drought
  misc_feature: MA Experiment ID: 20000071 Result: Down-regulated in Transcription
  misc_feature: MA Experiment 20000071 PARAMETER Experiment Name: At_100uM_ABA_Mutants_cDNA_P Parameter: Plant Line Value: CS8104
  misc_feature: MA Experiment 20000071 PARAMETER Experiment Name: At_100uM_ABA_Mutants_cDNA_P Parameter: Timepoint (hr) Value: 6
  misc_feature: MA Experiment 20000071 PARAMETER Experiment Name: At_100uM_ABA_Mutants_cDNA_P Parameter: Tissue Value: Aerial
  misc_feature: MA Experiment 20000071 PARAMETER Experiment Name: At_100uM_ABA_Mutants_cDNA_P Parameter: Treatment Value: 100uM ABA vs. No Treatment
  misc_feature: MA Experiment ID: 20000184 Result: Up-regulated in Transcription
  misc_feature: MA Experiment 20000184 PARAMETER Experiment Name: At_Shoots__P Parameter: Age (day) Value: 7
  misc_feature: MA Experiment 20000184 PARAMETER Experiment Name: At_Shoots__P Parameter: Tissue Value: Shoots vs. Whole Plant
  misc_feature: MA Experiment ID: 20000227 Result: Up-regulated in Transcription
  misc_feature: MA Experiment 20000227 PARAMETER Experiment Name: At_Root-Tips-vs-Tops_P Parameter: Tissue Value: Root Tips vs. Root Tops
  misc_feature: MA Experiment ID: 20000234 Result: Up-regulated in Transcription
  misc_feature: MA Experiment 20000234 PARAMETER Experiment Name: At_Siliques_P Parameter: Age (day) Value: 21
  misc_feature: MA Experiment 20000234 PARAMETER Experiment Name: At_Siliques_P Parameter: Organism Value: A. thaliana
  misc_feature: MA Experiment 20000234 PARAMETER Experiment Name: At_Siliques_P Parameter: Plant Line Value: WS
  misc_feature: MA Experiment 20000234 PARAMETER Experiment Name: At_Siliques_P Parameter: Tissue Value: Less Than 5mm Siliques vs. Whole Plant
  misc_feature: MA Experiment ID: 20000235 Result: Up-regulated in Transcription
  misc_feature: MA Experiment 20000235 PARAMETER Experiment Name: At_Siliques_P Parameter: Age (day) Value: 21
  misc_feature: MA Experiment 20000235 PARAMETER Experiment Name: At_Siliques_P Parameter: Organism Value: A. thaliana
  misc_feature: MA Experiment 20000235 PARAMETER Experiment Name: At_Siliques_P Parameter: Plant Line Value: WS
  misc_feature: MA Experiment 20000235 PARAMETER Experiment Name: At_Siliques_P Parameter: Tissue Value: 5-10mm Siliques vs. Whole Plant
  misc_feature: MA Experiment ID: 20000264 Result: Up-regulated in Transcription
  misc_feature: MA Experiment 20000264 PARAMETER Experiment Name: At_Open_Flower_P Parameter: Age (day) Value: 21
  misc_feature: MA Experiment 20000264 PARAMETER Experiment Name: At_Open_Flower_P Parameter: Plant Line Value: WS
  misc_feature: MA Experiment 20000264 PARAMETER Experiment Name: At_Open_Flower_P Parameter: Tissue Value: Open Flower vs. Whole Plant
  misc_feature: MA Experiment ID: 20000437 Result: Down-regulated in Transcription
  misc_feature: MA Experiment 20000437 PARAMETER Experiment Name: At_Drought_P Parameter: Age (day) Value: 8
  misc_feature: MA Experiment 20000437 PARAMETER Experiment Name: At_Drought_P Parameter: Organism Value: A. thaliana
  misc_feature: MA Experiment 20000437 PARAMETER Experiment Name: At_Drought_P Parameter: Plant Line Value: WS
  misc_feature: MA Experiment 20000437 PARAMETER Experiment Name: At_Drought_P Parameter: Timepoint (hr) Value: 24
  misc_feature: MA Experiment 20000437 PARAMETER Experiment Name: At_Drought_P Parameter: Tissue Value: Whole Plant
  misc_feature: MA Experiment 20000437 PARAMETER Experiment Name: At_Drought_P Parameter: Treatment Value: Drought vs. No Drought
  misc_feature: MA Experiment ID: 20000794 Result: Down-regulated in Transcription
  misc_feature: MA Experiment 20000794 PARAMETER Experiment Name: At_Petals_P Parameter: Age (day) Value: 23-25 days
  misc_feature: MA Experiment 20000794 PARAMETER Experiment Name: At_Petals_P Parameter: Plant Line Value: WS
  misc_feature: MA Experiment 20000794 PARAMETER Experiment Name: At_Petals_P Parameter: Tissue Value: Petals vs. Whole plant
  misc_feature: MA Experiment ID: 20001557 Result: Up-regulated in Transcription
  misc_feature: MA Experiment 20001557 PARAMETER Experiment Name: At_Drought_Soil_Dry_P Parameter: Age (day) Value: 27
  misc_feature: MA Experiment 20001557 PARAMETER Experiment Name: At_Drought_Soil_Dry_P Parameter: Organism Value: A. thaliana
  misc_feature: MA Experiment 20001557 PARAMETER Experiment Name: At_Drought_Soil_Dry_P Parameter: Plant Line Value: WS
  misc_feature: MA Experiment 20001557 PARAMETER Experiment Name: At_Drought_Soil_Dry_P Parameter: Post Timepoint (hr) Value: 3
  misc_feature: MA Experiment 20001557 PARAMETER Experiment Name: At_Drought_Soil_Dry_P Parameter: Post-Treatment Value: Re-Water vs. No Drought
  misc_feature: MA Experiment 20001557 PARAMETER Experiment Name: At_Drought_Soil_Dry_P Parameter: Timepoint (day) Value: 13
  misc_feature: MA Experiment 20001557 PARAMETER Experiment Name: At_Drought_Soil_Dry_P Parameter: Treatment Value: Drought vs. No Drought
  misc_feature: MA Experiment ID: 20001558 Result: Up-regulated in Transcription
  misc_feature: MA Experiment 20001558 PARAMETER Experiment Name: At_Drought_Soil_Dry_P Parameter: Age (day) Value: 27
  misc_feature: MA Experiment 20001558 PARAMETER Experiment Name: At_Drought_Soil_Dry_P Parameter: Organism Value: A. thaliana
  misc_feature: MA Experiment 20001558 PARAMETER Experiment Name: At_Drought_Soil_Dry_P Parameter: Plant Line Value: WS
  misc_feature: MA Experiment 20001558 PARAMETER Experiment Name: At_Drought_Soil_Dry_P Parameter: Post Timepoint (hr) Value: 6
  misc_feature: MA Experiment 20001558 PARAMETER Experiment Name: At_Drought_Soil_Dry_P Parameter: Post-Treatment Value: Re-Water vs. No Drought
  misc_feature: MA Experiment 20001558 PARAMETER Experiment Name: At_Drought_Soil_Dry_P Parameter: Timepoint (day) Value: 13
  misc_feature: MA Experiment 20001558 PARAMETER Experiment Name: At_Drought_Soil_Dry_P Parameter: Treatment Value: Drought vs. No Drought
  misc_feature: MA Experiment ID: 20001560 Result: Up-regulated in Transcription
  misc_feature: MA Experiment 20001560 PARAMETER Experiment Name: At_Drought_Soil_Dry_P Parameter: Age (day) Value: 28
  misc_feature: MA Experiment 20001560 PARAMETER Experiment Name: At_Drought_Soil_Dry_P Parameter: Organism Value: A. thaliana
  misc_feature: MA Experiment 20001560 PARAMETER Experiment Name: At_Drought_Soil_Dry_P Parameter: Plant Line Value: WS
  misc_feature: MA Experiment 20001560 PARAMETER Experiment Name: At_Drought_Soil_Dry_P Parameter: Post Timepoint (hr) Value: None
  misc_feature: MA Experiment 20001560 PARAMETER Experiment Name: At_Drought_Soil_Dry_P Parameter: Post-Treatment Value: None
  misc_feature: MA Experiment 20001560 PARAMETER Experiment Name: At_Drought_Soil_Dry_P Parameter: Timepoint (day) Value: 14
  misc_feature: MA Experiment 20001560 PARAMETER Experiment Name: At_Drought_Soil_Dry_P Parameter: Treatment Value: Drought vs. No Drought
  misc_feature: MA Experiment ID: 20001757 Result: Up-regulated in Transcription
  misc_feature: MA Experiment 20001757 PARAMETER Experiment Name: At_50mM_NH4NO3_L-to-H_P Parameter: Timepoint (hr) Value: 6
  misc_feature: MA Experiment 20001757 PARAMETER Experiment Name: At_50mM_NH4NO3_L-to-H_P Parameter: Tissue Value: Leaf
  misc_feature: MA Experiment 20001757 PARAMETER Experiment Name: At_50mM_NH4NO3_L-to-H_P Parameter: Treatment Value: 50mM NH4NO3 vs 100mM Mannitol
  misc_feature: Pfam Name: Ribosomal_L37ae Pfam Description: Ribosomal L37ae protein family
gctcattagggtttctcatctacgacggcgtggtgttcctccttcctgctctgaaaaatggcgaagagaacgaagaaggttggaatcgtcggcaaatacggaacacgttatggtgcgagtatcaggaagcagattaagaagatggaggtcagccagcacagcaagtacttctgtgagttctatctggggttgcaaggattgtggcaaggtcaaggcaggtggtgcttacacaatgaacaccgccagtgcggtcactgttagaagcacgatcagaaggttgagggagcagatcgagggttaaaagtctgctggctttttatatttggtttccttgttttgacaatttaagttttgcaaactctatgcttgtgattttgaatcaagacttatacattgagcagtttaagcaggtttttattttttgttg

SEQ ID NO: 84147 - protein, 99 aa, Arabidopsis thaliana
  peptide (1)..(99): Ceres Seq. ID no. 12673394
  misc_feature: Pfam Name: Ribosomal_L37ae Pfam Description: Ribosomal L37ae protein family
  misc_feature (61)..(98): Homolog of NCBI NO: 34911166 NR Description: putative 60S ribosomal protein L37a [Oryza sativa
  misc_feature (61)..(99): Homolog of NCBI NO: 6831607 NR Description: 60S ribosomal protein L37a
  misc_feature (58)..(98): Homolog of NCBI NO: 15228411 NR Description: putative 60S ribosomal protein L37a; protein id: [Arabidopsis thaliana] >gi|20139844|sp|Q9SRK6|R37A_ARATH 60S protein L37a >gi|6016699|gb|AAF01526.1|AC009991_22 putative 60S
  misc_feature (61)..(98): Homolog of NCBI NO: 6831602 NR Description: 60S RIBOSOMAL PROTEIN L37A
  misc_feature (61)..(95): Homolog of NCBI NO: 7441206 NR Description: ribosomal protein L37a [similarity] - slime mold
  misc_feature (61)..(95): Homolog of NCBI NO: 14318428 NR Description: 60S ribosomal protein L37A [Branchiostoma >gi|28200297|gb|AAO31780.1| ribosomal protein L37A [Branchiostoma
  misc_feature (59)..(95): Homolog of NCBI NO: 17535699 NR Description: Ribosomal Protein, Large subunit RPL-43 (10.1 kD) [Caenorhabditis elegans] >gi|7509977|pir||T26996 ribosomal
  misc_feature (57)..(98): Homolog of NCBI NO: 17864394 NR Description: Ribosomal protein L37a CG5827-PA [Drosophila
  misc_feature (59)..(95): Homolog of NCBI NO: 39591398 NR Description: Hypothetical protein CBG20901 [Caenorhabditis
  misc_feature (61)..(95): Homolog of NCBI NO: 27667232 NR Description: similar to ribosomal protein L37a, cytosolic
LIRVSHLRRRGVPPSCSEKWRRERRRLESSANTEHVMVRVSGSRLRRWRSASTASTSVSSIWGCKDCGKVKAGGAYTMNTASAVTVRSTIRRLREQIEG

SEQ ID NO: 84148 - protein, 67 aa, Arabidopsis thaliana
  peptide (1)..(67): Ceres Seq. ID no. 12673395
  misc_feature: Pfam Name: Ribosomal_L37ae Pfam Description: Ribosomal L37ae protein family
  misc_feature (3)..(41): Homolog of NCBI NO: 34911166 NR Description: putative 60S ribosomal protein L37a [Oryza sativa
  misc_feature (1)..(41): Homolog of NCBI NO: 6831607 NR Description: 60S ribosomal protein L37a
  misc_feature (1)..(41): Homolog of NCBI NO: 15228411 NR Description: putative 60S ribosomal protein L37a; protein id: [Arabidopsis thaliana] >gi|20139844|sp|Q9SRK6|R37A_ARATH 60S protein L37a >gi|6016699|gb|AAF01526.1|AC009991_22 putative 60S
  misc_feature (1)..(41): Homolog of NCBI NO: 6831602 NR Description: 60S RIBOSOMAL PROTEIN L37A
  misc_feature (1)..(41): Homolog of NCBI NO: 7441206 NR Description: ribosomal protein L37a [similarity] - slime mold
  misc_feature (1)..(41): Homolog of NCBI NO: 14318428 NR Description: 60S ribosomal protein L37A [Branchiostoma >gi|28200297|gb|AAO31780.1| ribosomal protein L37A [Branchiostoma
  misc_feature (1)..(41): Homolog of NCBI NO: 17535699 NR Description: Ribosomal Protein, Large subunit RPL-43 (10.1 kD) [Caenorhabditis elegans] >gi|7509977|pir||T26996 ribosomal
  misc_feature (1)..(41): Homolog of NCBI NO: 17864394 NR Description: Ribosomal protein L37a CG5827-PA [Drosophila
  misc_feature (1)..(41): Homolog of NCBI NO: 39591398 NR Description: Hypothetical protein CBG20901 [Caenorhabditis
  misc_feature (1)..(41): Homolog of NCBI NO: 27667232 NR Description: similar to ribosomal protein L37a, cytosolic
MAKRTKKVGIVGKYGTRYGASIRKQIKKMEVSQHSKYFCEFYLGLQGLWQGQGRWCLHNEHRQCGHC

SEQ ID NO: 84149 - protein, 63 aa, Arabidopsis thaliana
  peptide (1)..(63): Ceres Seq. ID no. 12673396
  misc_feature: Pfam Name: Ribosomal_L37ae Pfam Description: Ribosomal L37ae protein family
  misc_feature (25)..(62): Homolog of NCBI NO: 34911166 NR Description: putative 60S ribosomal protein L37a [Oryza sativa
  misc_feature (25)..(63): Homolog of NCBI NO: 6831607 NR Description: 60S ribosomal protein L37a
  misc_feature (22)..(62): Homolog of NCBI NO: 15228411 NR Description: putative 60S ribosomal protein L37a; protein id: [Arabidopsis thaliana] >gi|20139844|sp|Q9SRK6|R37A_ARATH 60S protein L37a >gi|6016699|gb|AAF01526.1|AC009991_22 putative 60S
  misc_feature (25)..(62): Homolog of NCBI NO: 6831602 NR Description: 60S RIBOSOMAL PROTEIN L37A
  misc_feature (25)..(59): Homolog of NCBI NO: 7441206 NR Description: ribosomal protein L37a [similarity] - slime mold
  misc_feature (25)..(59): Homolog of NCBI NO: 14318428 NR Description: 60S ribosomal protein L37A [Branchiostoma >gi|28200297|gb|AAO31780.1| ribosomal protein L37A [Branchiostoma
  misc_feature (23)..(59): Homolog of NCBI NO: 17535699 NR Description: Ribosomal Protein, Large subunit RPL-43 (10.1 kD) [Caenorhabditis elegans] >gi|7509977|pir||T26996 ribosomal
  misc_feature (21)..(62): Homolog of NCBI NO: 17864394 NR Description: Ribosomal protein L37a CG5827-PA [Drosophila
  misc_feature (23)..(59): Homolog of NCBI NO: 39591398 NR Description: Hypothetical protein CBG20901 [Caenorhabditis
  misc_feature (25)..(59): Homolog of NCBI NO: 27667232 NR Description: similar to ribosomal protein L37a, cytosolic
MVRVSGSRLRRWRSASTASTSVSSIWGCKDCGKVKAGGAYTMNTASAVTVRSTIRRLREQIEG

SEQ ID NO: 84150 - DNA, 532 bp, Arabidopsis thaliana
  misc_feature (1)..(532): Ceres Seq. ID no. 12673416
  misc_feature: MA Experiment ID: 108434 Result: Down-regulated in Transcription
  misc_feature: MA Experiment 108434 PARAMETER Experiment Name: At_Root_Tips_cDNA_P Parameter: Tissue Value: Root Tips
  misc_feature: MA Experiment ID: 108462 Result: Up-regulated in Transcription
  misc_feature: MA Experiment 108462 PARAMETER Experiment Name: At_Germinating_Seeds_cDNA_P Parameter: Age (day) Value: 2 vs. 0
  misc_feature: MA Experiment 108462 PARAMETER Experiment Name: At_Germinating_Seeds_cDNA_P Parameter: Tissue Value: Germinating Seeds
  misc_feature: MA Experiment ID: 108463 Result: Up-regulated in Transcription
  misc_feature: MA Experiment 108463 PARAMETER Experiment Name: At_Germinating_Seeds_cDNA_P Parameter: Age (day) Value: 3 vs. 0
  misc_feature: MA Experiment 108463 PARAMETER Experiment Name: At_Germinating_Seeds_cDNA_P Parameter: Tissue Value: Germinating Seeds
  misc_feature: MA Experiment ID: 108464 Result: Up-regulated in Transcription
  misc_feature: MA Experiment 108464 PARAMETER Experiment Name: At_Germinating_Seeds_cDNA_P Parameter: Age (day) Value: 4 vs. 0
  misc_feature: MA Experiment 108464 PARAMETER Experiment Name: At_Germinating_Seeds_cDNA_P Parameter: Tissue Value: Germinating Seeds
  misc_feature: MA Experiment ID: 108585 Result: Up-regulated in Transcription
  misc_feature: MA Experiment 108585 PARAMETER Experiment Name: At_5mM_NaNP_cDNA_P Parameter: Timepoint (hr) Value: 6
  misc_feature: MA Experiment 108585 PARAMETER Experiment Name: At_5mM_NaNP_cDNA_P Parameter: Tissue Value: Aerial
  misc_feature: MA Experiment 108585 PARAMETER Experiment Name: At_5mM_NaNP_cDNA_P Parameter: Treatment Value: null
  misc_feature: MA Experiment ID: 108607 Result: Up-regulated in Transcription
  misc_feature: MA Experiment 108607 PARAMETER Experiment Name: At_100uM_ABA_cDNA_P Parameter: Timepoint (hr) Value: 4
  misc_feature: MA Experiment 108607 PARAMETER Experiment Name: At_100uM_ABA_cDNA_P Parameter: Tissue Value: Aerial
  misc_feature: MA Experiment 108607 PARAMETER Experiment Name: At_100uM_ABA_cDNA_P Parameter: Treatment Value: 100uM ABA vs. No Treatment
  misc_feature: MA Experiment ID: 108668 Result: Up-regulated in Transcription
  misc_feature: MA Experiment 108668 PARAMETER Experiment Name: At_2mM_SA_cDNA_P Parameter: Plant Line Value: WS
  misc_feature: MA Experiment 108668 PARAMETER Experiment Name: At_2mM_SA_cDNA_P Parameter: Timepoint (hr) Value: 6
  misc_feature: MA Experiment 108668 PARAMETER Experiment Name: At_2mM_SA_cDNA_P Parameter: Treatment Value: 2mM SA vs. No Treatment
  misc_feature: MA Experiment ID: 20000069 Result: Up-regulated in Transcription
  misc_feature: MA Experiment 20000069 PARAMETER Experiment Name: At_100uM_ABA_Mutants_cDNA_P Parameter: Plant Line Value: CS23
  misc_feature: MA Experiment 20000069 PARAMETER Experiment Name: At_100uM_ABA_Mutants_cDNA_P Parameter: Timepoint (hr) Value: 6
  misc_feature: MA Experiment 20000069 PARAMETER Experiment Name: At_100uM_ABA_Mutants_cDNA_P Parameter: Tissue Value: Aerial
  misc_feature: MA Experiment 20000069 PARAMETER Experiment Name: At_100uM_ABA_Mutants_cDNA_P Parameter: Treatment Value: 100uM ABA vs. No Treatment
  misc_feature: MA Experiment ID: 20000087 Result: Up-regulated in Transcription
  misc_feature: MA Experiment 20000087 PARAMETER Experiment Name: At_100uM_ABA_Mutants_cDNA_P Parameter: Plant Line Value: WS
  misc_feature: MA Experiment 20000087 PARAMETER Experiment Name: At_100uM_ABA_Mutants_cDNA_P Parameter: Timepoint (hr) Value: 6
  misc_feature: MA Experiment 20000087 PARAMETER Experiment Name: At_100uM_ABA_Mutants_cDNA_P Parameter: Tissue Value: Aerial
  misc_feature: MA Experiment 20000087 PARAMETER Experiment Name: At_100uM_ABA_Mutants_cDNA_P Parameter: Treatment Value: 100uM ABA vs. No Treatment
  misc_feature: MA Experiment ID: 20000089 Result: Up-regulated in Transcription
  misc_feature: MA Experiment ID: 20000111 Result: Down-regulated in Transcription
  misc_feature: MA Experiment 20000111 PARAMETER Experiment Name: At_42deg_Heat_cDNA_P Parameter: Temperature (deg C) Value: 42 vs. 22
  misc_feature: MA Experiment 20000111 PARAMETER Experiment Name: At_42deg_Heat_cDNA_P Parameter: Timepoint (hr) Value: 6
  misc_feature: MA Experiment 20000111 PARAMETER Experiment Name: At_42deg_Heat_cDNA_P Parameter: Tissue Value: Aerial
  misc_feature: MA Experiment ID: 20000113 Result: Down-regulated in Transcription
  misc_feature: MA Experiment 20000113 PARAMETER Experiment Name: At_42deg_Heat_cDNA_P Parameter: Temperature (deg C) Value: 42 vs. 22
  misc_feature: MA Experiment 20000113 PARAMETER Experiment Name: At_42deg_Heat_cDNA_P Parameter: Timepoint (hr) Value: 8
  misc_feature: MA Experiment 20000113 PARAMETER Experiment Name: At_42deg_Heat_cDNA_P Parameter: Tissue Value: Aerial
  misc_feature: MA Experiment ID: 20000117 Result: Up-regulated in Transcription
  misc_feature: MA Experiment 20000117 PARAMETER Experiment Name: At_100uM_ABA_Mutants_cDNA_P Parameter: Plant Line Value: Columbia
  misc_feature: MA Experiment 20000117 PARAMETER Experiment Name: At_100uM_ABA_Mutants_cDNA_P Parameter: Timepoint (hr) Value: 6
  misc_feature: MA Experiment 20000117 PARAMETER Experiment Name: At_100uM_ABA_Mutants_cDNA_P Parameter: Tissue Value: Aerial
  misc_feature: MA Experiment 20000117 PARAMETER Experiment Name: At_100uM_ABA_Mutants_cDNA_P Parameter: Treatment Value: 100uM ABA vs. No Treatment
  misc_feature: MA Experiment ID: 20000307 Result: Up-regulated in Transcription
  misc_feature: MA Experiment 20000307 PARAMETER Experiment Name: At_Germinating_Seeds_Sub_P Parameter: Age (hr) Value: 24 vs. 0
  misc_feature: MA Experiment 20000307 PARAMETER Experiment Name: At_Germinating_Seeds_Sub_P Parameter: Organism Value: A. thaliana
  misc_feature: MA Experiment 20000307 PARAMETER Experiment Name: At_Germinating_Seeds_Sub_P Parameter: Plant Line Value: WS
  misc_feature: MA Experiment 20000307 PARAMETER Experiment Name: At_Germinating_Seeds_Sub_P Parameter: Tissue Value: Germinating Seeds
  misc_feature: MA Experiment ID: 20000315 Result: Down-regulated in Transcription
  misc_feature: MA Experiment 20000315 PARAMETER Experiment Name: At_14day_Shoots-Roots_Sub_P Parameter: Age (day) Value: 14
  misc_feature: MA Experiment 20000315 PARAMETER Experiment Name: At_14day_Shoots-Roots_Sub_P Parameter: Organism Value: A. thaliana
  misc_feature: MA Experiment 20000315 PARAMETER Experiment Name: At_14day_Shoots-Roots_Sub_P Parameter: Plant Line Value: WS
  misc_feature: MA Experiment 20000315 PARAMETER Experiment Name: At_14day_Shoots-Roots_Sub_P Parameter: Tissue Value: Shoots vs. Whole Plant
  misc_feature: MA Experiment ID: 20000328 Result: Down-regulated in Transcription
  misc_feature: MA Experiment 20000328 PARAMETER Experiment Name: At_42deg_Heat_Sub_P Parameter: Age (day) Value: 14
  misc_feature: MA Experiment 20000328 PARAMETER Experiment Name: At_42deg_Heat_Sub_P Parameter: Organism Value: A. thaliana
  misc_feature: MA Experiment 20000328 PARAMETER Experiment Name: At_42deg_Heat_Sub_P Parameter: Plant Line Value: WS
  misc_feature: MA Experiment 20000328 PARAMETER Experiment Name: At_42deg_Heat_Sub_P Parameter: Temperature (deg C) Value: 42 vs. 22
  misc_feature: MA Experiment 20000328 PARAMETER Experiment Name: At_42deg_Heat_Sub_P Parameter: Timepoint (hr) Value: 6
  misc_feature: MA Experiment 20000328 PARAMETER Experiment Name: At_42deg_Heat_Sub_P Parameter: Tissue Value: Aerial
  misc_feature: MA Experiment ID: 20000347 Result: Up-regulated in Transcription
  misc_feature: MA Experiment 20000347 PARAMETER Experiment Name: At_2mM_SA_Sub_P Parameter: Age (day) Value: 14
  misc_feature: MA Experiment 20000347 PARAMETER Experiment Name: At_2mM_SA_Sub_P Parameter: Organism Value: A. thaliana
  misc_feature: MA Experiment 20000347 PARAMETER Experiment Name: At_2mM_SA_Sub_P Parameter: Plant Line Value: WS
  misc_feature: MA Experiment 20000347 PARAMETER Experiment Name: At_2mM_SA_Sub_P Parameter: Timepoint (hr) Value: 6
  misc_feature: MA Experiment 20000347 PARAMETER Experiment Name: At_2mM_SA_Sub_P Parameter: Tissue Value: Aerial
  misc_feature: MA Experiment 20000347 PARAMETER Experiment Name: At_2mM_SA_Sub_P Parameter: Treatment Value: 2mM SA vs. No Treatment
aagtgttagcttttgatctttcttatattcttctctgaaatagtaacacactgtgaagagtttttcctacatctgaattttgtctgatccaggaaaaagaagaaaatggcgtttgtgacaactgcggaagtttgtgacgcgaatcaagagctgattcggagtggtcagctacgagctttgcaacccattttccagatttatggccgtcgacaaatattctcaggaccagttgtcactgtcaaagtttttgaagacaatggcttaatccgtcaattcatcgaggagaaaggaaacggtagagttcttgtggtggatggtggagggagtcaacgatgtgcaatactcggagttgtgatggtgaatggctttatgcagatactgatgggattcttgtctcccaaattgagttatccgtttaataaaaaaggctttgatcagttaccaaaaaaaaaaaaacagaacgtggtttgtgttcatcttcttgttacttaagagattgttgaattataatggaaaataaatttttgttttg

SEQ ID NO: 84151 - protein, 128 aa, Arabidopsis thaliana
  peptide (1)..(128): Ceres Seq. ID no. 12673417
  misc_feature (2)..(81): Pfam Name: Demethylmenaquinone methyltransferase Pfam Description: Demethylmenaquinone methyltransferase
  misc_feature (1)..(81): Homolog of NCBI NO: 15237348 NR Description: expressed protein; protein id: At5g16450.1, by cDNA: 13819. [Arabidopsis thaliana]
  misc_feature (1)..(81): Homolog of NCBI NO: 21537415 NR Description: S-adenosylmethionine:2-demethylmenaquinone
  misc_feature (4)..(81): Homolog of NCBI NO: 34910724 NR Description: S-adenosylmethionine:2-demethylmenaquinone
  misc_feature (1)..(93): Homolog of NCBI NO: 15232963 NR Description: expressed protein; protein id: At3g02770.1, by cDNA: 29093. [Arabidopsis thaliana]
  misc_feature (1)..(81): Homolog of NCBI NO: 15241161 NR Description: expressed protein; protein id: At5g56260.1
  misc_feature (1)..(93): Homolog of NCBI NO: 22982141 NR Description: hypothetical protein [Burkholderia fungorum]
  misc_feature (4)..(81): Homolog of NCBI NO: 17546073 NR Description: PROBABLE METHYLTRANSFERASE PROTEIN [Ralstonia solanacearum]
  misc_feature (1)..(81): Homolog of NCBI NO: 22978085 NR Description: hypothetical protein [Ralstonia metallidurans]
  misc_feature (1)..(81): Homolog of NCBI NO: 34497095 NR Description: S-adenosylmethionine:2-demethylmenaquinone
  misc_feature (6)..(81): Homolog of NCBI NO: 23059662 NR Description: hypothetical protein [Pseudomonas fluorescens
MAFVTTAEVCDANQELIRSGQLRALQPIFQIYGRRQIFSGPVVTVKVFEDNGLIRQFIEEKGNGRVLVVDGGGSQRCAILGVVMVNGFMQILMGFLSPKLSYPFNKKGFDQLPKKKKQNVVCVHLLVT

SEQ ID NO: 84152 - DNA, 1357 bp, Arabidopsis thaliana
  misc_feature (1)..(1357): Ceres Seq. ID no. 12673428
  misc_feature: MA Experiment ID: 20000314 Result: Down-regulated in Transcription
  misc_feature: MA Experiment 20000314 PARAMETER Experiment Name: At_14day_Shoots-Roots_Sub_P Parameter: Age (day) Value: 14
  misc_feature: MA Experiment 20000314 PARAMETER Experiment Name: At_14day_Shoots-Roots_Sub_P Parameter: Organism Value: A. thaliana
  misc_feature: MA Experiment 20000314 PARAMETER Experiment Name: At_14day_Shoots-Roots_Sub_P Parameter: Plant Line Value: WS
  misc_feature: MA Experiment 20000314 PARAMETER Experiment Name: At_14day_Shoots-Roots_Sub_P Parameter: Tissue Value: Roots vs. Whole Plant
  misc_feature: MA Experiment ID: 20000355 Result: Up-regulated in Transcription
  misc_feature: MA Experiment 20000355 PARAMETER Experiment Name: At_Siliques_Sub_P Parameter: Age (day) Value: 21
  misc_feature: MA Experiment 20000355 PARAMETER Experiment Name: At_Siliques_Sub_P Parameter: Organism Value: A. thaliana
  misc_feature: MA Experiment 20000355 PARAMETER Experiment Name: At_Siliques_Sub_P Parameter: Plant Line Value: WS
  misc_feature: MA Experiment 20000355 PARAMETER Experiment Name: At_Siliques_Sub_P Parameter: Tissue Value: Less Than 5mm Siliques vs. Whole Plant
  misc_feature: MA Experiment ID: 20000440 Result: Up-regulated in Transcription
  misc_feature: MA Experiment 20000440 PARAMETER Experiment Name: At_Closed-Flower__Sub_P Parameter: Tissue Value: Closed Flower vs. Whole Plant
aaaaacgctcgaaagagtttaaaaattgtgaacatattgtgatgaatcatcatgagcagtgacttcatacttgatattacgagtgagaggccactataaaaagcaggcgcgtcctcgaagaagaagaagaagaagtaacaaattggtggaaatcagaagttgaatcggagaataacaacgatgacgacgaacaagcaggtcatattcaaagaccacgtgagtggtttccctaaggaatccgatttcaatttcaccaccaccaccgtcgaacttagggttccggaaggttctaaatcggttcttgtgaagaatctctacctgtcatgcgatccttatatgcggtctcgcatggggaaacctgatccctcctctgctcttgctcaagcttacgctcccggcaagccaatctatgggtatggagtgtctagagtgatagaatctgggcatccagattacaagaaaggtgatttactctggggaatagttggatgggaggagtatagtgttattacaccaatggctcacatgcatttcaagatccaacatacagatgttccattatcctactatactggacttctcggtatgcctggtatgactgcctatgctgggttttatgaagtttgttctccaaagaaaggagagacagtttatgtgtcagctgcatctggtgcggttggtcagcttgtgggacaatttgctaagatgatgggctgttatgttgttggaagcgctggaagtaaagaaaaggttgatctcctgaagaccaagtttgggtttgatgatgcatttaactacaaggaagaatctgaccttagtgctgccctcaaaaggtgttttcccaagggcatcgacatgtactttgagaacgtaggaggcaaaatgctagatgcagtgctcttaaacatgaacccacacgggcgtatcgctgtctgtggaatgatctcacagtacaatcttgaaaatcaagaaggtgtacacaacctatccaatatcatctacaaacgaatacgcattcaaggctttgtagtggctgatttctacgacaaatacccaaagttcttggagttggtgcttccgcgcattaaagaagggaagataacgtatgtggaagatgtagctgatgggctcgagaaagctcctgaagctcttgtggggcttttccatggtaagaacgttgggaaacaagttgttgttattgctcgtgagtgaagaatacttatttgggagtaatgtcttattgcgcgtgagtgaagaatacttatttgggagaaatgttatatttatccaacaagagttggtatgtctgttgaacccaaccgtgagtttttggtttatgaataatactagtaactat

SEQ ID NO: 84153 - protein, 343 aa, Arabidopsis thaliana; identical to SEQ ID NO: 43475
  peptide (1)..(343): Ceres Seq. ID no. 12673429
  misc_feature (132)..(340): Pfam Name: Zinc-binding dehydrogenase Pfam Description: Zinc-binding dehydrogenase
  misc_feature (1)..(343): Homolog of NCBI NO: 15237890 NR Description: quinone oxidoreductase - like protein; protein At5g16990.1, supported by cDNA: gi_17529037, supported by cDNA:
  misc_feature (1)..(343): Homolog of NCBI NO: 21554121 NR Description: quinone oxidoreductase-like protein [Arabidopsis
  misc_feature (1)..(343): Homolog of NCBI NO: 1362014 NR Description: probable NADPH2:quinone reductase (EC 1.6.5.5) P2
  misc_feature (1)..(343): Homolog of NCBI NO: 15237888 NR Description: quinone oxidoreductase -like protein; protein id:
  misc_feature (1)..(343): Homolog of NCBI NO: 22326861 NR Description: quinone oxidoreductase - like protein; protein At5g17000.1, supported by cDNA: gi_16604343, supported by cDNA: [Arabidopsis thaliana] >gi|16604344|gb|AAL24178.1|
  misc_feature (1)..(343): Homolog of NCBI NO: 17529140 NR Description: putative quinone oxidoreductase [Arabidopsis
  misc_feature (1)..(343): Homolog of NCBI NO: 21539447 NR Description: quinone oxidoreductase-like protein [Arabidopsis
  misc_feature (1)..(343): Homolog of NCBI NO: 11358742 NR Description: quinone oxidoreductase-like protein - Arabidopsis
  misc_feature (4)..(343): Homolog of NCBI NO: 15228456 NR Description: putative NADP-dependent oxidoreductase; protein At3g03080.1 [Arabidopsis thaliana]
  misc_feature (1)..(343): Homolog of NCBI NO: 21593645 NR Description: allyl alcohol dehydrogenase, putative

SEQ ID NO: 84154 - protein, 291 aa, Arabidopsis thaliana; identical to SEQ ID NO: 43476
  peptide (1)..(291): Ceres Seq. ID no. 12673430
  misc_feature (80)..(288): Pfam Name: Zinc-binding dehydrogenase Pfam Description: Zinc-binding dehydrogenase
  misc_feature (1)..(291): Homolog of NCBI NO: 15237890 NR Description: quinone oxidoreductase - like protein; protein At5g16990.1, supported by cDNA: gi_17529037, supported by cDNA:
  misc_feature (1)..(291): Homolog of NCBI NO: 21554121 NR Description: quinone oxidoreductase-like protein [Arabidopsis
  misc_feature (1)..(291): Homolog of NCBI NO: 1362014 NR Description: probable NADPH2:quinone reductase (EC 1.6.5.5) P2
  misc_feature (1)..(291): Homolog of NCBI NO: 15237888 NR Description: quinone oxidoreductase -like protein; protein id:
  misc_feature (1)..(291): Homolog of NCBI NO: 22326861 NR Description: quinone oxidoreductase - like protein; protein At5g17000.1, supported by cDNA: gi_16604343, supported by cDNA: [Arabidopsis thaliana] >gi|16604344|gb|AAL24178.1|
  misc_feature (1)..(291): Homolog of NCBI NO: 17529140 NR Description: putative quinone oxidoreductase [Arabidopsis
  misc_feature (1)..(291): Homolog of NCBI NO: 21539447 NR Description: quinone oxidoreductase-like protein [Arabidopsis
  misc_feature (1)..(291): Homolog of NCBI NO: 11358742 NR Description: quinone oxidoreductase-like protein - Arabidopsis
  misc_feature (1)..(291): Homolog of NCBI NO: 15228456 NR Description: putative NADP-dependent oxidoreductase; protein At3g03080.1 [Arabidopsis thaliana]
  misc_feature (1)..(291): Homolog of NCBI NO: 21593645 NR Description: allyl alcohol dehydrogenase, putative

SEQ ID NO: 84155 - protein, 287 aa, Arabidopsis thaliana; identical to SEQ ID NO: 43477
  peptide (1)..(287): Ceres Seq. ID no. 12673431
  misc_feature (76)..(284): Pfam Name: Zinc-binding dehydrogenase Pfam Description: Zinc-binding dehydrogenase
  misc_feature (1)..(287): Homolog of NCBI NO: 15237890 NR Description: quinone oxidoreductase - like protein; protein At5g16990.1, supported by cDNA: gi_17529037, supported by cDNA:
  misc_feature (1)..(287): Homolog of NCBI NO: 21554121 NR Description: quinone oxidoreductase-like protein [Arabidopsis
  misc_feature (1)..(287): Homolog of NCBI NO: 1362014 NR Description: probable NADPH2:quinone reductase (EC 1.6.5.5) P2
  misc_feature (1)..(287): Homolog of NCBI NO: 15237888 NR Description: quinone oxidoreductase -like protein; protein id:
  misc_feature (1)..(287): Homolog of NCBI NO: 22326861 NR Description: quinone oxidoreductase - like protein; protein At5g17000.1, supported by cDNA: gi_16604343, supported by cDNA: [Arabidopsis thaliana] >gi|16604344|gb|AAL24178.1|
  misc_feature (1)..(287): Homolog of NCBI NO: 17529140 NR Description: putative quinone oxidoreductase [Arabidopsis
  misc_feature (1)..(287): Homolog of NCBI NO: 21539447 NR Description: quinone oxidoreductase-like protein [Arabidopsis
  misc_feature (1)..(287): Homolog of NCBI NO: 11358742 NR Description: quinone oxidoreductase-like protein - Arabidopsis
  misc_feature (1)..(287): Homolog of NCBI NO: 15228456 NR Description: putative NADP-dependent oxidoreductase; protein At3g03080.1 [Arabidopsis thaliana]
  misc_feature (1)..(287): Homolog of NCBI NO: 21593645 NR Description: allyl alcohol dehydrogenase, putative

SEQ ID NO: 84156 - DNA, 1396 bp, Arabidopsis thaliana
  misc_feature (1)..(1396): Ceres Seq. ID no. 12673447
  misc_feature: MA Experiment ID: 20000184 Result: Up-regulated in Transcription
  misc_feature: MA Experiment 20000184 PARAMETER Experiment Name: At_Shoots__P Parameter: Age (day) Value: 7
  misc_feature: MA Experiment 20000184 PARAMETER Experiment Name: At_Shoots__P Parameter: Tissue Value: Shoots vs. Whole Plant
  misc_feature: MA Experiment ID: 20000495 Result: Up-regulated in Transcription
  misc_feature: MA Experiment 20000495 PARAMETER Experiment Name: At_Guard_Cells_P Parameter: Harvest Date Value: 8/2/2002
  misc_feature: MA Experiment 20000495 PARAMETER Experiment Name: At_Guard_Cells_P Parameter: Organism Value: A. thaliana
  misc_feature: MA Experiment 20000495 PARAMETER Experiment Name: At_Guard_Cells_P Parameter: Tissue Value: Guard Cells vs. Leaves
  misc_feature: MA Experiment ID: 20001557 Result: Up-regulated in Transcription
  misc_feature: MA Experiment 20001557 PARAMETER Experiment Name: At_Drought_Soil_Dry_P Parameter: Age (day) Value: 27
  misc_feature: MA Experiment 20001557 PARAMETER Experiment Name: At_Drought_Soil_Dry_P Parameter: Organism Value: A. thaliana
  misc_feature: MA Experiment 20001557 PARAMETER Experiment Name: At_Drought_Soil_Dry_P Parameter: Plant Line Value: WS
  misc_feature: MA Experiment 20001557 PARAMETER Experiment Name: At_Drought_Soil_Dry_P Parameter: Post Timepoint (hr) Value: 3
  misc_feature: MA Experiment 20001557 PARAMETER Experiment Name: At_Drought_Soil_Dry_P Parameter: Post-Treatment Value: Re-Water vs. No Drought
  misc_feature: MA Experiment 20001557 PARAMETER Experiment Name: At_Drought_Soil_Dry_P Parameter: Timepoint (day) Value: 13
  misc_feature: MA Experiment 20001557 PARAMETER Experiment Name: At_Drought_Soil_Dry_P Parameter: Treatment Value: Drought vs. No Drought
  misc_feature: MA Experiment ID: 20001911 Result: Down-regulated in Transcription
  misc_feature: MA Experiment 20001911 PARAMETER Experiment Name: At_Drought_Reproduction_P Parameter: Age (day) Value: 40
  misc_feature: MA Experiment 20001911 PARAMETER Experiment Name: At_Drought_Reproduction_P Parameter: Organism Value: A. thaliana
  misc_feature: MA Experiment 20001911 PARAMETER Experiment Name: At_Drought_Reproduction_P Parameter: Plant Line Value: WS
  misc_feature: MA Experiment 20001911 PARAMETER Experiment Name: At_Drought_Reproduction_P Parameter: Timepoint (day) Value: 10
  misc_feature: MA Experiment 20001911 PARAMETER Experiment Name: At_Drought_Reproduction_P Parameter: Tissue Value: Flowers
  misc_feature: MA Experiment 20001911 PARAMETER Experiment Name: At_Drought_Reproduction_P Parameter: Treatment Value: Drought vs. No Drought
attttttcccttttacaattcttaagctagttttatacttttcttcttcctttcatttgggttaagagaagccatggataccgagtttctccgaaccctagatcgtcagattcttttgggtgtcttcgttgctttcgtcgccgttggtgctggtgctgcttattttcttacatcctccaagaaacgcagaggttcgatctctatttcattcaatttgtcttttctggaattcaatccaaatcatgaactttggatagattgaggcaaaagtttctgtttggtaggttggattagtcaacagacaatgaaaaattgaaccttgtttcagctgatctacttgaagatttgagtaaatcttgtgtttttattgttggttttatagtgtgtttggatccagagaatttcaaggagttcaagcttgttaagagacatcagcttagtcacaatgtggccaagttcgtttttgaactcccaacttctacttctgtgttgggtcttcccattggacaacacatcagttgcaggggaaaggatggtcaaggagaggatgttattaagccatacaccccgactacgttagactctgacgttggacgtttcgaacttgtcattaagatgtatccgcaaggacggatgtctcatcatttcagggagatgcgtgttggagaccatcttgccgtaaagggaccaaagggtaggttcaagtatcaaccaggtcagtttagggcatttggaatgcttgctggaggttcaggcatcactcccatgttccaagtggccagagcaattctagaaaacccaacagacaagacaaaggtgcatctcatttacgccaacgtcacatacgacgacattctcttgaaggaagaattggagggtcttactaccaattaccctgaacaatttaaaatcttctatgttttgaaccagcctccggaagtatgggatggtggtgttggatttgtatcaaaggaaatgattcagactcattgccctgcacctgcatctgatattcagatcctaagatgcggaccaccgccaatgaacaaggccatggctgcaaaccttgaagctctgggatactctccggagatgcaattccagttctgatctgaatatcttcttttggttgctctgaaacggaactcataataatttagttacaatcccaactacgagagttgtgtcttaactgagtgagagttgtatttctgttgtgtgtttgttagcccacttgaaagtttccattgattggtttacgaattggttagacattttggttcacctataccggtttggtgcaaacactttgatgcttgatagtgagtggcgacatactgacatgacctaccctatgtgttttggtatgttgctatcaatttttggctactagtct

SEQ ID NO: 84157 - protein, 164 aa, Arabidopsis thaliana; identical to SEQ ID NO: 30341
  peptide (1)..(164): Ceres Seq. ID no. 12673448
  misc_feature (36)..(150): Pfam Name: Oxidoreductase NAD-binding domain Pfam Description: Oxidoreductase NAD-binding domain
  misc_feature (1)..(164): Homolog of NCBI NO: 15238025 NR Description: NADH-cytochrome b5 reductase; protein id: supported by cDNA: 17432., supported by cDNA: gi_4240115
  misc_feature (1)..(164): Homolog of NCBI NO: 17221690 NR Description: cytochrome b5 reductase isoform II [Zea mays]
  misc_feature (1)..(164): Homolog of NCBI NO: 4336205 NR Description: cytochrome b5 reductase [Zea mays]
  misc_feature (1)..(164): Homolog of NCBI NO: 16648905 NR Description: NADH-cytochrome b5 reductase [Arabidopsis
  misc_feature (1)..(156): Homolog of NCBI NO: 6070342 NR Description: NADH-cytochrome b5 reductase [Mortierella alpina]
  misc_feature (1)..(157): Homolog of NCBI NO: 40739560 NR Description: hypothetical protein AN6366.2 [Aspergillus
  misc_feature (1)..(156): Homolog of NCBI NO: 28202143 NR Description: reductase [Gibberella zeae]
  misc_feature (1)..(156): Homolog of NCBI NO: 29126014 NR Description: putative NADH cytb-reductase [Gibberella zeae]
  misc_feature (1)..(156): Homolog of NCBI NO: 19075352 NR Description: putative nadh-cytochrome b5 reductase
  misc_feature (1)..(156): Homolog of NCBI NO: 27924030 NR Description: reductase [Fusarium sporotrichioides]

SEQ ID NO: 84158 - protein, 158 aa, Arabidopsis thaliana; identical to SEQ ID NO: 30342
  peptide (1)..(158): Ceres Seq. ID no. 12673449
  misc_feature (30)..(144): Pfam Name: Oxidoreductase NAD-binding domain Pfam Description: Oxidoreductase NAD-binding domain
  misc_feature (1)..(158): Homolog of NCBI NO: 15238025 NR Description: NADH-cytochrome b5 reductase; protein id: supported by cDNA: 17432., supported by cDNA: gi_4240115
  misc_feature (1)..(158): Homolog of NCBI NO: 17221690 NR Description: cytochrome b5 reductase isoform II [Zea mays]
  misc_feature (1)..(158): Homolog of NCBI NO: 4336205 NR Description: cytochrome b5 reductase [Zea mays]
  misc_feature (1)..(158): Homolog of NCBI NO: 16648905 NR Description: NADH-cytochrome b5 reductase [Arabidopsis
  misc_feature (1)..(150): Homolog of NCBI NO: 6070342 NR Description: NADH-cytochrome b5 reductase [Mortierella alpina]
  misc_feature (1)..(151): Homolog of NCBI NO: 40739560 NR Description: hypothetical protein AN6366.2 [Aspergillus
  misc_feature (1)..(150): Homolog of NCBI NO: 28202143 NR Description: reductase [Gibberella zeae]
  misc_feature (1)..(150): Homolog of NCBI NO: 29126014 NR Description: putative NADH cytb-reductase [Gibberella zeae]
  misc_feature (1)..(150): Homolog of NCBI NO: 19075352 NR Description: putative nadh-cytochrome b5 reductase
  misc_feature (1)..(150): Homolog of NCBI NO: 27924030 NR Description: reductase [Fusarium sporotrichioides]

SEQ ID NO: 84159 - protein, 151 aa, Arabidopsis thaliana
  peptide (1)..(151): Ceres Seq. ID no. 12673450
  misc_feature (23)..(137): Pfam Name: Oxidoreductase NAD-binding domain Pfam Description: Oxidoreductase NAD-binding domain
  misc_feature (1)..(151): Homolog of NCBI NO: 15238025 NR Description: NADH-cytochrome b5 reductase; protein id: supported by cDNA: 17432., supported by cDNA: gi_4240115
  misc_feature (1)..(151): Homolog of NCBI NO: 17221690 NR Description: cytochrome b5 reductase isoform II [Zea mays]
  misc_feature (1)..(151): Homolog of NCBI NO: 4336205 NR Description: cytochrome b5 reductase [Zea mays]
  misc_feature (1)..(151): Homolog of NCBI NO: 16648905 NR Description: NADH-cytochrome b5 reductase [Arabidopsis
  misc_feature (1)..(143): Homolog of NCBI NO: 6070342 NR Description: NADH-cytochrome b5 reductase [Mortierella alpina]
  misc_feature (1)..(144): Homolog of NCBI NO: 40739560 NR Description: hypothetical protein AN6366.2 [Aspergillus
  misc_feature (1)..(143): Homolog of NCBI NO: 28202143 NR Description: reductase [Gibberella zeae]
  misc_feature (1)..(143): Homolog of NCBI NO: 29126014 NR Description: putative NADH cytb-reductase [Gibberella zeae]
  misc_feature (1)..(143): Homolog of NCBI NO: 19075352 NR Description: putative nadh-cytochrome b5 reductase
  misc_feature (1)..(143): Homolog of NCBI NO: 27924030 NR Description: reductase [Fusarium sporotrichioides]
MRVGDHLAVKGPKGRFKYQPGQFRAFGMLAGGSGITPMFQVARAILENPTDKTKVHLIYANVTYDDILLKEELEGLTTNYPEQFKIFYVLNQPPEVWDGGVGFVSKEMIQTHCPAPASDIQILRCGPPPMNKAMAANLEALGYSPEMQFQF

SEQ ID NO: 84160 - DNA, 1378 bp, Arabidopsis thaliana
  misc_feature (1)..(1378): Ceres Seq. ID no. 12673469
  misc_feature: MA Experiment ID: 20000173 Result: Down-regulated in Transcription
  misc_feature: MA Experiment 20000173 PARAMETER Experiment Name: At_42deg_Heat_P Parameter: Age (day) Value: 14
  misc_feature: MA Experiment 20000173 PARAMETER Experiment Name: At_42deg_Heat_P Parameter: Organism Value: A. thaliana
  misc_feature: MA Experiment 20000173 PARAMETER Experiment Name: At_42deg_Heat_P Parameter: Plant Line Value: WS
  misc_feature: MA Experiment 20000173 PARAMETER Experiment Name: At_42deg_Heat_P Parameter: Temperature (deg C) Value: 42 vs. 22
  misc_feature: MA Experiment 20000173 PARAMETER Experiment Name: At_42deg_Heat_P Parameter: Timepoint (hr) Value: 6
  misc_feature: MA Experiment 20000173 PARAMETER Experiment Name: At_42deg_Heat_P Parameter: Tissue Value: Aerial
  misc_feature: MA Experiment ID: 20000184 Result: Down-regulated in Transcription
  misc_feature: MA Experiment 20000184 PARAMETER Experiment Name: At_Shoots__P Parameter: Age (day) Value: 7
  misc_feature: MA Experiment 20000184 PARAMETER Experiment Name: At_Shoots__P Parameter: Tissue Value: Shoots vs. Whole Plant
  misc_feature: MA Experiment ID: 20000438 Result: Down-regulated in Transcription
  misc_feature: MA Experiment 20000438 PARAMETER Experiment Name: At_Shoots__P Parameter: Age (day) Value: 14
  misc_feature: MA Experiment 20000438 PARAMETER Experiment Name: At_Shoots__P Parameter: Tissue Value: Shoots vs. Whole Plant
  misc_feature: MA Experiment ID: 20000451 Result: Down-regulated in Transcription
  misc_feature: MA Experiment 20000451 PARAMETER Experiment Name: At_CS6879_Shoots-Roots_P Parameter: Age (day) Value: 14
  misc_feature: MA Experiment 20000451 PARAMETER Experiment Name: At_CS6879_Shoots-Roots_P Parameter: Organism Value: A. thaliana
  misc_feature: MA Experiment 20000451 PARAMETER Experiment Name: At_CS6879_Shoots-Roots_P Parameter: Plant Line Value: CS6879 vs. WS
  misc_feature: MA Experiment 20000451 PARAMETER Experiment Name: At_CS6879_Shoots-Roots_P Parameter: Tissue Value: Roots
  misc_feature: MA Experiment ID: 20001904 Result: Down-regulated in Transcription
  misc_feature: MA Experiment 20001904 PARAMETER Experiment Name: At_Drought_Reproduction_P Parameter: Age (day) Value: 37
  misc_feature: MA Experiment 20001904 PARAMETER Experiment Name: At_Drought_Reproduction_P Parameter: Organism Value: A. thaliana
  misc_feature: MA Experiment 20001904 PARAMETER Experiment Name: At_Drought_Reproduction_P Parameter: Plant Line Value: WS
  misc_feature: MA Experiment 20001904 PARAMETER Experiment Name: At_Drought_Reproduction_P Parameter: Timepoint (day) Value: 7
  misc_feature: MA Experiment 20001904 PARAMETER Experiment Name: At_Drought_Reproduction_P Parameter: Tissue Value: Rosettes
  misc_feature: MA Experiment 20001904 PARAMETER Experiment Name: At_Drought_Reproduction_P Parameter: Treatment Value: Drought vs. No Drought
gttgcaaaccatagtgtatctctgaactgagagtagcaggttgcaattaaaaactaaagattgtgtcagacagacttatgtattaccacaaccagcaccaaggaaagagcatcctctcttcatcgagaatgcccatttcttctgaaaggcatccgttcctcagaggaaatggcacaggagattctggactcattctctccactgatgcaaagccacgactaaaatggactccagatcttcacgagagatttgttgaagcggtcaaccagcttggaggaggagataaggctactcctaagacaatcatgaaagtcatgggcattccaggccttaccttataccatctcaagagtcatcttcagaaatataggctaagcaagaatcttaatggacaagctaacagcagtttaaacaagacaagtgtgatgaccatggtagaagaaaacccccctgaagtagacgaaagtcacagtgagagtttaagcattggaccacagccgagcatgaacttacccataagtgatgcccttcaaatgcaaatagaggtccagagacggctacacgagcaacttgagctcaggatagaggctcaaggaaagtacctgcaatcgattctggagaaagcacaagagactcttggaagacagaacctaggtgcagctgggattgaagcaacaaaagctcaactctcagaattagtatctaaagtatcagcagactatccagactctagtttcctcgaaccgaaagaactgcagaatctacaccatcaacagatgcaaaaaacgtatccacctaactcctccctggacagttgcctaacctcaagtgaaggaactcagaaagccccaaagatgcttgacaacagactgggattaagaacatatattggagattcaacttcagagcagaaagagataatggaagagccattcttccatagaatggagctcacatgggcagaagaagaaagcctcagagagaatcacaacaggccatatctttcaacaatggttaacaacgcagaaccgagaatctcgtcttcaagaagaagtcctggaagattgtcaataggagtgggattacatgaacacagaggaaggagtagcaacaacagtgagtatacagaagaaagattcaacgagaataatgaagattgcaagcttgaaacacacacaagaacagctctagatcttaacacacacgacgaaaactatggcacaacgcgtcctaaacagtttgatttaaatggtttcagctggaattgagaagaacaaataagctttagaagagtgcaacaacctttttatgataatcacacaggaaatgaaaagcctttgatttcctttgttagcttgagggattcgtctaaaaattg

SEQ ID NO: 84161 - protein, 396 aa, Arabidopsis thaliana
  peptide (1)..(396): Ceres Seq. ID no. 12673470
  misc_feature (47)..(98): Pfam Name: Myb-like DNA-binding domain Pfam Description: Myb-like DNA-binding domain
  misc_feature (1)..(396): Homolog of NCBI NO: 30686726 NR Description: transfactor-related protein [Arabidopsis
  misc_feature (1)..(396): Homolog of NCBI NO: 15238770 NR Description: transfactor-like protein; protein id: supported by cDNA: gi_14596180 [Arabidopsis thaliana]
  misc_feature (1)..(396): Homolog of NCBI NO: 28059694 NR Description: transfactor-like protein [Arabidopsis thaliana]
  misc_feature (1)..(396): Homolog of NCBI NO: 14596181 NR Description: transfactor-like protein [Arabidopsis thaliana]
  misc_feature (1)..(396): Homolog of NCBI NO: 22330835 NR Description: transfactor-like; protein id: At3g04030.1, by cDNA: gi_18377832 [Arabidopsis thaliana] AT3g04030/T11I18_14 [Arabidopsis thaliana]
  misc_feature (1)..(396): Homolog of NCBI NO: 6223653 NR Description: transfactor-like [Arabidopsis thaliana]
  misc_feature (1)..(252): Homolog of NCBI NO: 34394528 NR Description: transfactor-like protein [Oryza sativa (japonica
  misc_feature (31)..(265): Homolog of NCBI NO: 15222366 NR Description: transfactor, putative; protein id: At1g69580.1
  misc_feature (16)..(264): Homolog of NCBI NO: 18414049 NR Description: putative protein; protein id: At4g13640.1, by cDNA: 38327. [Arabidopsis thaliana]
  misc_feature (20)..(212): Homolog of NCBI NO: 18404044 NR Description: transfactor, putative; protein id: At3g24120.1, by cDNA: 6626., supported by cDNA: gi_15215653, supported by gi_20334891 [Arabidopsis thaliana] >gi|15215654|gb|AAK91372.1|
MYYHNQHQGKSILSSSRMPISSERHPFLRGNGTGDSGLILSTDAKPRLKWTPDLHERFVEAVNQLGGGDKATPKTIMKVMGIPGLTLYHLKSHLQKYRLSKNLNGQANSSLNKTSVMTMVEENPPEVDESHSESLSIGPQPSMNLPISDALQMQIEVQRRLHEQLELRIEAQGKYLQSILEKAQETLGRQNLGAAGIEATKAQLSELVSKVSADYPDSSFLEPKELQNLHHQQMQKTYPPNSSLDSCLTSSEGTQKAPKMLDNRLGLRTYIGDSTSEQKEIMEEPFFHRMELTWAEEESLRENHNRPYLSTMVNNAEPRISSSRRSPGRLSIGVGLHEHRGRSSNNSEYTEERFNENNEDCKLETHTRTALDLNTHDENYGTTRPKQFDLNGFSWN

SEQ ID NO: 84162 - protein, 379 aa, Arabidopsis thaliana
  peptide (1)..(379): Ceres Seq. ID no. 12673471
  misc_feature (30)..(81): Pfam Name: Myb-like DNA-binding domain Pfam Description: Myb-like DNA-binding domain
  misc_feature (1)..(379): Homolog of NCBI NO: 30686726 NR Description: transfactor-related protein [Arabidopsis
  misc_feature (1)..(379): Homolog of NCBI NO: 15238770 NR Description: transfactor-like protein; protein id: supported by cDNA: gi_14596180 [Arabidopsis thaliana]
  misc_feature (1)..(379): Homolog of NCBI NO: 28059694 NR Description: transfactor-like protein [Arabidopsis thaliana]
  misc_feature (1)..(379): Homolog of NCBI NO: 14596181 NR Description: transfactor-like protein [Arabidopsis thaliana]
  misc_feature (1)..(379): Homolog of NCBI NO: 22330835 NR Description: transfactor-like; protein id: At3g04030.1, by cDNA: gi_18377832 [Arabidopsis thaliana] AT3g04030/T11I18_14 [Arabidopsis thaliana]
  misc_feature (1)..(379): Homolog of NCBI NO: 6223653 NR Description: transfactor-like [Arabidopsis thaliana]
  misc_feature (1)..(235): Homolog of NCBI NO: 34394528 NR Description: transfactor-like protein [Oryza sativa (japonica
  misc_feature (14)..(248): Homolog of NCBI NO: 15222366 NR Description: transfactor, putative; protein id: At1g69580.1
  misc_feature (1)..(247): Homolog of NCBI NO: 18414049 NR Description: putative protein; protein id: At4g13640.1, by cDNA: 38327. [Arabidopsis thaliana]
  misc_feature (3)..(195): Homolog of NCBI NO: 18404044 NR Description: transfactor, putative; protein id: At3g24120.1, by cDNA: 6626., supported by cDNA: gi_15215653, supported by gi_20334891 [Arabidopsis thaliana] >gi|15215654|gb|AAK91372.1|
MPISSERHPFLRGNGTGDSGLILSTDAKPRLKWTPDLHERFVEAVNQLGGGDKATPKTIMKVMGIPGLTLYHLKSHLQKYRLSKNLNGQANSSLNKTSVMTMVEENPPEVDESHSESLSIGPQPSMNLPISDALQMQIEVQRRLHEQLELRIEAQGKYLQSILEKAQETLGRQNLGAAGIEATKAQLSELVSKVSADYPDSSFLEPKELQNLHHQQMQKTYPPNSSLDSCLTSSEGTQKAPKMLDNRLGLRTYIGDSTSEQKEIMEEPFFHRMELTWAEEESLRENHNRPYLSTMVNNAEPRISSSRRSPGRLSIGVGLHEHRGRSSNNSEYTEERFNENNEDCKLETHTRTALDLNTHDENYGTTRPKQFDLNGFSWN

SEQ ID NO: 84163 - protein, 320 aa, Arabidopsis thaliana
  peptide (1)..(320): Ceres Seq. ID no. 12673472
  misc_feature (1)..(320): Homolog of NCBI NO: 30686726 NR Description: transfactor-related protein [Arabidopsis
  misc_feature (1)..(320): Homolog of NCBI NO: 15238770 NR Description: transfactor-like protein; protein id: supported by cDNA: gi_14596180 [Arabidopsis thaliana]
  misc_feature (1)..(320): Homolog of NCBI NO: 28059694 NR Description: transfactor-like protein [Arabidopsis thaliana]
  misc_feature (1)..(320): Homolog of NCBI NO: 14596181 NR Description: transfactor-like protein [Arabidopsis thaliana]
  misc_feature (1)..(320): Homolog of NCBI NO: 22330835 NR Description: transfactor-like; protein id: At3g04030.1, by cDNA: gi_18377832 [Arabidopsis thaliana] AT3g04030/T11I18_14 [Arabidopsis thaliana]
  misc_feature (1)..(320): Homolog of NCBI NO: 6223653 NR Description: transfactor-like [Arabidopsis thaliana]
  misc_feature (1)..(176): Homolog of NCBI NO: 34394528 NR Description: transfactor-like protein [Oryza sativa (japonica
  misc_feature (1)..(189): Homolog of NCBI NO: 15222366 NR Description: transfactor, putative; protein id: At1g69580.1
  misc_feature (1)..(188): Homolog of NCBI NO: 18414049 NR Description: putative protein; protein id: At4g13640.1, by cDNA: 38327. [Arabidopsis thaliana]
  misc_feature (1)..(136): Homolog of NCBI NO: 18404044 NR Description: transfactor, putative; protein id: At3g24120.1, by cDNA: 6626., supported by cDNA: gi_15215653, supported by gi_20334891 [Arabidopsis thaliana] >gi|15215654|gb|AAK91372.1|
MKVMGIPGLTLYHLKSHLQKYRLSKNLNGQANSSLNKTSVMTMVEENPPEVDESHSESLSIGPQPSMNLPISDALQMQIEVQRRLHEQLELRIEAQGKYLQSILEKAQETLGRQNLGAAGIEATKAQLSELVSKVSADYPDSSFLEPKELQNLHHQQMQKTYPPNSSLDSCLTSSEGTQKAPKMLDNRLGLRTYIGDSTSEQKEIMEEPFFHRMELTWAEEESLRENHNRPYLSTMVNNAEPRISSSRRSPGRLSIGVGLHEHRGRSSNNSEYTEERFNENNEDCKLETHTRTALDLNTHDENYGTTRPKQFDLNGFSWN

SEQ ID NO: 84164 - DNA, 761 bp, Arabidopsis thaliana
  misc_feature (1)..(761): Ceres Seq. ID no. 12673485
  misc_feature: MA Experiment ID: 108573 Result: Up-regulated in Transcription
  misc_feature: MA Experiment 108573 PARAMETER Experiment Name: At_Drought_cDNA_P Parameter: Timepoint (hr) Value: 6
  misc_feature: MA Experiment 108573 PARAMETER Experiment Name: At_Drought_cDNA_P Parameter: Tissue Value: Aerial
  misc_feature: MA Experiment 108573 PARAMETER Experiment Name: At_Drought_cDNA_P Parameter: Treatment Value: Drought vs. No Drought
  misc_feature: MA Experiment ID: 108595 Result: Down-regulated in Transcription
  misc_feature: MA Experiment 108595 PARAMETER Experiment Name: At_Ler-pi_Ovule_cDNA_P Parameter: Plant Line Value: null
  misc_feature: MA Experiment ID: 20000224 Result: Down-regulated in Transcription
  misc_feature: MA Experiment ID: 20000794 Result: Down-regulated in Transcription
  misc_feature: MA Experiment 20000794 PARAMETER Experiment Name: At_Petals_P Parameter: Age (day) Value: 23-25 days
  misc_feature: MA Experiment 20000794 PARAMETER Experiment Name: At_Petals_P Parameter: Plant Line Value: WS
  misc_feature: MA Experiment 20000794 PARAMETER Experiment Name: At_Petals_P Parameter: Tissue Value: Petals vs. Whole plant
acctaccttctccaatctcttttcgatttcgaattttccatctttcgattctcagtagtttcgtctcaatttcataattccattgtagccgataatgaattccgctttagattttgcttttccggctacatttccggttaaatcgagttctgttggcggacatcggattgcttcccctggattcagttcccgcttaagattgtgctctcttcctccttcttcatctatcaaggctgagtcatgtttaaaaagagacgtgcacaggcaaagaagcagtcttgagtcaatgttctgttatgataaaccaataccagaggaaataatcgaggagccagttggattatccatgtcagagagagagattggtgataatcagcgttgcacttgttgtgaagctaaaggtgcattgctttgttccacttgttctggaactggtctatatgtagattccattatggagagtcaaggcatcattgttaaagtccgttgcttaggttgtggtggaagtggtaatattatgtgcaaactttgtggtgggcgtggtcacgtaggacactgatgactccgtgtttcacttgtttgcactcatggttctgttttacctattcgccactttttctagctctgatcttattgtaaaagcctacttttttgagttccatacatagatttgtgttcttgtactgatgtaatctctagctaaactatgcacaatcttgtcccagactattcattttctgttgttatataaaatggtttcc

SEQ ID NO: 84165 - protein, 154 aa, Arabidopsis thaliana; identical to SEQ ID NO: 30304
  peptide (1)..(154): Ceres Seq. ID no. 12673486
  misc_feature (1)..(154): Homolog of NCBI NO: 15238662 NR Description: putative protein; protein id: At5g17840.1, by cDNA: 17360., supported by cDNA: 26743., supported by cDNA: supported by cDNA: gi_20259266 [Arabidopsis thaliana]
  misc_feature (1)..(154): Homolog of NCBI NO: 21554941 NR Description: unknown [Arabidopsis thaliana]

SEQ ID NO: 84166 - protein, 90 aa, Arabidopsis thaliana; identical to SEQ ID NO: 30305
  peptide (1)..(90): Ceres Seq. ID no. 12673487
  misc_feature (1)..(90): Homolog of NCBI NO: 15238662 NR Description: putative protein; protein id: At5g17840.1, by cDNA: 17360., supported by cDNA: 26743., supported by cDNA: supported by cDNA: gi_20259266 [Arabidopsis thaliana]
  misc_feature (1)..(90): Homolog of NCBI NO: 21554941 NR Description: unknown [Arabidopsis thaliana]

SEQ ID NO: 84167 - DNA, 1129 bp, Arabidopsis thaliana
  misc_feature (1)..(1129): Ceres Seq. ID no. 12673500
  misc_feature: MA Experiment ID: 108434 Result: Down-regulated in Transcription
  misc_feature: MA Experiment 108434 PARAMETER Experiment Name: At_Root_Tips_cDNA_P Parameter: Tissue Value: Root Tips
  misc_feature: MA Experiment ID: 108501 Result: Down-regulated in Transcription
  misc_feature: MA Experiment 108501 PARAMETER Experiment Name: At_ap2_floral_buds_cDNA_P Parameter: Plant Line Value: ap2 (Ler.)
  misc_feature: MA Experiment 108501 PARAMETER Experiment Name: At_ap2_floral_buds_cDNA_P Parameter: Tissue Value: Closed Flower
  misc_feature: MA Experiment ID: 20000171 Result: Up-regulated in Transcription
  misc_feature: MA Experiment 20000171 PARAMETER Experiment Name: At_42deg_Heat_P Parameter: Age (day) Value: 14
  misc_feature: MA Experiment 20000171 PARAMETER Experiment Name: At_42deg_Heat_P Parameter: Organism Value: A. thaliana
  misc_feature: MA Experiment 20000171 PARAMETER Experiment Name: At_42deg_Heat_P Parameter: Plant Line Value: WS
  misc_feature: MA Experiment 20000171 PARAMETER Experiment Name: At_42deg_Heat_P Parameter: Temperature (deg C) Value: 42 vs. 22
  misc_feature: MA Experiment 20000171 PARAMETER Experiment Name: At_42deg_Heat_P Parameter: Timepoint (hr) Value: 1
  misc_feature: MA Experiment 20000171 PARAMETER Experiment Name: At_42deg_Heat_P Parameter: Tissue Value: Aerial
  misc_feature: MA Experiment ID: 20000437 Result: Up-regulated in Transcription
  misc_feature: MA Experiment 20000437 PARAMETER Experiment Name: At_Drought_P Parameter: Age (day) Value: 8
  misc_feature: MA Experiment 20000437 PARAMETER Experiment Name: At_Drought_P Parameter: Organism Value: A. thaliana
  misc_feature: MA Experiment 20000437 PARAMETER Experiment Name: At_Drought_P Parameter: Plant Line Value: WS
  misc_feature: MA Experiment 20000437 PARAMETER Experiment Name: At_Drought_P Parameter: Timepoint (hr) Value: 24
  misc_feature: MA Experiment 20000437 PARAMETER Experiment Name: At_Drought_P Parameter: Tissue Value: Whole Plant
  misc_feature: MA Experiment 20000437 PARAMETER Experiment Name: At_Drought_P Parameter: Treatment Value: Drought vs. No Drought
aactgtgtgttttttggcagacacagatcaagaaccttaatcctctatggtatccgttggagagccagagcgtcgagtatttcaggttgggagatttttgggattgtttcgacgagtggagtgcttacggtgcaggtgtccccattgtatcggaaacgggcgaaacattggtccaatactatgttccttacctctctgcaatccagattttcacctctcattctgttatcaatactcttagggaggagacagaatcaggggattcagggagcgagtcgtgtagcgaggagtggagatgggaaggatgttcttcgtctgaagaagggtttgatcatcaagaacctctcgatcgcctcggttactcttacttgcagtatttcgagagatgtacaccttactctagagtccctctcatggataagatcaaagagttgggagaaagatacgtagggttgaggtcattgaggagtgttgatctgtctcctgcgagttggatggctgttgcttggtatccaatctatcacattcccatgaatagaagcataaaagacttgtctacttgcttcctcacttaccacacgctttcttcatctttccaagatgtaaaaagggaagaggagaaggagaggataagtgtgagtgcatttgggatggccacttacaagatgcaagggaggctatgggataatgatagattgctttgctttttgagcgtagcagattcttggctaaagcagctaagggtccaccaccatgacttcacctacttcaccactactactcattatctttgatatatgtagtgttttagatcattacttggttaacagtctatttagctttgttgtttaagagtagcacatatcaataatgttggattgttgttacttgggactctttgggaaggataggtactgactttttcttcacaagacttttatatcataaatttagtttggggtcagattgatgatgatgggctcaatacatttattcttttctaatgttttgtggctttctgtttgtacaaacgcacgttctcttgattttggtatccttctctttttaacaattttctaaatttcataacaaaaaagaagaagatatatacagagatatatattgattt

SEQ ID NO: 84168 - protein, 263 aa, Arabidopsis thaliana
  peptide (1)..(263): Ceres Seq. ID no. 12673501
  misc_feature (1)..(256): Pfam Name: Protein of unknown function (DUF789) Pfam Description: Protein of unknown function (DUF789)
  misc_feature (1)..(263): Homolog of NCBI NO: 19310572 NR Description: unknown protein [Arabidopsis thaliana]
  misc_feature (6)..(263): Homolog of NCBI NO: 18417136 NR Description: putative protein; protein id: At4g28150.1, by cDNA: 7221. [Arabidopsis thaliana] >gi|26983868|gb|AAN86186.1|
  misc_feature (6)..(263): Homolog of NCBI NO: 21594686 NR Description: unknown [Arabidopsis thaliana]
  misc_feature (8)..(263): Homolog of NCBI NO: 30687867 NR Description: expressed protein [Arabidopsis thaliana]
  misc_feature (6)..(199): Homolog of NCBI NO: 7486201 NR Description: hypothetical protein F26K10.30 - Arabidopsis >gi|7269669|emb|CAB79617.1| putative protein [Arabidopsis
  misc_feature (6)..(256): Homolog of NCBI NO: 18379117 NR Description: expressed protein; protein id: At1g03610.1, by cDNA: 123030., supported by cDNA: gi_18958012 [Arabidopsis
  misc_feature (6)..(256): Homolog of NCBI NO: 18958013 NR Description: At1g03610/F21B7_13 [Arabidopsis thaliana]
  misc_feature (6)..(227): Homolog of NCBI NO: 22328289 NR Description: hypothetical protein; protein id: At4g03420.1, by cDNA: gi_18650615, supported by cDNA: gi_20453246 [Arabidopsis >gi|18650616|gb|AAL75907.1| AT4g03420/F9H3_4 [Arabidopsis
  misc_feature (6)..(227): Homolog of NCBI NO: 25373431 NR Description: hypothetical protein AT4g03420 [imported] - thaliana >gi|4206196|gb|AAD11584.1|AAD11584 hypothetical protein thaliana] >gi|7270212|emb|CAB77827.1| hypothetical protein
  misc_feature (6)..(227): Homolog of NCBI NO: 9280648 NR Description: F21B7.22 [Arabidopsis thaliana]
LCVFWQTQIKNLNPLWYPLESQSVEYFRLGDFWDCFDEWSAYGAGVPIVSETGETLVQYYVPYLSAIQIFTSHSVINTLREETESGDSGSESCSEEWRWEGCSSSEEGFDHQEPLDRLGYSYLQYFERCTPYSRVPLMDKIKELGERYVGLRSLRSVDLSPASWMAVAWYPIYHIPMNRSIKDLSTCFLTYHTLSSSFQDVKREEEKERISVSAFGMATYKMQGRLWDNDRLLCFLSVADSWLKQLRVHHHDFTYFTTTTHYL

SEQ ID NO: 84169 - protein, 149 aa, Arabidopsis thaliana
  peptide (1)..(149): Ceres Seq. ID no. 12673502
NCVFFGRHRSRTLILYGIRWRARASSISGWEIFGIVSTSGVLTVQVSPLYRKRAKHWSNTMFLTSLQSRFSPLILLSILLGRRQNQGIQGASRVARSGDGKDVLRLKKGLIIKNLSIASVTLTCSISRDVHLTLESLSWIRSKSWEKDT

SEQ ID NO: 84170 - DNA, 2053 bp, Arabidopsis thaliana
  misc_feature (1)..(2053): Ceres Seq. ID no. 12673554
  misc_feature: MA Experiment ID: 20000182 Result: Up-regulated in Transcription
  misc_feature: MA Experiment 20000182 PARAMETER Experiment Name: At_2mM_SA_P Parameter: Age (day) Value: 14
  misc_feature: MA Experiment 20000182 PARAMETER Experiment Name: At_2mM_SA_P Parameter: Organism Value: A. thaliana
  misc_feature: MA Experiment 20000182 PARAMETER Experiment Name: At_2mM_SA_P Parameter: Plant Line Value: WS
  misc_feature: MA Experiment 20000182 PARAMETER Experiment Name: At_2mM_SA_P Parameter: Timepoint (hr) Value: 6
  misc_feature: MA Experiment 20000182 PARAMETER Experiment Name: At_2mM_SA_P Parameter: Tissue Value: Aerial
  misc_feature: MA Experiment 20000182 PARAMETER Experiment Name: At_2mM_SA_P Parameter: Treatment Value: 2mM SA vs. No Treatment
  misc_feature: MA Experiment ID: 20000184 Result: Down-regulated in Transcription
  misc_feature: MA Experiment 20000184 PARAMETER Experiment Name: At_Shoots__P Parameter: Age (day) Value: 7
  misc_feature: MA Experiment 20000184 PARAMETER Experiment Name: At_Shoots__P Parameter: Tissue Value: Shoots vs. Whole Plant
  misc_feature: MA Experiment ID: 20000185 Result: Down-regulated in Transcription
  misc_feature: MA Experiment 20000185 PARAMETER Experiment Name: At_Roots__P Parameter: Age (day) Value: 7 vs. 21
  misc_feature: MA Experiment 20000185 PARAMETER Experiment Name: At_Roots__P Parameter: Organism Value: A. thaliana
  misc_feature: MA Experiment 20000185 PARAMETER Experiment Name: At_Roots__P Parameter: Tissue Value: Roots vs. Whole Plant
  misc_feature: MA Experiment ID: 20000213 Result: Up-regulated in Transcription
  misc_feature: MA Experiment 20000213 PARAMETER Experiment Name: At_4deg_Cold_P Parameter: Timepoint (hr) Value: 2
  misc_feature: MA Experiment ID: 20000234 Result: Down-regulated in Transcription
  misc_feature: MA Experiment 20000234 PARAMETER Experiment Name: At_Siliques_P Parameter: Age (day) Value: 21
  misc_feature: MA Experiment 20000234 PARAMETER Experiment Name: At_Siliques_P Parameter: Organism Value: A. thaliana
  misc_feature: MA Experiment 20000234 PARAMETER Experiment Name: At_Siliques_P Parameter: Plant Line Value: WS
  misc_feature: MA Experiment 20000234 PARAMETER Experiment Name: At_Siliques_P Parameter: Tissue Value: Less Than 5mm Siliques vs. Whole Plant
  misc_feature: MA Experiment ID: 20000235 Result: Down-regulated in Transcription
  misc_feature: MA Experiment 20000235 PARAMETER Experiment Name: At_Siliques_P Parameter: Age (day) Value: 21
  misc_feature: MA Experiment 20000235 PARAMETER Experiment Name: At_Siliques_P Parameter: Organism Value: A. thaliana
  misc_feature: MA Experiment 20000235 PARAMETER Experiment Name: At_Siliques_P Parameter: Plant Line Value: WS
  misc_feature: MA Experiment 20000235 PARAMETER Experiment Name: At_Siliques_P Parameter: Tissue Value: 5-10mm Siliques vs. Whole Plant
  misc_feature: MA Experiment ID: 20000264 Result: Down-regulated in Transcription
  misc_feature: MA Experiment 20000264 PARAMETER Experiment Name: At_Open_Flower_P Parameter: Age (day) Value: 21
  misc_feature: MA Experiment 20000264 PARAMETER Experiment Name: At_Open_Flower_P Parameter: Plant Line Value: WS
  misc_feature: MA Experiment 20000264 PARAMETER Experiment Name: At_Open_Flower_P Parameter: Tissue Value: Open Flower vs. Whole Plant
  misc_feature: MA Experiment ID: 20000265 Result: Down-regulated in Transcription
  misc_feature: MA Experiment 20000265 PARAMETER Experiment Name: At_Open_Flower_P Parameter: Age (day) Value: 21
  misc_feature: MA Experiment 20000265 PARAMETER Experiment Name: At_Open_Flower_P Parameter: Plant Line Value: WS
  misc_feature: MA Experiment 20000265 PARAMETER Experiment Name: At_Open_Flower_P Parameter: Tissue Value: Closed Flower vs. Whole Plant
  misc_feature: MA Experiment ID: 20000286 Result: Down-regulated in Transcription
  misc_feature: MA Experiment 20000286 PARAMETER Experiment Name: At_Open_Flower_P Parameter: Age (day) Value: 21
  misc_feature: MA Experiment 20000286 PARAMETER Experiment Name: At_Open_Flower_P Parameter: Plant Line Value: WS
  misc_feature: MA Experiment 20000286 PARAMETER Experiment Name: At_Open_Flower_P Parameter: Tissue Value: Half Open vs. Whole Plant
  misc_feature: MA Experiment ID: 20000438 Result: Down-regulated in Transcription
  misc_feature: MA Experiment 20000438 PARAMETER Experiment Name: At_Shoots__P Parameter: Age (day) Value: 14
  misc_feature: MA Experiment 20000438 PARAMETER Experiment Name: At_Shoots__P Parameter: Tissue Value: Shoots vs. Whole Plant
  misc_feature: MA Experiment ID: 20000439 Result: Down-regulated in Transcription
  misc_feature: MA Experiment 20000439 PARAMETER Experiment Name: At_Roots__P Parameter: Age (day) Value: 14 vs. 21
  misc_feature: MA Experiment 20000439 PARAMETER Experiment Name: At_Roots__P Parameter: Organism Value: A. thaliana
  misc_feature: MA Experiment 20000439 PARAMETER Experiment Name: At_Roots__P Parameter: Tissue Value: Roots vs. Whole Plant
  misc_feature: MA Experiment ID: 20000451 Result: Down-regulated in Transcription
  misc_feature: MA Experiment 20000451 PARAMETER Experiment Name: At_CS6879_Shoots-Roots_P Parameter: Age (day) Value: 14
  misc_feature: MA Experiment 20000451 PARAMETER Experiment Name: At_CS6879_Shoots-Roots_P Parameter: Organism Value: A. thaliana
  misc_feature: MA Experiment 20000451 PARAMETER Experiment Name: At_CS6879_Shoots-Roots_P Parameter: Plant Line Value: CS6879 vs. WS
  misc_feature: MA Experiment 20000451 PARAMETER Experiment Name: At_CS6879_Shoots-Roots_P Parameter: Tissue Value: Roots
aataataatggctttgcttttactctgatgacaagttcaaaaatggaacaaagatcactcctttgcttcctttatctgctcctactattcaatttcactctcagagtcgctggaaacgctgaaggtgatgctttgactcagctgaaaaacagtttgtcatcaggtgaccctgcaaacaatgtactccaaagctgggatgctactcttgttactccatgtacttggtttcatgttacttgcaatcctgagaataaagttactcgtgttgaccttgggaatgcaaaactatctggaaagttggttccagaacttggtcagcttttaaacttgcagtacttggagctttatagcaataacattacaggggagatacctgaggagcttggcgacttggtggaactagtaagcttggatctttacgcaaacagcataagcggtcccatcccttcgtctcttggcaaactaggaaaactccggttcttgcgtcttaacaacaatagcttatcaggggaaattccaatgactttgacttctgtgcagctgcaagttctggatatctcaaacaatcggctcagtggagatattcctgttaatggttctttttcgctcttcactcctatcagttttgcgaataatagcttaacggatcttcccgaacctccgcctacttctacctctcctacgccaccaccaccttcaggggggcaaatgactgcagcaatagcagggggagttgctgcaggtgcagcacttctatttgctgttccagccattgcgtttgcttggtggctcagaagaaaaccacaggaccacttttttgatgtacctgctgaagaagacccagaggttcatttaggacaactcaaaaggtttaccttgcgtgaactgttagttgctactgataactttagcaataaaaatgtattgggtagaggtggttttggtaaagtgtataaaggacgtttagccgatggcaatctagtggctgtcaaaaggctaaaagaagaacgtaccaagggtggggaactgcagtttcaaaccgaagttgagatgatcagtatggccgttcataggaacttgcttcggcttcgtggcttttgcatgactccaactgaaagattacttgtttatccctacatggctaatggaagtgttgcttcttgtttaagagagcgtcctgaaggcaatccagcacttgattggccaaaaagaaagcatattgctctgggatcagcaagggggcttgcgtatttacatgatcattgcgaccaaaaaatcattcaccgggatgttaaagctgctaatatattgttagatgaagagtttgaagctgttgttggagattttgggctcgcaaaattaatgaattataatgactcccatgtgacaactgctgtacgcggtacaattggccatatagcgcccgagtacctctcgacaggaaaatcttctgagaagactgatgtttttgggtacggggtcatgcttctcgagctcatcactggacaaaaggctttcgatcttgctcggcttgcaaatgatgatgatatcatgttactcgactgggtgaaagaggttttgaaagagaagaagttggaaagccttgtggatgcagaactcgaaggaaagtacgtggaaacagaagtggagcagctgatacaaatggctctgctctgcactcaaagttctgcaatggaacgtccaaagatgtcagaagtagtgagaatgctggaaggagatggtttagctgagagatgggaagaatggcaaaaggaggagatgccaatacatgattttaactatcaagcctatcctcatgctggcactgactggctcatcccctattccaattcccttatcgaaaacgattacccctcgggtccaagataaccttttagaaagggtcttttcttgtgggttcttcaacaagtatatatatagattggtgaagttttaagatgcaaaaaaaacccatgcacttttgaatatcaactcctctataagtagttttgtgtctcttgacgaataaagaatatcattactccacttgagc

SEQ ID NO: 84171 - protein, 629 aa, Arabidopsis thaliana
  peptide (1)..(629): Ceres Seq. ID no. 12673555
  misc_feature (15)..(629): Homolog of NCBI NO: 18418211 NR Description: somatic embryogenesis receptor-like kinase -like protein id: At4g33430.1, supported by cDNA: gi_14573458
  misc_feature (15)..(629): Homolog of NCBI NO: 14573459 NR Description: somatic embryogenesis receptor-like kinase 3
  misc_feature (10)..(629): Homolog of NCBI NO: 24935324 NR Description: somatic embryogenesis receptor kinase 1 [Medicago >gi|24935326|gb|AAN64294.1| somatic embryogenesis receptor kinase
  misc_feature (10)..(629): Homolog of NCBI NO: 15218543 NR Description: somatic embryogenesis receptor-like kinase, protein id: At1g34210.1, supported by cDNA: gi_14573456
  misc_feature (10)..(629): Homolog of NCBI NO: 14573457 NR Description: somatic embryogenesis receptor-like kinase 2
  misc_feature (24)..(629): Homolog of NCBI NO: 15217584 NR Description: protein kinase, putative; protein id:
  misc_feature (24)..(629): Homolog of NCBI NO: 15081616 NR Description: At1g71830/F14O23_24 [Arabidopsis thaliana]
  misc_feature (35)..(629): Homolog of NCBI NO: 13897310 NR Description: SERK2 protein [Zea mays]
  misc_feature (36)..(629): Homolog of NCBI NO: 13897308 NR Description: SERK1 protein [Zea mays]
  misc_feature (277)..(629): Homolog of NCBI NO: 25411516 NR Description: probable receptor-like protein kinase [imported] -
NNNGFAFTLMTSSKMEQRSLLCFLYLLLLFNFTLRVAGNAEGDALTQLKNSLSSGDPANNVLQSWDATLVTPCTWFHVTCNPENKVTRVDLGNAKLSGKLVPELGQLLNLQYLELYSNNITGEIPEELGDLVELVSLDLYANSISGPIPSSLGKLGKLRFLRLNNNSLSGEIPMTLTSVQLQVLDISNNRLSGDIPVNGSFSLFTPISFANNSLTDLPEPPPTSTSPTPPPPSGGQMTAAIAGGVAAGAALLFAVPAIAFAWWLRRKPQDHFFDVPAEEDPEVHLGQLKRFTLRELLVATDNFSNKNVLGRGGFGKVYKGRLADGNLVAVKRLKEERTKGGELQFQTEVEMISMAVHRNLLRLRGFCMTPTERLLVYPYMANGSVASCLRERPEGNPALDWPKRKHIALGSARGLAYLHDHCDQKIIHRDVKAANILLDEEFEAVVGDFGLAKLMNYNDSHVTTAVRGTIGHIAPEYLSTGKSSEKTDVFGYGVMLLELITGQKAFDLARLANDDDIMLLDWVKEVLKEKKLESLVDAELEGKYVETEVEQLIQMALLCTQSSAMERPKMSEVVRMLEGDGLAERWEEWQKEEMPIHDFNYQAYPHAGTDWLIPYSNSLIENDYPSGPR

SEQ ID NO: 84172 - protein, 620 aa, Arabidopsis thaliana
  peptide (1)..(620): Ceres Seq. ID no. 12673556
  misc_feature (6)..(620): Homolog of NCBI NO: 18418211 NR Description: somatic embryogenesis receptor-like kinase -like protein id: At4g33430.1, supported by cDNA: gi_14573458
  misc_feature (6)..(620): Homolog of NCBI NO: 14573459 NR Description: somatic embryogenesis receptor-like kinase 3
  misc_feature (1)..(620): Homolog of NCBI NO: 24935324 NR Description: somatic embryogenesis receptor kinase 1 [Medicago >gi|24935326|gb|AAN64294.1| somatic embryogenesis receptor kinase
  misc_feature (1)..(620): Homolog of NCBI NO: 15218543 NR Description: somatic embryogenesis receptor-like kinase, protein id: At1g34210.1, supported by cDNA: gi_14573456
  misc_feature (1)..(620): Homolog of NCBI NO: 14573457 NR Description: somatic embryogenesis receptor-like kinase 2
  misc_feature (15)..(620): Homolog of NCBI NO: 15217584 NR Description: protein kinase, putative; protein id:
  misc_feature (15)..(620): Homolog of NCBI NO: 15081616 NR Description: At1g71830/F14O23_24 [Arabidopsis thaliana]
  misc_feature (26)..(620): Homolog of NCBI NO: 13897310 NR Description: SERK2 protein [Zea mays]
  misc_feature (27)..(620): Homolog of NCBI NO: 13897308 NR Description: SERK1 protein [Zea mays]
  misc_feature (268)..(620): Homolog of NCBI NO: 25411516 NR Description: probable receptor-like protein kinase [imported] -
MTSSKMEQRSLLCFLYLLLLFNFTLRVAGNAEGDALTQLKNSLSSGDPANNVLQSWDATLVTPCTWFHVTCNPENKVTRVDLGNAKLSGKLVPELGQLLNLQYLELYSNNITGEIPEELGDLVELVSLDLYANSISGPIPSSLGKLGKLRFLRLNNNSLSGEIPMTLTSVQLQVLDISNNRLSGDIPVNGSFSLFTPISFANNSLTDLPEPPPTSTSPTPPPPSGGQMTAAIAGGVAAGAALLFAVPAIAFAWWLRRKPQDHFFDVPAEEDPEVHLGQLKRFTLRELLVATDNFSNKNVLGRGGFGKVYKGRLADGNLVAVKRLKEERTKGGELQFQTEVEMISMAVHRNLLRLRGFCMTPTERLLVYPYMANGSVASCLRERPEGNPALDWPKRKHIALGSARGLAYLHDHCDQKIIHRDVKAANILLDEEFEAVVGDFGLAKLMNYNDSHVTTAVRGTIGHIAPEYLSTGKSSEKTDVFGYGVMLLELITGQKAFDLARLANDDDIMLLDWVKEVLKEKKLESLVDAELEGKYVETEVEQLIQMALLCTQSSAMERPKMSEVVRMLEGDGLAERWEEWQKEEMPIHDFNYQAYPHAGTDWLIPYSNSLIENDYPSGPR

SEQ ID NO: 84173 - protein, 615 aa, Arabidopsis thaliana
  peptide (1)..(615): Ceres Seq. ID no. 12673557
  misc_feature (1)..(615): Homolog of NCBI NO: 18418211 NR Description: somatic embryogenesis receptor-like kinase -like protein id: At4g33430.1, supported by cDNA: gi_14573458
  misc_feature (1)..(615): Homolog of NCBI NO: 14573459 NR Description: somatic embryogenesis receptor-like kinase 3
  misc_feature (1)..(615): Homolog of NCBI NO: 24935324 NR Description: somatic embryogenesis receptor kinase 1 [Medicago >gi|24935326|gb|AAN64294.1| somatic embryogenesis receptor kinase
  misc_feature (1)..(615): Homolog of NCBI NO: 15218543 NR Description: somatic embryogenesis receptor-like kinase, protein id: At1g34210.1, supported by cDNA: gi_14573456
  misc_feature (1)..(615): Homolog of NCBI NO: 14573457 NR Description: somatic embryogenesis receptor-like kinase 2
  misc_feature (10)..(615): Homolog of NCBI NO: 15217584 NR Description: protein kinase, putative; protein id:
  misc_feature (10)..(615): Homolog of NCBI NO: 15081616 NR Description: At1g71830/F14O23_24 [Arabidopsis thaliana]
  misc_feature (21)..(615): Homolog of NCBI NO: 13897310 NR Description: SERK2 protein [Zea mays]
  misc_feature (22)..(615): Homolog of NCBI NO: 13897308 NR Description: SERK1 protein [Zea mays]
  misc_feature (263)..(615): Homolog of NCBI NO: 25411516 NR Description: probable receptor-like protein kinase [imported] -
MEQRSLLCFLYLLLLFNFTLRVAGNAEGDALTQLKNSLSSGDPANNVLQSWDATLVTPCTWFHVTCNPENKVTRVDLGNAKLSGKLVPELGQLLNLQYLELYSNNITGEIPEELGDLVELVSLDLYANSISGPIPSSLGKLGKLRFLRLNNNSLSGEIPMTLTSVQLQVLDISNNRLSGDIPVNGSFSLFTPISFANNSLTDLPEPPPTSTSPTPPPPSGGQMTAAIAGGVAAGAALLFAVPAIAFAWWLRRKPQDHFFDVPAEEDPEVHLGQLKRFTLRELLVATDNFSNKNVLGRGGFGKVYKGRLADGNLVAVKRLKEERTKGGELQFQTEVEMISMAVHRNLLRLRGFCMTPTERLLVYPYMANGSVASCLRERPEGNPALDWPKRKHIALGSARGLAYLHDHCDQKIIHRDVKAANILLDEEFEAVVGDFGLAKLMNYNDSHVTTAVRGTIGHIAPEYLSTGKSSEKTDVFGYGVMLLELITGQKAFDLARLANDDDIMLLDWVKEVLKEKKLESLVDAELEGKYVETEVEQLIQMALLCTQSSAMERPKMSEVVRMLEGDGLAERWEEWQKEEMPIHDFNYQAYPHAGTDWLIPYSNSLIENDYPSGPR

SEQ ID NO: 84174 - DNA, 1441 bp, Arabidopsis thaliana
  misc_feature (1)..(1441): Ceres Seq. ID no. 12673569
  misc_feature: MA Experiment ID: 20000306 Result: Up-regulated in Transcription
  misc_feature: MA Experiment 20000306 PARAMETER Experiment Name: At_Germinating_Seeds_Sub_P Parameter: Age (hr) Value: 6 vs. 0
  misc_feature: MA Experiment 20000306 PARAMETER Experiment Name: At_Germinating_Seeds_Sub_P Parameter: Organism Value: A. thaliana
  misc_feature: MA Experiment 20000306 PARAMETER Experiment Name: At_Germinating_Seeds_Sub_P Parameter: Plant Line Value: WS
  misc_feature: MA Experiment 20000306 PARAMETER Experiment Name: At_Germinating_Seeds_Sub_P Parameter: Tissue Value: Germinating Seeds
  misc_feature: MA Experiment ID: 20000315 Result: Down-regulated in Transcription
  misc_feature: MA Experiment 20000315 PARAMETER Experiment Name: At_14day_Shoots-Roots_Sub_P Parameter: Age (day) Value: 14
  misc_feature: MA Experiment 20000315 PARAMETER Experiment Name: At_14day_Shoots-Roots_Sub_P Parameter: Organism Value: A. thaliana
  misc_feature: MA Experiment 20000315 PARAMETER Experiment Name: At_14day_Shoots-Roots_Sub_P Parameter: Plant Line Value: WS
  misc_feature: MA Experiment 20000315 PARAMETER Experiment Name: At_14day_Shoots-Roots_Sub_P Parameter: Tissue Value: Shoots vs. Whole Plant
  misc_feature: MA Experiment ID: 20000346 Result: Up-regulated in Transcription
  misc_feature: MA Experiment 20000346 PARAMETER Experiment Name: At_2mM_SA_Sub_P Parameter: Age (day) Value: 14
  misc_feature: MA Experiment 20000346 PARAMETER Experiment Name: At_2mM_SA_Sub_P Parameter: Organism Value: A. thaliana
  misc_feature: MA Experiment 20000346 PARAMETER Experiment Name: At_2mM_SA_Sub_P Parameter: Plant Line Value: WS
  misc_feature: MA Experiment 20000346 PARAMETER Experiment Name: At_2mM_SA_Sub_P Parameter: Timepoint (hr) Value: 1
  misc_feature: MA Experiment 20000346 PARAMETER Experiment Name: At_2mM_SA_Sub_P Parameter: Tissue Value: Aerial
  misc_feature: MA Experiment 20000346 PARAMETER Experiment Name: At_2mM_SA_Sub_P Parameter: Treatment Value: 2mM SA vs. No Treatment
  misc_feature: MA Experiment ID: 20000355 Result: Up-regulated in Transcription
  misc_feature: MA Experiment 20000355 PARAMETER Experiment Name: At_Siliques_Sub_P Parameter: Age (day) Value: 21
  misc_feature: MA Experiment 20000355 PARAMETER Experiment Name: At_Siliques_Sub_P Parameter: Organism Value: A. thaliana
  misc_feature: MA Experiment 20000355 PARAMETER Experiment Name: At_Siliques_Sub_P Parameter: Plant Line Value: WS
  misc_feature: MA Experiment 20000355 PARAMETER Experiment Name: At_Siliques_Sub_P Parameter: Tissue Value: Less Than 5mm Siliques vs. Whole Plant
  misc_feature: MA Experiment ID: 20000440 Result: Up-regulated in Transcription
  misc_feature: MA Experiment 20000440 PARAMETER Experiment Name: At_Closed-Flower__Sub_P Parameter: Tissue Value: Closed Flower vs. Whole Plant
atggcggtggaatatgaatgctgcgggaccagcttcttcatacacatcgctgtgatagtgttactagtcttgttcgctggactaatgtctggtcttactttgggtcttatgtctatgagtctcgttgatcttgaggttcttgctaaatccggtactcccagagatcgtatccatgctgcaaagattttaccagttgtgaaaaatcagcatcttttgctttgtactttactgatatgtaatgcagctgctatggaggcgcttcctatatttcttgatgctcttgtgacggcttggggtgccattttgatttcagtgacgctaattcttctctttggtgagatcatacctcagtcagtctgttctcgtcatggtttagctattggtgcaacagtggctccatttgttcgtgttctagtttggatctgcttaccagttgcatggccgattagtaagctgctagactttctacttggtcatggtcgtgtagctcttttccgaagagctgagctgaaaacacttgtggatttgcatggaaatgaggctggtaaaggtggagaattgacacatgatgaaacaacaatcattgctggagctcttgaactatctgagaaaatggctaaagatgcaatgacaccaatttctgacacttttgtgattgatatcaatgccaaactagacagggatttgatgaatttgattcttgataaaggtcatagcagagtcccagtatactatgagcaacgtaccaacataattggacttgttttggtgaagaacttattgactatcaatccagatgaagaaatacaagtaaaaaatgtgactatacgaagaatcccaagagttccagaaacgttaccgttatatgatatattaaacgagttccagaaaggacatagccacatggctgttgttgtgagacagtgtgacaaaatccacccgttacagagtaatgatgctgcaaacgagactgtaaatgaagtcagagtggatgtggattatgagagatccccacaggaaacgaagttaaagagaaggagatcattacagaaatggaagagctttccaaaccgagcaaattcgttagggtcgaggagcaagaggtggtccaaagataatgatgctgatattctgcaacttaacgaacatccacttccaaagctagatgaggaggaagatgctgttggtatcattacaatggaagatgtcattgaagaacttttacaggaagagatattcgatgagacggatcatcattttgaagacttgtgacaggccacaacttcgagtgcttaatattagttgtttgaaccatgtacatggtgctatatacctcagaagatccaatttccactggacaagttttgttgcgaaagagtcatgtataaaagtaagatcatatgtcatgtaataacactgcttcgtgtatagttatttccct

SEQ ID NO: 84175 - protein, 423 aa, Arabidopsis thaliana
  peptide (1)..(423): Ceres Seq. ID no. 12673570
  misc_feature (14)..(191): Pfam Name: Domain of unknown function DUF21 Pfam Description: Domain of unknown function DUF21
  misc_feature (1)..(423): Homolog of NCBI NO: 30679136 NR Description: CBS domain containing protein [Arabidopsis
  misc_feature (180)..(409): Homolog of NCBI NO: 25411569 NR Description: hypothetical protein At2g14520 [imported] - thaliana >gi|4263821|gb|AAD15464.1| hypothetical protein
  misc_feature (1)..(151): Homolog of NCBI NO: 25411569 NR Description: hypothetical protein At2g14520 [imported] - thaliana >gi|4263821|gb|AAD15464.1| hypothetical protein
  misc_feature (1)..(422): Homolog of NCBI NO: 22329131 NR Description: putative protein; protein id: At4g33700.1, by cDNA: gi_17381275, supported by cDNA: gi_20856057 [Arabidopsis >gi|17381276|gb|AAL36056.1| AT4g33700/T16L1_190 [Arabidopsis
  misc_feature (29)..(422): Homolog of NCBI NO: 7487085 NR Description: hypothetical protein T16L1.190 - Arabidopsis >gi|3549672|emb|CAA20583.1| putative protein [Arabidopsis >gi|7270319|emb|CAB80087.1| putative protein [Arabidopsis
  misc_feature (1)..(422): Homolog of NCBI NO: 40538933 NR Description: expressed protein [Oryza sativa (japonica
  misc_feature (1)..(342): Homolog of NCBI NO: 22330087 NR Description: unknown protein; protein id: At1g47330.1, by cDNA: gi_19715639 [Arabidopsis thaliana] At1g47330/T3F24_2 [Arabidopsis thaliana]
  misc_feature (358)..(419): Homolog of NCBI NO: 22330087 NR Description: unknown protein; protein id: At1g47330.1, by cDNA: gi_19715639 [Arabidopsis thaliana] At1g47330/T3F24_2 [Arabidopsis thaliana]
  misc_feature (1)..(257): Homolog of NCBI NO: 12039276 NR Description: putative ancient conserved domain protein [Oryza
  misc_feature (2)..(306): Homolog of NCBI NO: 15237264 NR Description: putative protein; protein id: At5g52790.1 thaliana] >gi|8953734|dbj|BAA98097.1|
MAVEYECCGTSFFIHIAVIVLLVLFAGLMSGLTLGLMSMSLVDLEVLAKSGTPRDRIHAAKILPVVKNQHLLLCTLLICNAAAMEALPIFLDALVTAWGAILISVTLILLFGEIIPQSVCSRHGLAIGATVAPFVRVLVWICLPVAWPISKLLDFLLGHGRVALFRRAELKTLVDLHGNEAGKGGELTHDETTIIAGALELSEKMAKDAMTPISDTFVIDINAKLDRDLMNLILDKGHSRVPVYYEQRTNIIGLVLVKNLLTINPDEEIQVKNVTIRRIPRVPETLPLYDILNEFQKGHSHMAVVVRQCDKIHPLQSNDAANETVNEVRVDVDYERSPQETKLKRRRSLQKWKSFPNRANSLGSRSKRWSKDNDADILQLNEHPLPKLDEEEDAVGIITMEDVIEELLQEEIFDETDHHFEDL

SEQ ID NO: 84176 - protein, 395 aa, Arabidopsis thaliana
  peptide (1)..(395): Ceres Seq. ID no. 12673571
  misc_feature (1)..(163): Pfam Name: Domain of unknown function DUF21 Pfam Description: Domain of unknown function DUF21
  misc_feature (1)..(395): Homolog of NCBI NO: 30679136 NR Description: CBS domain containing protein [Arabidopsis
  misc_feature (152)..(381): Homolog of NCBI NO: 25411569 NR Description: hypothetical protein At2g14520 [imported] - thaliana >gi|4263821|gb|AAD15464.1| hypothetical protein
  misc_feature (1)..(123): Homolog of NCBI NO: 25411569 NR Description: hypothetical protein At2g14520 [imported] - thaliana >gi|4263821|gb|AAD15464.1| hypothetical protein
  misc_feature (1)..(394): Homolog of NCBI NO: 22329131 NR Description: putative protein; protein id: At4g33700.1, by cDNA: gi_17381275, supported by cDNA: gi_20856057 [Arabidopsis >gi|17381276|gb|AAL36056.1| AT4g33700/T16L1_190 [Arabidopsis
  misc_feature (1)..(394): Homolog of NCBI NO: 7487085 NR Description: hypothetical protein T16L1.190 - Arabidopsis >gi|3549672|emb|CAA20583.1| putative protein [Arabidopsis >gi|7270319|emb|CAB80087.1| putative protein [Arabidopsis
  misc_feature (1)..(394): Homolog of NCBI NO: 40538933 NR Description: expressed protein [Oryza sativa (japonica
  misc_feature (1)..(314): Homolog of NCBI NO: 22330087 NR Description: unknown protein; protein id: At1g47330.1, by cDNA: gi_19715639 [Arabidopsis thaliana] At1g47330/T3F24_2 [Arabidopsis thaliana]
  misc_feature (330)..(391): Homolog of NCBI NO: 22330087 NR Description: unknown protein; protein id: At1g47330.1, by cDNA: gi_19715639 [Arabidopsis thaliana] At1g47330/T3F24_2 [Arabidopsis thaliana]
  misc_feature (1)..(229): Homolog of NCBI NO: 12039276 NR Description: putative ancient conserved domain protein [Oryza
  misc_feature (1)..(278): Homolog of NCBI NO: 15237264 NR Description: putative protein; protein id: At5g52790.1 thaliana] >gi|8953734|dbj|BAA98097.1|
MSGLTLGLMSMSLVDLEVLAKSGTPRDRIHAAKILPVVKNQHLLLCTLLICNAAAMEALPIFLDALVTAWGAILISVTLILLFGEIIPQSVCSRHGLAIGATVAPFVRVLVWICLPVAWPISKLLDFLLGHGRVALFRRAELKTLVDLHGNEAGKGGELTHDETTIIAGALELSEKMAKDAMTPISDTFVIDINAKLDRDLMNLILDKGHSRVPVYYEQRTNIIGLVLVKNLLTINPDEEIQVKNVTIRRIPRVPETLPLYDILNEFQKGHSHMAVVVRQCDKIHPLQSNDAANETVNEVRVDVDYERSPQETKLKRRRSLQKWKSFPNRANSLGSRSKRWSKDNDADILQLNEHPLPKLDEEEDAVGIITMEDVIEELLQEEIFDETDHHFEDL

SEQ ID NO: 84177 - protein, 387 aa, Arabidopsis thaliana
  peptide (1)..(387): Ceres Seq. ID no. 12673572
  misc_feature (1)..(155): Pfam Name: Domain of unknown function DUF21 Pfam Description: Domain of unknown function DUF21
  misc_feature (1)..(387): Homolog of NCBI NO: 30679136 NR Description: CBS domain containing protein [Arabidopsis
  misc_feature (144)..(373): Homolog of NCBI NO: 25411569 NR Description: hypothetical protein At2g14520 [imported] - thaliana >gi|4263821|gb|AAD15464.1| hypothetical protein
  misc_feature (1)..(115): Homolog of NCBI NO: 25411569 NR Description: hypothetical protein At2g14520 [imported] - thaliana >gi|4263821|gb|AAD15464.1| hypothetical protein
  misc_feature (1)..(386): Homolog of NCBI NO: 22329131 NR Description: putative protein; protein id: At4g33700.1, by cDNA: gi_17381275, supported by cDNA: gi_20856057 [Arabidopsis >gi|17381276|gb|AAL36056.1| AT4g33700/T16L1_190 [Arabidopsis
  misc_feature (1)..(386): Homolog of NCBI NO: 7487085 NR Description: hypothetical protein T16L1.190 - Arabidopsis >gi|3549672|emb|CAA20583.1| putative protein [Arabidopsis >gi|7270319|emb|CAB80087.1| putative protein [Arabidopsis
  misc_feature (1)..(386): Homolog of NCBI NO: 40538933 NR Description: expressed protein [Oryza sativa (japonica
  misc_feature (1)..(306): Homolog of NCBI NO: 22330087 NR Description: unknown protein; protein id: At1g47330.1, by cDNA: gi_19715639 [Arabidopsis thaliana] At1g47330/T3F24_2 [Arabidopsis thaliana]
  misc_feature (322)..(383): Homolog of NCBI NO: 22330087 NR Description: unknown protein; protein id: At1g47330.1, by cDNA: gi_19715639 [Arabidopsis thaliana] At1g47330/T3F24_2 [Arabidopsis thaliana]
  misc_feature (1)..(221): Homolog of NCBI NO: 12039276 NR Description: putative ancient conserved domain protein [Oryza
  misc_feature (1)..(270): Homolog of NCBI NO: 15237264 NR Description: putative protein; protein id: At5g52790.1 thaliana] >gi|8953734|dbj|BAA98097.1|
MSMSLVDLEVLAKSGTPRDRIHAAKILPVVKNQHLLLCTLLICNAAAMEALPIFLDALVTAWGAILISVTLILLFGEIIPQSVCSRHGLAIGATVAPFVRVLVWICLPVAWPISKLLDFLLGHGRVALFRRAELKTLVDLHGNEAGKGGELTHDETTIIAGALELSEKMAKDAMTPISDTFVIDINAKLDRDLMNLILDKGHSRVPVYYEQRTNIIGLVLVKNLLTINPDEEIQVKNVTIRRIPRVPETLPLYDILNEFQKGHSHMAVVVRQCDKIHPLQSNDAANETVNEVRVDVDYERSPQETKLKRRRSLQKWKSFPNRANSLGSRSKRWSKDNDADILQLNEHPLPKLDEEEDAVGIITMEDVIEELLQEEIFDETDHHFEDL

SEQ ID NO: 84178 - DNA, 1218 bp, Arabidopsis thaliana
  misc_feature (1)..(1218): Ceres Seq. ID no. 12673588
  misc_feature: MA Experiment ID: 108595 Result: Up-regulated in Transcription
  misc_feature: MA Experiment 108595 PARAMETER Experiment Name: At_Ler-pi_Ovule_cDNA_P Parameter: Plant Line Value: null
  misc_feature: MA Experiment ID: 20001556 Result: Up-regulated in Transcription
  misc_feature: MA Experiment 20001556 PARAMETER Experiment Name: At_Drought_Soil_Dry_P Parameter: Age (day) Value: 26
  misc_feature: MA Experiment 20001556 PARAMETER Experiment Name: At_Drought_Soil_Dry_P Parameter: Organism Value: A. thaliana
  misc_feature: MA Experiment 20001556 PARAMETER Experiment Name: At_Drought_Soil_Dry_P Parameter: Plant Line Value: WS
  misc_feature: MA Experiment 20001556 PARAMETER Experiment Name: At_Drought_Soil_Dry_P Parameter: Post Timepoint (hr) Value: None
  misc_feature: MA Experiment 20001556 PARAMETER Experiment Name: At_Drought_Soil_Dry_P Parameter: Post-Treatment Value: None
  misc_feature: MA Experiment 20001556 PARAMETER Experiment Name: At_Drought_Soil_Dry_P Parameter: Timepoint (day) Value: 12
  misc_feature: MA Experiment 20001556 PARAMETER Experiment Name: At_Drought_Soil_Dry_P Parameter: Treatment Value: Drought vs. No Drought
atttcgtctttcattatttctatttttgttttgtcggacaaaaaataaaatgaagagcaacacaaacactaatctgattctcttccaccaccactctccactaacttcaaaatcaccctccgccgtcgccgccgcgaatcaccaccgtttcttattcatcttcttcctctctttcttcactctcctcttctctttctctctcttctcctcctcaatccactccaccacatcctctcactctctctcctcatctccctcctcctcctctcttccaccaccagtcctcgccgcacttctccactacacttcctcatcaccaccaaacacatctatgtcctttcttgaactctccaccatctccaacatcattcactctcatggcccagcttgtaacctcttaatctttggactaactcacgaatctcttctctggagatctatcaacttccaaggccgtactgttttcgttgatgagagtccttactctgtttctaaattcgaacagagtaaccctggagttgaagcttacgaggttgtttactcaactaaagtctctcaagctaagaagcttcttggttattacaagacccgacccgagtgtagacccgttcagaatcttttgttctctgattgtaaattgggtattaacgatttgcctaattttgtttatgagattgattgggatgtgattttgattgatgggcctcgtgggtatgcttctgattctccgggaaggatggctccgatctttacttctgcggttttagcaaaaagtaaagattttgggacgaagacgaagaagactgatgttcttgtacatgagtttgggagaaagattgagagagtgtacagtgaggagtttctatgtgaagagaatttgattgaagtggtcggagatttagggcattttgttgtggcggcggcggaggaaagagagagttatggtgatgggttttgtcggaattcgacgagattgtcggagagttttacggcggtgagtggtggcgatgaagaaaaagttggtgttgatgatgagtgaaaagtgggtttggttttttacttttggtggctcttttgtaattaaatttagcttttgaggtcttctttttttttgtttttgtttagtcttttacttcatttggtttttgaatttaggagaacggttacacttgaaagttaatatgtaactaaattccaaaaaaaaacaaatgttactct

SEQ ID NO: 84179 - protein, 345 aa, Arabidopsis thaliana
  peptide (1)..(345): Ceres Seq. ID no. 12673589
  misc_feature (73)..(319): Pfam Name: Protein of unknown function (DUF579) Pfam Description: Protein of unknown function (DUF579)
  misc_feature (17)..(345): Homolog of NCBI NO: 18397819 NR Description: expressed protein; protein id: At2g15440.1, by cDNA: 32729. [Arabidopsis thaliana] >gi|25354650|pir||A84529
  misc_feature (17)..(320): Homolog of NCBI NO: 15240242 NR Description: putative protein; protein id: At5g67210.1 thaliana] >gi|10177608|dbj|BAB10955.1| to unknown protein [Arabidopsis thaliana]
  misc_feature (20)..(328): Homolog of NCBI NO: 15229700 NR Description: putative protein; protein id: At3g50220.1, by cDNA: 35440. [Arabidopsis thaliana] >gi|11282604|pir||T45568
  misc_feature (20)..(328): Homolog of NCBI NO: 21593034 NR Description: unknown [Arabidopsis thaliana]
  misc_feature (41)..(328): Homolog of NCBI NO: 10241434 NR Description: putative protein [Oryza sativa (indica
  misc_feature (74)..(319): Homolog of NCBI NO: 18409879 NR Description: hypothetical protein; protein id: At1g71690.1
  misc_feature (74)..(319): Homolog of NCBI NO: 25354648 NR Description: hypothetical protein F14O23.3 [imported] - thaliana >gi|7239492|gb|AAF43218.1|AC012654_2 EST gb|AI999169
  misc_feature (43)..(324): Homolog of NCBI NO: 15217566 NR Description: unknown protein; protein id: At1g09610.1
  misc_feature (50)..(319): Homolog of NCBI NO: 15234881 NR Description: putative protein; protein id: At4g09990.1
  misc_feature (67)..(319): Homolog of NCBI NO: 15220402 NR Description: unknown protein; protein id: At1g67330.1 thaliana] >gi|9828617|gb|AAG00240.1|AC002130_5 F1N21.15
FRLSLFLFLFCRTKNKMKSNTNTNLILFHHHSPLTSKSPSAVAAANHHRFLFIFFLSFFTLLFSFSLFSSSIHSTTSSHSLSSSPSSSSLPPPVLAALLHYTSSSPPNTSMSFLELSTISNIIHSHGPACNLLIFGLTHESLLWRSINFQGRTVFVDESPYSVSKFEQSNPGVEAYEVVYSTKVSQAKKLLGYYKTRPECRPVQNLLFSDCKLGINDLPNFVYEIDWDVILIDGPRGYASDSPGRMAPIFTSAVLAKSKDFGTKTKKTDVLVHEFGRKIERVYSEEFLCEENLIEVVGDLGHFVVAAAEERESYGDGFCRNSTRLSESFTAVSGGDEEKVGVDDE

SEQ ID NO: 84180 - protein, 329 aa, Arabidopsis thaliana; identical to SEQ ID NO: 22135
  peptide (1)..(329): Ceres Seq. ID no. 12673590
  misc_feature (57)..(303): Pfam Name: Protein of unknown function (DUF579) Pfam Description: Protein of unknown function (DUF579)
  misc_feature (1)..(329): Homolog of NCBI NO: 18397819 NR Description: expressed protein; protein id: At2g15440.1, by cDNA: 32729. [Arabidopsis thaliana] >gi|25354650|pir||A84529
  misc_feature (1)..(304): Homolog of NCBI NO: 15240242 NR Description: putative protein; protein id: At5g67210.1 thaliana] >gi|10177608|dbj|BAB10955.1| to unknown protein [Arabidopsis thaliana]
  misc_feature (4)..(312): Homolog of NCBI NO: 15229700 NR Description: putative protein; protein id: At3g50220.1, by cDNA: 35440. [Arabidopsis thaliana] >gi|11282604|pir||T45568
  misc_feature (4)..(312): Homolog of NCBI NO: 21593034 NR Description: unknown [Arabidopsis thaliana]
  misc_feature (25)..(312): Homolog of NCBI NO: 10241434 NR Description: putative protein [Oryza sativa (indica
  misc_feature (58)..(303): Homolog of NCBI NO: 18409879 NR Description: hypothetical protein; protein id: At1g71690.1
  misc_feature (58)..(303): Homolog of NCBI NO: 25354648 NR Description: hypothetical protein F14O23.3 [imported] - thaliana >gi|7239492|gb|AAF43218.1|AC012654_2 EST gb|AI999169
  misc_feature (27)..(308): Homolog of NCBI NO: 15217566 NR Description: unknown protein; protein id: At1g09610.1
  misc_feature (34)..(303): Homolog of NCBI NO: 15234881 NR Description: putative protein; protein id: At4g09990.1
  misc_feature (51)..(303): Homolog of NCBI NO: 15220402 NR Description: unknown protein; protein id: At1g67330.1 thaliana] >gi|9828617|gb|AAG00240.1|AC002130_5 F1N21.15

SEQ ID NO: 84181 - protein, 235 aa, Arabidopsis thaliana; identical to SEQ ID NO: 22136
  peptide (1)..(235): Ceres Seq. ID no. 12673591
  misc_feature (1)..(209): Pfam Name: Protein of unknown function (DUF579) Pfam Description: Protein of unknown function (DUF579)
  misc_feature (1)..(235): Homolog of NCBI NO: 18397819 NR Description: expressed protein; protein id: At2g15440.1, by cDNA: 32729. [Arabidopsis thaliana] >gi|25354650|pir||A84529
  misc_feature (1)..(210): Homolog of NCBI NO: 15240242 NR Description: putative protein; protein id: At5g67210.1 thaliana] >gi|10177608|dbj|BAB10955.1| to unknown protein [Arabidopsis thaliana]
  misc_feature (1)..(218): Homolog of NCBI NO: 15229700 NR Description: putative protein; protein id: At3g50220.1, by cDNA: 35440. [Arabidopsis thaliana] >gi|11282604|pir||T45568
  misc_feature (1)..(218): Homolog of NCBI NO: 21593034 NR Description: unknown [Arabidopsis thaliana]
  misc_feature (1)..(218): Homolog of NCBI NO: 10241434 NR Description: putative protein [Oryza sativa (indica
  misc_feature (1)..(209): Homolog of NCBI NO: 18409879 NR Description: hypothetical protein; protein id: At1g71690.1
  misc_feature (1)..(209): Homolog of NCBI NO: 25354648 NR Description: hypothetical protein F14O23.3 [imported] - thaliana >gi|7239492|gb|AAF43218.1|AC012654_2 EST gb|AI999169
  misc_feature (1)..(214): Homolog of NCBI NO: 15217566 NR Description: unknown protein; protein id: At1g09610.1
  misc_feature (1)..(209): Homolog of NCBI NO: 15234881 NR Description: putative protein; protein id: At4g09990.1
  misc_feature (1)..(209): Homolog of NCBI NO: 15220402 NR Description: unknown protein; protein id: At1g67330.1 thaliana] >gi|9828617|gb|AAG00240.1|AC002130_5 F1N21.15

SEQ ID NO: 84182 - DNA, 1502 bp, Arabidopsis thaliana
  misc_feature (1)..(1502): Ceres Seq. ID no. 12673622
  misc_feature: MA Experiment ID: 20000171 Result: Down-regulated in Transcription
  misc_feature: MA Experiment 20000171 PARAMETER Experiment Name: At_42deg_Heat_P Parameter: Age (day) Value: 14
  misc_feature: MA Experiment 20000171 PARAMETER Experiment Name: At_42deg_Heat_P Parameter: Organism Value: A. thaliana
  misc_feature: MA Experiment 20000171 PARAMETER Experiment Name: At_42deg_Heat_P Parameter: Plant Line Value: WS
  misc_feature: MA Experiment 20000171 PARAMETER Experiment Name: At_42deg_Heat_P Parameter: Temperature (deg C) Value: 42 vs. 22
  misc_feature: MA Experiment 20000171 PARAMETER Experiment Name: At_42deg_Heat_P Parameter: Timepoint (hr) Value: 1
  misc_feature: MA Experiment 20000171 PARAMETER Experiment Name: At_42deg_Heat_P Parameter: Tissue Value: Aerial
  misc_feature: MA Experiment ID: 20000173 Result: Down-regulated in Transcription
  misc_feature: MA Experiment 20000173 PARAMETER Experiment Name: At_42deg_Heat_P Parameter: Age (day) Value: 14
  misc_feature: MA Experiment 20000173 PARAMETER Experiment Name: At_42deg_Heat_P Parameter: Organism Value: A. thaliana
  misc_feature: MA Experiment 20000173 PARAMETER Experiment Name: At_42deg_Heat_P Parameter: Plant Line Value: WS
  misc_feature: MA Experiment 20000173 PARAMETER Experiment Name: At_42deg_Heat_P Parameter: Temperature (deg C) Value: 42 vs. 22
  misc_feature: MA Experiment 20000173 PARAMETER Experiment Name: At_42deg_Heat_P Parameter: Timepoint (hr) Value: 6
  misc_feature: MA Experiment 20000173 PARAMETER Experiment Name: At_42deg_Heat_P Parameter: Tissue Value: Aerial
  misc_feature: MA Experiment ID: 20000182 Result: Up-regulated in Transcription
  misc_feature: MA Experiment 20000182 PARAMETER Experiment Name: At_2mM_SA_P Parameter: Age (day) Value: 14
  misc_feature: MA Experiment 20000182 PARAMETER Experiment Name: At_2mM_SA_P Parameter: Organism Value: A. thaliana
  misc_feature: MA Experiment 20000182 PARAMETER Experiment Name: At_2mM_SA_P Parameter: Plant Line Value: WS
  misc_feature: MA Experiment 20000182 PARAMETER Experiment Name: At_2mM_SA_P Parameter: Timepoint (hr) Value: 6
  misc_feature: MA Experiment 20000182 PARAMETER Experiment Name: At_2mM_SA_P Parameter: Tissue Value: Aerial
  misc_feature: MA Experiment 20000182 PARAMETER Experiment Name: At_2mM_SA_P Parameter: Treatment Value: 2mM SA vs. No Treatment
  misc_feature: MA Experiment ID: 20000185 Result: Up-regulated in Transcription
  misc_feature: MA Experiment 20000185 PARAMETER Experiment Name: At_Roots__P Parameter: Age (day) Value: 7 vs. 21
  misc_feature: MA Experiment 20000185 PARAMETER Experiment Name: At_Roots__P Parameter: Organism Value: A. thaliana
  misc_feature: MA Experiment 20000185 PARAMETER Experiment Name: At_Roots__P Parameter: Tissue Value: Roots vs. Whole Plant
  misc_feature: MA Experiment ID: 20000286 Result: Up-regulated in Transcription
  misc_feature: MA Experiment 20000286 PARAMETER Experiment Name: At_Open_Flower_P Parameter: Age (day) Value: 21
  misc_feature: MA Experiment 20000286 PARAMETER Experiment Name: At_Open_Flower_P Parameter: Plant Line Value: WS
  misc_feature: MA Experiment 20000286 PARAMETER Experiment Name: At_Open_Flower_P Parameter: Tissue Value: Half Open vs. Whole Plant
  misc_feature: MA Experiment ID: 20000437 Result: Down-regulated in Transcription
  misc_feature: MA Experiment 20000437 PARAMETER Experiment Name: At_Drought_P Parameter: Age (day) Value: 8
  misc_feature: MA Experiment 20000437 PARAMETER Experiment Name: At_Drought_P Parameter: Organism Value: A. thaliana
  misc_feature: MA Experiment 20000437 PARAMETER Experiment Name: At_Drought_P Parameter: Plant Line Value: WS
  misc_feature: MA Experiment 20000437 PARAMETER Experiment Name: At_Drought_P Parameter: Timepoint (hr) Value: 24
  misc_feature: MA Experiment 20000437 PARAMETER Experiment Name: At_Drought_P Parameter: Tissue Value: Whole Plant
  misc_feature: MA Experiment 20000437 PARAMETER Experiment Name: At_Drought_P Parameter: Treatment Value: Drought vs. No Drought
  misc_feature: MA Experiment ID: 20000527 Result: Down-regulated in Transcription
  misc_feature: MA Experiment 20000527 PARAMETER Experiment Name: At_10percent_PEG_P Parameter: Age (day) Value: 20
  misc_feature: MA Experiment 20000527 PARAMETER Experiment Name: At_10percent_PEG_P Parameter: Organism Value: A. thaliana
  misc_feature: MA Experiment 20000527 PARAMETER Experiment Name: At_10percent_PEG_P Parameter: Plant Line Value: WS
  misc_feature: MA Experiment 20000527 PARAMETER Experiment Name: At_10percent_PEG_P Parameter: Timepoint (day) Value: 20
  misc_feature: MA Experiment 20000527 PARAMETER Experiment Name: At_10percent_PEG_P Parameter: Tissue Value: Whole Plant
  misc_feature: MA Experiment 20000527 PARAMETER Experiment Name: At_10percent_PEG_P Parameter: Treatment Value: 10percent PEG vs. No Treatment
  misc_feature: MA Experiment ID: 20000573 Result: Down-regulated in Transcription
  misc_feature: MA Experiment 20000573 PARAMETER Experiment Name: At_100uM_ABA_Mutants__P Parameter: Organism Value: A. thaliana
  misc_feature: MA Experiment 20000573 PARAMETER Experiment Name: At_100uM_ABA_Mutants__P Parameter: Plant Line Value: CS22 vs. Ler wt
  misc_feature: MA Experiment 20000573 PARAMETER Experiment Name: At_100uM_ABA_Mutants__P Parameter: Timepoint (hr) Value: N/A
  misc_feature: MA Experiment 20000573 PARAMETER Experiment Name: At_100uM_ABA_Mutants__P Parameter: Tissue Value: Whole Plant
  misc_feature: MA Experiment 20000573 PARAMETER Experiment Name: At_100uM_ABA_Mutants__P Parameter: Treatment Value: None
  misc_feature: MA Experiment ID: 20001248 Result: Down-regulated in Transcription
  misc_feature: MA Experiment 20001248 PARAMETER Experiment Name: At_Far-red-induction_P Parameter: Age (day) Value: 7
  misc_feature: MA Experiment 20001248 PARAMETER Experiment Name: At_Far-red-induction_P Parameter: Light Value: Far-red vs. White
  misc_feature: MA Experiment 20001248 PARAMETER Experiment Name: At_Far-red-induction_P Parameter: Organism Value: A. thaliana
  misc_feature: MA Experiment 20001248 PARAMETER Experiment Name: At_Far-red-induction_P Parameter: Plant Line Value: Columbia
  misc_feature: MA Experiment 20001248 PARAMETER Experiment Name: At_Far-red-induction_P Parameter: Timepoint (hr) Value: 4
  misc_feature: MA Experiment 20001248 PARAMETER Experiment Name: At_Far-red-induction_P Parameter: Tissue Value: Whole Plant
  misc_feature: MA Experiment ID: 20001559 Result: Down-regulated in Transcription
  misc_feature: MA Experiment 20001559 PARAMETER Experiment Name: At_Drought_Soil_Dry_P Parameter: Age (day) Value: 28
  misc_feature: MA Experiment 20001559 PARAMETER Experiment Name: At_Drought_Soil_Dry_P Parameter: Organism Value: A. thaliana
  misc_feature: MA Experiment 20001559 PARAMETER Experiment Name: At_Drought_Soil_Dry_P Parameter: Plant Line Value: WS
  misc_feature: MA Experiment 20001559 PARAMETER Experiment Name: At_Drought_Soil_Dry_P Parameter: Post Timepoint (hr) Value: 29
  misc_feature: MA Experiment 20001559 PARAMETER Experiment Name: At_Drought_Soil_Dry_P Parameter: Post-Treatment Value: Re-Water vs. No Drought
  misc_feature: MA Experiment 20001559 PARAMETER Experiment Name: At_Drought_Soil_Dry_P Parameter: Timepoint (day) Value: 14
  misc_feature: MA Experiment 20001559 PARAMETER Experiment Name: At_Drought_Soil_Dry_P Parameter: Treatment Value: Drought vs. No Drought
  misc_feature: MA Experiment ID: 20001911 Result: Down-regulated in Transcription
  misc_feature: MA Experiment 20001911 PARAMETER Experiment Name: At_Drought_Reproduction_P Parameter: Age (day) Value: 40
  misc_feature: MA Experiment 20001911 PARAMETER Experiment Name: At_Drought_Reproduction_P Parameter: Organism Value: A. thaliana
  misc_feature: MA Experiment 20001911 PARAMETER Experiment Name: At_Drought_Reproduction_P Parameter: Plant Line Value: WS
  misc_feature: MA Experiment 20001911 PARAMETER Experiment Name: At_Drought_Reproduction_P Parameter: Timepoint (day) Value: 10
  misc_feature: MA Experiment 20001911 PARAMETER Experiment Name: At_Drought_Reproduction_P Parameter: Tissue Value: Flowers
  misc_feature: MA Experiment 20001911 PARAMETER Experiment Name: At_Drought_Reproduction_P Parameter: Treatment Value: Drought vs. No Drought
atgggtcgtgtccgaaaatcagatttcggttccattgttcttgttctgtgttgtgtcctaaatagcttactctgtaatggaggcatcaccagtagatatgtcagaaaattagaagcaaccgttgatatgcctcttgatagcgatgtttttcgtgttccttgtggctacaatgctcctcaacaggtgcatataacacaaggagatgtagaaggaaaggcagtgatagtatcatgggtgacacaagaagcaaaaggatctaacaaagtcatttactggaaagagaatagcaccaaaaagcacaaagctcatggcaaaaccaatacttacaagttctacaattatacttctggttttatccatcattgccctatcagaaacttagaggtccatcatcataatcattttttatttatgtatctcattaccatcatctttggtagtgttgttgttagctgatgttgtggtttttcttattacagtatgacaccaagtactattatgtgttaggtgtgggacaaacggagcgtaagttttggttcttcactcctcctgagatcggtcctgatgttccctacacttttggtctcattggggatcttgggcagagttatgactcaaacataaccttaacacattatgagaataacccaacaaaagggcaagcggttttgttcgtcggcgatatctcatacgctgatacttatccggatcatgacaataggagatgggacagttggggaagatttgctgaaagaagcacagcttatcagccttggatttggactaccggaaaccatgaactcgattttgccccggagattggtgaaaacagaccgtttaagccgttcacgcataggtaccgaactccttaccgatcatcaggcagcaccgaaccattctggtactcgataaagagaggaccggcttacataatcgtgctagcttcatattcagcatatggaaaatacacaccacagtaccaatggctcgaagaggagttcccaaaggttaacagaacggaaactccgtggttgattgttctgatgcattcaccatggtacaacagctatgattaccattacatggaaggtgaaacaatgagggtaatgtatgaggcttggtttgtcaagtacaaagtagatgtagtttttgcaggtcatgtccacgcctacgaaagatcggaacgtgtatcaaacatagcttacaatgttgttaacggcatttgcactccagtcaaagatcaatcagctccagtctatatcaccattggtgatggaggcaatattgagggcttggctaccaaaatgactgagcctcagcctaagtactctgcctttagagaagcaagcttcgggcatgctatattctcgataaagaacaggacgcatgctcactatggatggcataggaaccatgatggttatgctgtggagggtgacagaatgtggttttataacagattttggcatcctgttgatgattctccttcttgtaattcttga

SEQ ID NO: 84183 - protein, 348 aa, Arabidopsis thaliana
  peptide (1)..(348): Ceres Seq. ID no. 12673623
  misc_feature (40)..(239): Pfam Name: Calcineurin-like phosphoesterase Pfam Description: Calcineurin-like phosphoesterase
  misc_feature (7)..(343): Homolog of NCBI NO: 27597229 NR Description: purple acid phosphatase [Nicotiana tabacum]
  misc_feature (1)..(343): Homolog of NCBI NO: 11262827 NR Description: acid phosphatase (EC 3.1.3.2) purple 1, precursor
  misc_feature (1)..(343): Homolog of NCBI NO: 11262828 NR Description: acid phosphatase (EC 3.1.3.2) purple 2, precursor
  misc_feature (7)..(348): Homolog of NCBI NO: 11262830 NR Description: acid phosphatase (EC 3.1.3.2) purple PAP32,
  misc_feature (1)..(348): Homolog of NCBI NO: 27597239 NR Description: purple acid phosphatase [Nicotiana tabacum]
MLWFFLLQYDTKYYYVLGVGQTERKFWFFTPPEIGPDVPYTFGLIGDLGQSYDSNITLTHYENNPTKGQAVLFVGDISYADTYPDHDNRRWDSWGRFAERSTAYQPWIWTTGNHELDFAPEIGENRPFKPFTHRYRTPYRSSGSTEPFWYSIKRGPAYIIVLASYSAYGKYTPQYQWLEEEFPKVNRTETPWLIVLMHSPWYNSYDYHYMEGETMRVMYEAWFVKYKVDVVFAGHVHAYERSERVSNIAYNVVNGICTPVKDQSAPVYITIGDGGNIEGLATKMTEPQPKYSAFREASFGHAIFSIKNRTHAHYGWHRNHDGYAVEGDRMWFYNRFWHPVDDSPSCNS

SEQ ID NO: 84184 - DNA, 2625 bp, Arabidopsis thaliana
  misc_feature (1)..(2625): Ceres Seq. ID no. 12673624
  misc_feature: MA Experiment ID: 20000315 Result: Down-regulated in Transcription
  misc_feature: MA Experiment 20000315 PARAMETER Experiment Name: At_14day_Shoots-Roots_Sub_P Parameter: Age (day) Value: 14
  misc_feature: MA Experiment 20000315 PARAMETER Experiment Name: At_14day_Shoots-Roots_Sub_P Parameter: Organism Value: A. thaliana
  misc_feature: MA Experiment 20000315 PARAMETER Experiment Name: At_14day_Shoots-Roots_Sub_P Parameter: Plant Line Value: WS
  misc_feature: MA Experiment 20000315 PARAMETER Experiment Name: At_14day_Shoots-Roots_Sub_P Parameter: Tissue Value: Shoots vs. Whole Plant
  misc_feature: MA Experiment ID: 20000355 Result: Up-regulated in Transcription
  misc_feature: MA Experiment 20000355 PARAMETER Experiment Name: At_Siliques_Sub_P Parameter: Age (day) Value: 21
  misc_feature: MA Experiment 20000355 PARAMETER Experiment Name: At_Siliques_Sub_P Parameter: Organism Value: A. thaliana
  misc_feature: MA Experiment 20000355 PARAMETER Experiment Name: At_Siliques_Sub_P Parameter: Plant Line Value: WS
  misc_feature: MA Experiment 20000355 PARAMETER Experiment Name: At_Siliques_Sub_P Parameter: Tissue Value: Less Than 5mm Siliques vs. Whole Plant
  misc_feature: MA Experiment ID: 20000440 Result: Up-regulated in Transcription
  misc_feature: MA Experiment 20000440 PARAMETER Experiment Name: At_Closed-Flower__Sub_P Parameter: Tissue Value: Closed Flower vs. Whole Plant
gtggattcttgtttaaatttaaaaatcctcaagaagaagaagaagaagaagaagatagtcaaatgaaaatacattcttctgatcattcatggcttttactagccgttctcgtgattctcctctccttctctggagctctctcaagcgatgacaaagagaagaagacgaaatcggtcgataaaaagaaagaagtaacttatgatggaacgtctttgatcatcaatggaaatagagaactcctttactctggctccatacattaccctcgtagcactcctgaaatgtggccaaacatcatcaagagagcgaaacaaggcggtttgaacacgattcagacatacgttttttggaacgttcatgagcctgagcagggaaagttcaatttttcgggtagagccgacttggtgaagttcataaaattaattgagaagaatggtttgtatgtaaccttgaggcttggaccttttattcaagctgaatggactcatggaggacttccttactggctgagggaagttcccgggatcttcttccgtaccgataatgaacctttcaaggaacatacagagagatatgttaaggtggtacttgacatgatgaaggaggagaagctttttgcttcacaaggaggccccattatattaggacagattgagaatgagtatagtgcggttcaacgagcatataaagaagatggattaaactacattaagtgggcatctaaactggtacactcgatggatttggggatcccatgggttatgtgtaagcaaaatgatgctcctgatcctatgatcaacgcttgtaacggaagacattgcggtgatacattccctggtccaaacaaagacaacaagccatctttatggacagagaactggactactcagttccgcgtttttggcgatcccccagcacaaagatctgtagaagatatagcatattctgttgcccggtttttctccaagaatggaacccatgttaactactatatgtatcacggaggtactaactttggaagaacctctgcacattatgtgacaactcgttactacgacgatgcacctcttgatgaattcggactggaaagggagcctaagtacggtcatctaaagcatcttcacaacgcccttaacttgtgcaagaaggcacttctctggggccagcctcgagtcgagaagcctagcaatgaaacagagattcgatactacgagcagcctggaactaaagtttgtgcagcatttttggctaacaataacacagaagctgcagaaaaaatcaaattcagaggcaaggaatatcttatcccgcaccgctccatcagtattctccctgactgcaaaaccgttgtttataacaccggggagatcatctctcatcatacttcaagaaacttcatgaaatcgaaaaaagcgaataagaactttgatttcaaagtgttcaccgagtcagtgccaagtaagatcaagggtgactcttttatacccgttgaactctacggcttgaccaaagatgagtctgattacggatggtacacaacaagctttaaaatagatgacaatgacctctctaagaagaaaggaggtaagcctaatctgaggattgctagtcttggccacgcgttgcatgtatggctcaatggagaataccttggaaacggacatggtagccatgaagagaagagtttcgtctttcagaagccagttactctaaaagaaggagagaaccacttaaccatgctaggtgttttgacgggatttccggatagtggatcttatatggagcatagatacacaggtccacgtagtgtttccatcttaggtttgggctctggaacacttgatctcactgaagaaaacaaatggggaaacaaggtgggtatggaaggcgaaaggcttggtatccacgccgaagaaggattgaagaaggttaaatgggagaaagcttcagggaaagaaccgggaatgacatggtaccagacatacttcgatgcaccagagagccaaagtgcagcagcaattaggatgaacggaatggggaaaggtttgatttgggtgaacggagaaggtgttggtcgatattggatgtcgtttctatcgcctttaggacagcctacgcaaatcgagtatcacatccctaggtctttcttgaagcccaagaaaaatcttctggttatatttgaggaagaaccaaatgtgaagccagagcttatcgactttgtcatcgtcaatagagatacggtgtgttcttatattggagaaaactacactcctagtgtccgtcactggaccaggaagaatgaccaagttcaggccatcactgatgacgtgcatctcacggctaatctcaaatgttccggcacaaagaaaatctccgctgtggaattcgcaagctttgggaatcctaatgggacttgtggcaacttcactcttggaagttgtaatgctcctgtttctaagaaagtcgttgaaaagtactgtttgggtaaagcagagtgtgtgattccggtgaacaagagtacgttcgagcaagacaaaaaggattcatgtcccaaagtcgagaagaagcttgcggtacaagtcaagtgtggccgtgacaagaagaactaaggatatatattttatt

SEQ ID NO: 84185 - protein, 868 aa, Arabidopsis thaliana
  peptide (1)..(868): Ceres Seq. ID no. 12673625
  misc_feature (782)..(862): Pfam Name: Galactose binding lectin domain Pfam Description: Galactose binding lectin domain
  misc_feature (94)..(867): Homolog of NCBI NO: 22329242 NR Description: glycosyl hydrolase family 35
  misc_feature (125)..(867): Homolog of NCBI NO: 7484825 NR Description: beta-galactosidase homolog F20M13.150 - thaliana >gi|4467146|emb|CAB37515.1| galactosidase like protein thaliana] >gi|7270842|emb|CAB80523.1| galactosidase like protein
  misc_feature (59)..(746): Homolog of NCBI NO: 10862896 NR Description: putative beta-galactosidase [Nicotiana tabacum]
  misc_feature (64)..(862): Homolog of NCBI NO: 30699255 NR Description: glycosyl hydrolase family 35 (beta-galactosidase)
  misc_feature (64)..(841): Homolog of NCBI NO: 26451843 NR Description: unknown protein [Arabidopsis thaliana]
  misc_feature (64)..(697): Homolog of NCBI NO: 18419821 NR Description: glycosyl hydrolase family 35 protein id: At4g36360.1, supported by cDNA: gi_15810492,
  misc_feature (651)..(862): Homolog of NCBI NO: 18419821 NR Description: glycosyl hydrolase family 35 protein id: At4g36360.1, supported by cDNA: gi_15810492,
  misc_feature (64)..(697): Homolog of NCBI NO: 30690633 NR Description: glycosyl hydrolase family 35 (beta-galactosidase)
  misc_feature (651)..(862): Homolog of NCBI NO: 30690633 NR Description: glycosyl hydrolase family 35 (beta-galactosidase)
  misc_feature (62)..(729): Homolog of NCBI NO: 30697899 NR Description: glycosyl hydrolase family 35 (beta-galactosidase)
GFLFKFKNPQEEEEEEEDSQMKIHSSDHSWLLLAVLVILLSFSGALSSDDKEKKTKSVDKKKEVTYDGTSLIINGNRELLYSGSIHYPRSTPEMWPNIIKRAKQGGLNTIQTYVFWNVHEPEQGKFNFSGRADLVKFIKLIEKNGLYVTLRLGPFIQAEWTHGGLPYWLREVPGIFFRTDNEPFKEHTERYVKVVLDMMKEEKLFASQGGPIILGQIENEYSAVQRAYKEDGLNYIKWASKLVHSMDLGIPWVMCKQNDAPDPMINACNGRHCGDTFPGPNKDNKPSLWTENWTTQFRVFGDPPAQRSVEDIAYSVARFFSKNGTHVNYYMYHGGTNFGRTSAHYVTTRYYDDAPLDEFGLEREPKYGHLKHLHNALNLCKKALLWGQPRVEKPSNETEIRYYEQPGTKVCAAFLANNNTEAAEKIKFRGKEYLIPHRSISILPDCKTVVYNTGEIISHHTSRNFMKSKKANKNFDFKVFTESVPSKIKGDSFIPVELYGLTKDESDYGWYTTSFKIDDNDLSKKKGGKPNLRIASLGHALHVWLNGEYLGNGHGSHEEKSFVFQKPVTLKEGENHLTMLGVLTGFPDSGSYMEHRYTGPRSVSILGLGSGTLDLTEENKWGNKVGMEGERLGIHAEEGLKKVKWEKASGKEPGMTWYQTYFDAPESQSAAAIRMNGMGKGLIWVNGEGVGRYWMSFLSPLGQPTQIEYHIPRSFLKPKKNLLVIFEEEPNVKPELIDFVIVNRDTVCSYIGENYTPSVRHWTRKNDQVQAITDDVHLTANLKCSGTKKISAVEFASFGNPNGTCGNFTLGSCNAPVSKKVVEKYCLGKAECVIPVNKSTFEQDKKDSCPKVEKKLAVQVKCGRDKKN

SEQ ID NO: 84186 - protein, 848 aa, Arabidopsis thaliana
  peptide (1)..(848): Ceres Seq. ID no. 12673626
  misc_feature (762)..(842): Pfam Name: Galactose binding lectin domain Pfam Description: Galactose binding lectin domain
  misc_feature (74)..(847): Homolog of NCBI NO: 22329242 NR Description: glycosyl hydrolase family 35
  misc_feature (105)..(847): Homolog of NCBI NO: 7484825 NR Description: beta-galactosidase homolog F20M13.150 - thaliana >gi|4467146|emb|CAB37515.1| galactosidase like protein thaliana] >gi|7270842|emb|CAB80523.1| galactosidase like protein
  misc_feature (39)..(726): Homolog of NCBI NO: 10862896 NR Description: putative beta-galactosidase [Nicotiana tabacum]
  misc_feature (44)..(842): Homolog of NCBI NO: 30699255 NR Description: glycosyl hydrolase family 35 (beta-galactosidase)
  misc_feature (44)..(821): Homolog of NCBI NO: 26451843 NR Description: unknown protein [Arabidopsis thaliana]
  misc_feature (44)..(677): Homolog of NCBI NO: 18419821 NR Description: glycosyl hydrolase family 35 protein id: At4g36360.1, supported by cDNA: gi_15810492,
  misc_feature (631)..(842): Homolog of NCBI NO: 18419821 NR Description: glycosyl hydrolase family 35 protein id: At4g36360.1, supported by cDNA: gi_15810492,
  misc_feature (44)..(677): Homolog of NCBI NO: 30690633 NR Description: glycosyl hydrolase family 35 (beta-galactosidase)
  misc_feature (631)..(842): Homolog of NCBI NO: 30690633 NR Description: glycosyl hydrolase family 35 (beta-galactosidase)
  misc_feature (42)..(709): Homolog of NCBI NO: 30697899 NR Description: glycosyl hydrolase family 35 (beta-galactosidase)
MKIHSSDHSWLLLAVLVILLSFSGALSSDDKEKKTKSVDKKKEVTYDGTSLIINGNRELLYSGSIHYPRSTPEMWPNIIKRAKQGGLNTIQTYVFWNVHEPEQGKFNFSGRADLVKFIKLIEKNGLYVTLRLGPFIQAEWTHGGLPYWLREVPGIFFRTDNEPFKEHTERYVKVVLDMMKEEKLFASQGGPIILGQIENEYSAVQRAYKEDGLNYIKWASKLVHSMDLGIPWVMCKQNDAPDPMINACNGRHCGDTFPGPNKDNKPSLWTENWTTQFRVFGDPPAQRSVEDIAYSVARFFSKNGTHVNYYMYHGGTNFGRTSAHYVTTRYYDDAPLDEFGLEREPKYGHLKHLHNALNLCKKALLWGQPRVEKPSNETEIRYYEQPGTKVCAAFLANNNTEAAEKIKFRGKEYLIPHRSISILPDCKTVVYNTGEIISHHTSRNFMKSKKANKNFDFKVFTESVPSKIKGDSFIPVELYGLTKDESDYGWYTTSFKIDDNDLSKKKGGKPNLRIASLGHALHVWLNGEYLGNGHGSHEEKSFVFQKPVTLKEGENHLTMLGVLTGFPDSGSYMEHRYTGPRSVSILGLGSGTLDLTEENKWGNKVGMEGERLGIHAEEGLKKVKWEKASGKEPGMTWYQTYFDAPESQSAAAIRMNGMGKGLIWVNGEGVGRYWMSFLSPLGQPTQIEYHIPRSFLKPKKNLLVIFEEEPNVKPELIDFVIVNRDTVCSYIGENYTPSVRHWTRKNDQVQAITDDVHLTANLKCSGTKKISAVEFASFGNPNGTCGNFTLGSCNAPVSKKVVEKYCLGKAECVIPVNKSTFEQDKKDSCPKVEKKLAVQVKCGRDKKN

SEQ ID NO: 84187 - protein, 775 aa, Arabidopsis thaliana
  peptide (1)..(775): Ceres Seq. ID no. 12673627
  misc_feature (689)..(769): Pfam Name: Galactose binding lectin domain Pfam Description: Galactose binding lectin domain
  misc_feature (1)..(774): Homolog of NCBI NO: 22329242 NR Description: glycosyl hydrolase family 35
  misc_feature (32)..(774): Homolog of NCBI NO: 7484825 NR Description: beta-galactosidase homolog F20M13.150 - thaliana >gi|4467146|emb|CAB37515.1| galactosidase like protein thaliana] >gi|7270842|emb|CAB80523.1| galactosidase like protein
  misc_feature (1)..(653): Homolog of NCBI NO: 10862896 NR Description: putative beta-galactosidase [Nicotiana tabacum]
  misc_feature (1)..(769): Homolog of NCBI NO: 30699255 NR Description: glycosyl hydrolase family 35 (beta-galactosidase)
  misc_feature (1)..(748): Homolog of NCBI NO: 26451843 NR Description: unknown protein [Arabidopsis thaliana]
  misc_feature (1)..(604): Homolog of NCBI NO: 18419821 NR Description: glycosyl hydrolase family 35 protein id: At4g36360.1, supported by cDNA: gi_15810492,
  misc_feature (558)..(769): Homolog of NCBI NO: 18419821 NR Description: glycosyl hydrolase family 35 protein id: At4g36360.1, supported by cDNA: gi_15810492,
  misc_feature (1)..(604): Homolog of NCBI NO: 30690633 NR Description: glycosyl hydrolase family 35 (beta-galactosidase)
  misc_feature (558)..(769): Homolog of NCBI NO: 30690633 NR Description: glycosyl hydrolase family 35 (beta-galactosidase)
  misc_feature (1)..(636): Homolog of NCBI NO: 30697899 NR Description: glycosyl hydrolase family 35 (beta-galactosidase)
MWPNIIKRAKQGGLNTIQTYVFWNVHEPEQGKFNFSGRADLVKFIKLIEKNGLYVTLRLGPFIQAEWTHGGLPYWLREVPGIFFRTDNEPFKEHTERYVKVVLDMMKEEKLFASQGGPIILGQIENEYSAVQRAYKEDGLNYIKWASKLVHSMDLGIPWVMCKQNDAPDPMINACNGRHCGDTFPGPNKDNKPSLWTENWTTQFRVFGDPPAQRSVEDIAYSVARFFSKNGTHVNYYMYHGGTNFGRTSAHYVTTRYYDDAPLDEFGLEREPKYGHLKHLHNALNLCKKALLWGQPRVEKPSNETEIRYYEQPGTKVCAAFLANNNTEAAEKIKFRGKEYLIPHRSISILPDCKTVVYNTGEIISHHTSRNFMKSKKANKNFDFKVFTESVPSKIKGDSFIPVELYGLTKDESDYGWYTTSFKIDDNDLSKKKGGKPNLRIASLGHALHVWLNGEYLGNGHGSHEEKSFVFQKPVTLKEGENHLTMLGVLTGFPDSGSYMEHRYTGPRSVSILGLGSGTLDLTEENKWGNKVGMEGERLGIHAEEGLKKVKWEKASGKEPGMTWYQTYFDAPESQSAAAIRMNGMGKGLIWVNGEGVGRYWMSFLSPLGQPTQIEYHIPRSFLKPKKNLLVIFEEEPNVKPELIDFVIVNRDTVCSYIGENYTPSVRHWTRKNDQVQAITDDVHLTANLKCSGTKKISAVEFASFGNPNGTCGNFTLGSCNAPVSKKVVEKYCLGKAECVIPVNKSTFEQDKKDSCPKVEKKLAVQVKCGRDKKN

SEQ ID NO: 84188 - DNA, 2943 bp, Arabidopsis thaliana
  misc_feature (1)..(2943): Ceres Seq. ID no. 12673630
  misc_feature: MA Experiment ID: 108569 Result: Up-regulated in Transcription
  misc_feature: MA Experiment 108569 PARAMETER Experiment Name: At_0.001%_MeJA__cDNA_P Parameter: Timepoint (hr) Value: 6
  misc_feature: MA Experiment 108569 PARAMETER Experiment Name: At_0.001%_MeJA__cDNA_P Parameter: Tissue Value: Aerial
  misc_feature: MA Experiment 108569 PARAMETER Experiment Name: At_0.001%_MeJA__cDNA_P Parameter: Treatment Value: 0.001% MeJA vs. No Treatment
  misc_feature: MA Experiment ID: 108572 Result: Up-regulated in Transcription
  misc_feature: MA Experiment 108572 PARAMETER Experiment Name: At_Drought_cDNA_P Parameter: Timepoint (hr) Value: 1
  misc_feature: MA Experiment 108572 PARAMETER Experiment Name: At_Drought_cDNA_P Parameter: Tissue Value: Aerial
  misc_feature: MA Experiment 108572 PARAMETER Experiment Name: At_Drought_cDNA_P Parameter: Treatment Value: Drought vs. No Drought
  misc_feature: MA Experiment ID: 108573 Result: Up-regulated in Transcription
  misc_feature: MA Experiment 108573 PARAMETER Experiment Name: At_Drought_cDNA_P Parameter: Timepoint (hr) Value: 6
  misc_feature: MA Experiment 108573 PARAMETER Experiment Name: At_Drought_cDNA_P Parameter: Tissue Value: Aerial
  misc_feature: MA Experiment 108573 PARAMETER Experiment Name: At_Drought_cDNA_P Parameter: Treatment Value: Drought vs. No Drought
  misc_feature: MA Experiment ID: 108577 Result: Down-regulated in Transcription
  misc_feature: MA Experiment 108577 PARAMETER Experiment Name: At_42deg_Heat_cDNA_P Parameter: Temperature (deg C) Value: 42 vs. 22
  misc_feature: MA Experiment 108577 PARAMETER Experiment Name: At_42deg_Heat_cDNA_P Parameter: Timepoint (hr) Value: 6
  misc_feature: MA Experiment 108577 PARAMETER Experiment Name: At_42deg_Heat_cDNA_P Parameter: Tissue Value: Aerial
aaaaactcctaaaccaaattataattgttagtaagttaagtaacagagaacaaaataatactcgtaactcttgtttccaaactataacgtaacttttgttcatcatcttcacagtttctgtttctgtttctaaagattctaaattttgtgtttttcttttcctttttctttcgattatttttgattttctgatggaattccgcaaaccctttaagtctcatagctcgtataaacagattataagcaccggagatcaaaacgagaagacaaagaagaagaagaaactggcgaatcttgacgatggcgacattgctaaaactcagagctctgggtctagtttcgatggaaacagctataagttctggcaagacattgcaacagatgattatacaaagagcgggagtttcgatttcccgcaataccgtgaggagatcacactcgatgtaaacgaagaaacagaggaaacagaggatgtcagcaacaacaacaatttgtccggttctaaagaaacgagagtctttttcaaaataaacagttcaggaactaataatatgtctggttctgtacgttcttgtacatcttcgacttcgttttcatcggccacaatgcggttaaatttagagcagcagttggaggatgaaggagaggtggttgtaagatgttcatcggtgaggaaaacagagctagtttcgagggcgaaggcgagatcgaggttgatagatccgccacaagaagaggaacaacaatactcgagctggatcgggacatcggatcagttaagatcaggtttacttgggagacactccgatgatattgaggaagaagatgattcttcggctgaagaagatgttccagtggaatatcgaaagttgaaaatggatgcgataacgttgcttcaatggatgagcttaatcgcactcgtagttgcgttagtgttgagtctagggcttcatacttggagaaatgcaactctatggagccttcatctgtggaaatgggaagtggtcttgctggttctcatctgtgggaggctggtttcgggatgcggaatccgaatcatcgtcttctttatcgaaagaaacttccttttgaggaaacgggttctttacttcgtatacggtgtgaagactgctgttcagaactgtctctggctcggcctcgtgcttctcgcttggcatttcttgtttgacaagaaagtagaaaaggaaacacaaagcgatgttcttcttcttatgtctaaaatattagtgtgttttttgttgagcacggtcttatggctgatcaagacactggtggtgaaagttctagcctcttcgttccacgttagtacctactttgatcggattcaagaagctctgtttcatcattacttgatcgagacgttatctggacctccaatgcttgagttaagcaggattgaggaagaggaagatcggacgcaagatgagatctacaagatgcagaaaggaggagctgatttatcacctgaactttgttccgctgcgtttcctcaggaaaaaagtggaagtacaatgaacatgaagttctctccaatcattccaaagacgggaagtgataacggaatcacaatggatgatttacacaagatgaatcagaaaaacgtttcagcttggaacatgaagagactgatgaagattgtgagaaatgtttccctgagtacgttggacgaacaagcgcttcaaaacacgtgtgaagatgaatccactcgacagatacggagcgaaaaagaagctaaagcagctgcaaggaagattttcaagaacgtagctcaacctggcacaaaacacatatatctggaggacttgatgagatttttgcgagtagacgaggcgatgaagacaatgtgtctcttcgaaggcgccttagtgaccaaaaagattactaaatcagccttgaagaactggctggtaaatgctttcagagagagaagagcacttgccttaacactcaatgacaccaaaacagcagtgaacaaactccatcacatgattagttttctcactgccattgtcatcatagtcatatggctgatccttcttgaaatcgctacttccaagtatcttttatttctaacttcacaagttgtactcttagccttcatgtttgggaactctctcaagaccgtcttcgagtcaatcatcttcctcttcatcattcacccttacgatgttggtgatcggttactcatcgacactgtagagatggtggtggaggaaatgaacattctcacaacagttttcttgagagctgacaatctgaagattgtgtatccaaatattcttctatggcagaaagcgatccacaattacaaccgtagtccggatatgggagatgaagttacatgctgtgtccacattactactcctcctgaaaagattgctgcaatcaaacaaagaatatcaagctacattgatagcaagccagagtattggtatccaaaagctgatgtcattgtaaaggatgtggaagatttgaacattgtgaggatagcaatatggctatgtcataaaattaaccatcaaaacatgggagagagatttacaagaagagcgttgttgatcgaggaagtaatcaaaatcctcctcgaactcgacattcaataccggtttcatccacttgacatcaatgttaaaaccatgccaacagttgtctcgagcagagttccacctgcctggtcacaaaaccctgatttaaggtaattatagagaagatgtgtgttgtgttatcttaactcttaagtgcatgagagacagcaaactgtgttttagtatgaggttggttgttgtattttttttttctttgttagtaaaccgcttgttgtatatatatgaaggtgaaagcaaagagtgggatcataaacttgtgttatagaaactttatgaaatagaaacaaatgatatttttagtaatgaggtatttttt

SEQ ID NO: 84189 - protein, 842 aa, Arabidopsis thaliana; identical to SEQ ID NO: 75459
  peptide (1)..(842): Ceres Seq. ID no. 12673631
  misc_feature (604)..(812): Pfam Name: Mechanosensitive ion channel Pfam Description: Mechanosensitive ion channel
  misc_feature (112)..(836): Homolog of NCBI NO: 15218429 NR Description: hypothetical protein; protein id: At1g78610.1
  misc_feature (79)..(837): Homolog of NCBI NO: 11994592 NR Description: gb|AAD30575.1~gene_id:T21E2.7~strong similarity
  misc_feature (79)..(616): Homolog of NCBI NO: 15231928 NR Description: hypothetical protein; protein id: At3g14810.1
  misc_feature (638)..(837): Homolog of NCBI NO: 15231928 NR Description: hypothetical protein; protein id: At3g14810.1
  misc_feature (119)..(837): Homolog of NCBI NO: 15220793 NR Description: hypothetical protein; protein id: At1g53470.1
  misc_feature (6)..(383): Homolog of NCBI NO: 30679840 NR Description: expressed protein [Arabidopsis thaliana]
  misc_feature (568)..(838): Homolog of NCBI NO: 30679840 NR Description: expressed protein [Arabidopsis thaliana]
  misc_feature (114)..(835): Homolog of NCBI NO: 38345847 NR Description: OSJNBa0084K11.11 [Oryza sativa (japonica
  misc_feature (6)..(383): Homolog of NCBI NO: 25411771 NR Description: hypothetical protein At2g17010 [imported] -
  misc_feature (568)..(765): Homolog of NCBI NO: 25411771 NR Description: hypothetical protein At2g17010 [imported] -

SEQ ID NO: 84190 - protein, 722 aa, Arabidopsis thaliana; identical to SEQ ID NO: 75460
  peptide (1)..(722): Ceres Seq. ID no. 12673632
  misc_feature (484)..(692): Pfam Name: Mechanosensitive ion channel Pfam Description: Mechanosensitive ion channel
  misc_feature (1)..(716): Homolog of NCBI NO: 15218429 NR Description: hypothetical protein; protein id: At1g78610.1
  misc_feature (1)..(717): Homolog of NCBI NO: 11994592 NR Description: gb|AAD30575.1~gene_id:T21E2.7~strong similarity
  misc_feature (1)..(496): Homolog of NCBI NO: 15231928 NR Description: hypothetical protein; protein id: At3g14810.1
  misc_feature (518)..(717): Homolog of NCBI NO: 15231928 NR Description: hypothetical protein; protein id: At3g14810.1
  misc_feature (1)..(717): Homolog of NCBI NO: 15220793 NR Description: hypothetical protein; protein id: At1g53470.1
  misc_feature (1)..(263): Homolog of NCBI NO: 30679840 NR Description: expressed protein [Arabidopsis thaliana]
  misc_feature (448)..(718): Homolog of NCBI NO: 30679840 NR Description: expressed protein [Arabidopsis thaliana]
  misc_feature (1)..(715): Homolog of NCBI NO: 38345847 NR Description: OSJNBa0084K11.11 [Oryza sativa (japonica
  misc_feature (1)..(263): Homolog of NCBI NO: 25411771 NR Description: hypothetical protein At2g17010 [imported] -
  misc_feature (448)..(645): Homolog of NCBI NO: 25411771 NR Description: hypothetical protein At2g17010 [imported] -

SEQ ID NO: 84191 - protein, 704 aa, Arabidopsis thaliana; identical to SEQ ID NO: 75461
  peptide (1)..(704): Ceres Seq. ID no. 12673633
  misc_feature (466)..(674): Pfam Name: Mechanosensitive ion channel Pfam Description: Mechanosensitive ion channel
  misc_feature (1)..(698): Homolog of NCBI NO: 15218429 NR Description: hypothetical protein; protein id: At1g78610.1
  misc_feature (1)..(699): Homolog of NCBI NO: 11994592 NR Description: gb|AAD30575.1~gene_id:T21E2.7~strong similarity
  misc_feature (1)..(478): Homolog of NCBI NO: 15231928 NR Description: hypothetical protein; protein id: At3g14810.1
  misc_feature (500)..(699): Homolog of NCBI NO: 15231928 NR Description: hypothetical protein; protein id: At3g14810.1
  misc_feature (1)..(699): Homolog of NCBI NO: 15220793 NR Description: hypothetical protein; protein id: At1g53470.1
  misc_feature (1)..(245): Homolog of NCBI NO: 30679840 NR Description: expressed protein [Arabidopsis thaliana]
  misc_feature (430)..(700): Homolog of NCBI NO: 30679840 NR Description: expressed protein [Arabidopsis thaliana]
  misc_feature (1)..(697): Homolog of NCBI NO: 38345847 NR Description: OSJNBa0084K11.11 [Oryza sativa (japonica
  misc_feature (1)..(245): Homolog of NCBI NO: 25411771 NR Description: hypothetical protein At2g17010 [imported] -
  misc_feature (430)..(627): Homolog of NCBI NO: 25411771 NR Description: hypothetical protein At2g17010 [imported] -

SEQ ID NO: 84192 - DNA, 2588 bp, Arabidopsis thaliana
  misc_feature (1)..(2588): Ceres Seq. ID no. 12673634
  misc_feature: MA Experiment ID: 20000171 Result: Down-regulated in Transcription
  misc_feature: MA Experiment 20000171 PARAMETER Experiment Name: At_42deg_Heat_P Parameter: Age (day) Value: 14
  misc_feature: MA Experiment 20000171 PARAMETER Experiment Name: At_42deg_Heat_P Parameter: Organism Value: A. thaliana
  misc_feature: MA Experiment 20000171 PARAMETER Experiment Name: At_42deg_Heat_P Parameter: Plant Line Value: WS
  misc_feature: MA Experiment 20000171 PARAMETER Experiment Name: At_42deg_Heat_P Parameter: Temperature (deg C) Value: 42 vs. 22
  misc_feature: MA Experiment 20000171 PARAMETER Experiment Name: At_42deg_Heat_P Parameter: Timepoint (hr) Value: 1
  misc_feature: MA Experiment 20000171 PARAMETER Experiment Name: At_42deg_Heat_P Parameter: Tissue Value: Aerial
  misc_feature: MA Experiment ID: 20000173 Result: Down-regulated in Transcription
  misc_feature: MA Experiment 20000173 PARAMETER Experiment Name: At_42deg_Heat_P Parameter: Age (day) Value: 14
  misc_feature: MA Experiment 20000173 PARAMETER Experiment Name: At_42deg_Heat_P Parameter: Organism Value: A. thaliana
  misc_feature: MA Experiment 20000173 PARAMETER Experiment Name: At_42deg_Heat_P Parameter: Plant Line Value: WS
  misc_feature: MA Experiment 20000173 PARAMETER Experiment Name: At_42deg_Heat_P Parameter: Temperature (deg C) Value: 42 vs. 22
  misc_feature: MA Experiment 20000173 PARAMETER Experiment Name: At_42deg_Heat_P Parameter: Timepoint (hr) Value: 6
  misc_feature: MA Experiment 20000173 PARAMETER Experiment Name: At_42deg_Heat_P Parameter: Tissue Value: Aerial
  misc_feature: MA Experiment ID: 20000184 Result: Down-regulated in Transcription
  misc_feature: MA Experiment 20000184 PARAMETER Experiment Name: At_Shoots__P Parameter: Age (day) Value: 7
  misc_feature: MA Experiment 20000184 PARAMETER Experiment Name: At_Shoots__P Parameter: Tissue Value: Shoots vs. Whole Plant
  misc_feature: MA Experiment ID: 20000265 Result: Down-regulated in Transcription
  misc_feature: MA Experiment 20000265 PARAMETER Experiment Name: At_Open_Flower_P Parameter: Age (day) Value: 21
  misc_feature: MA Experiment 20000265 PARAMETER Experiment Name: At_Open_Flower_P Parameter: Plant Line Value: WS
  misc_feature: MA Experiment 20000265 PARAMETER Experiment Name: At_Open_Flower_P Parameter: Tissue Value: Closed Flower vs. Whole Plant
  misc_feature: MA Experiment ID: 20001450 Result: Up-regulated in Transcription
  misc_feature: MA Experiment 20001450 PARAMETER Experiment Name: At_Far-red-induction_P Parameter: Age (day) Value: 7
  misc_feature: MA Experiment 20001450 PARAMETER Experiment Name: At_Far-red-induction_P Parameter: Light Value: Far-red vs. White
  misc_feature: MA Experiment 20001450 PARAMETER Experiment Name: At_Far-red-induction_P Parameter: Organism Value: A. thaliana
  misc_feature: MA Experiment 20001450 PARAMETER Experiment Name: At_Far-red-induction_P Parameter: Plant Line Value: Columbia
  misc_feature: MA Experiment 20001450 PARAMETER Experiment Name: At_Far-red-induction_P Parameter: Timepoint (hr) Value: 8
  misc_feature: MA Experiment 20001450 PARAMETER Experiment Name: At_Far-red-induction_P Parameter: Tissue Value: Whole Plant
  misc_feature: MA Experiment ID: 20001451 Result: Up-regulated in Transcription
  misc_feature: MA Experiment 20001451 PARAMETER Experiment Name: At_Far-red-induction_P Parameter: Age (day) Value: 7
  misc_feature: MA Experiment 20001451 PARAMETER Experiment Name: At_Far-red-induction_P Parameter: Light Value: Far-red vs. White
  misc_feature: MA Experiment 20001451 PARAMETER Experiment Name: At_Far-red-induction_P Parameter: Organism Value: A. thaliana
  misc_feature: MA Experiment 20001451 PARAMETER Experiment Name: At_Far-red-induction_P Parameter: Plant Line Value: Columbia
  misc_feature: MA Experiment 20001451 PARAMETER Experiment Name: At_Far-red-induction_P Parameter: Timepoint (hr) Value: 24
  misc_feature: MA Experiment 20001451 PARAMETER Experiment Name: At_Far-red-induction_P Parameter: Tissue Value: Whole Plant
atgggttgttcaacctcaaagctcgacgatcttccagcggtggcgctttgtcgtgaccgttgtagcttccttgaagcagcgattcatcaacgttacgctttatcagaagctcacgtatcctacacacaatccttaaaagcaatctctcactctcttcaccaattcatcaatcaccaccaccgttacaacgattccgattcacccaaaaaagctaaacccaagatggattctgggtcgggtcatctcgatttcgattcggattctgactctgacgacgatgatgatattgattcgttgcattcatctcctctccatcatcatctagaagatgatgactcgaatccgaaatcgtatttgcatatgaattatatgaagaatagttatatgcctccttctttggtttatgagcagagaccttcgagtcctcagagagttcatttcggtgaatcatcatcatcatcaacctctgagtataatccatatctgaattcgaactacggatcgaaattgcctccgccgccaccgtcgccgccgagggaaaaggtttgggatttcttagacccttttgatacgtattatactccgtatactcctagtcgtgatacgagagagttaagagatgaattgggtgttccggatttagaggaagatgatgtagttgttaaggaagtacatgggaaacagaaatttgtagctgcagtttctgtggaagagccgttaggtaactccggtgctagcactagcggaggaggaggaggaggaggtaaggcttctttgtatcagactaggccaagtgtgtcagttgagaaagaagaaatggagcatgaggttcatattgtggagaaaaaaattgttgaggatagtggtggggatgaggtgaggaagagtaaggctgcggtggcacgtggtggtggcggtgtcagacgtggggttcctgaggttgcgaaagagatagaagctcagttcttgagagctgcagagtcaggaaatgagatcgcagtgatgcttgaagtggggaaacatccatatggtcgcaaaaatgtttcttcgaagaagctatatgaggggaccccatcaccgtctgtggtttcgtcagctcaatcatcaacctccaaaaaagctaaagctgaagcctcttcttcagtgactgctcctacttatgcagacattgaggcagagcttgctttaaagtctcgtaatctttcttcgacattgcacaagctccacctttgggagaagaagctttacgatgaggtcaaggccgaggaaaaaatgcgtgtaaaccatgagaaaaagttaaggaagcttaagcgtatggatgaaagaggtgccgagaatcaaaaagtagattcaacacgaaaattagttagaagtttgtccacaaagataaggattgcgattcaagttgttgacaaaatatcagttacaattaacaagataagagacgaagagctatggctgcaactcaatgaattgatccaagggcttagcaaaatgtggaaatccatgcttgagtgccataaaagtcagtgtgaggctattaaggaagccagaggtttaggccccattagagcaagcaaaaattttggtggggagcatctcgaggtaacaaggacgcttggatatgaacttataaattggattgtgggattttcgagttgggttagtgcgcaaaagggttttgtaagagagctgaatagttggcttatgaagtgtcttttctatgaacctgaggaaactccagatggaatcgttcctttttctcctggtcgtattggggctccaatgattttcgtgatctgtaaccagtgggaacaagctctagatagaatatcagaaaaggaagttatcgaggctatacgccgtttcacaacgagtgtgcttcatctttgggaacaagataggttagcaacccgggagaggattatagggcatggtgatcctaggaatatggaccgagaggaacagagaatacagaaagagattcaagaattggaaatgaaaatggttctggttggtccaggggaagataacattgtctaccaaagcgacactagtaacgagagtttacagggtagtcttcaacgtatatttgaagctatggagaggtttacagaggaatctctgaaagcttatgtagatctcttacatcgtgctgaagaagaagaatgcgactctcgggaaacagatgaagaagactaatggaaaaccgtggaggaaagtatcgcataaccaaaaaaactcatcagagttgtgaggcttaagacagctaattttgtgcttggccatggttgcatgatcagccattactcagctctgcgtggtttatagaccggagtaccgggccagatttatatatgactggtatttaatgggaagttacacataatcttccctaggcacgggcactaactgctccctccggagacattggataaagagatgggtcaaatgctcggttaacggaagaaggtgcttgccctattgaagaactggatggttagttaccatggttggatagaaatgtaagagaatttgccacacatcatgcaagttactggtgtagctcaagctacgataaatacaag

SEQ ID NO: 84193 - protein, 733 aa, Arabidopsis thaliana
  peptide (1)..(733): Ceres Seq. ID no. 12673635
  misc_feature (335)..(631): Pfam Name: Protein of unknown function (DUF632) Pfam Description: Protein of unknown function (DUF632)
  misc_feature (109)..(733): Homolog of NCBI NO: 15236929 NR Description: putative protein; protein id: At4g35240.1
  misc_feature (1)..(175): Homolog of NCBI NO: 15236929 NR Description: putative protein; protein id: At4g35240.1
  misc_feature (335)..(733): Homolog of NCBI NO: 18398315 NR Description: expressed protein; protein id: At2g17110.1, by cDNA: gi_15724285 [Arabidopsis thaliana] AT4g35240/F23E12_200 [Arabidopsis thaliana]
  misc_feature (115)..(720): Homolog of NCBI NO: 38345928 NR Description: OSJNBb0078D11.3 [Oryza sativa (japonica
  misc_feature (1)..(150): Homolog of NCBI NO: 38345928 NR Description: OSJNBb0078D11.3 [Oryza sativa (japonica
  misc_feature (192)..(717): Homolog of NCBI NO: 15223973 NR Description: unknown protein; protein id: At1g77500.1
  misc_feature (1)..(178): Homolog of NCBI NO: 15223973 NR Description: unknown protein; protein id: At1g77500.1
  misc_feature (307)..(715): Homolog of NCBI NO: 15217965 NR Description: hypothetical protein; protein id: At1g20530.1 thaliana] >gi|8778601|gb|AAF79609.1|AC027665_10 F5M15.15
  misc_feature (1)..(123): Homolog of NCBI NO: 15217965 NR Description: hypothetical protein; protein id: At1g20530.1 thaliana] >gi|8778601|gb|AAF79609.1|AC027665_10 F5M15.15
  misc_feature (148)..(238): Homolog of NCBI NO: 15217965 NR Description: hypothetical protein; protein id: At1g20530.1 thaliana] >gi|8778601|gb|AAF79609.1|AC027665_10 F5M15.15
MGCSTSKLDDLPAVALCRDRCSFLEAAIHQRYALSEAHVSYTQSLKAISHSLHQFINHHHRYNDSDSPKKAKPKMDSGSGHLDFDSDSDSDDDDDIDSLHSSPLHHHLEDDDSNPKSYLHMNYMKNSYMPPSLVYEQRPSSPQRVHFGESSSSSTSEYNPYLNSNYGSKLPPPPPSPPREKVWDFLDPFDTYYTPYTPSRDTRELRDELGVPDLEEDDVVVKEVHGKQKFVAAVSVEEPLGNSGASTSGGGGGGGKASLYQTRPSVSVEKEEMEHEVHIVEKKIVEDSGGDEVRKSKAAVARGGGGVRRGVPEVAKEIEAQFLRAAESGNEIAVMLEVGKHPYGRKNVSSKKLYEGTPSPSVVSSAQSSTSKKAKAEASSSVTAPTYADIEAELALKSRNLSSTLHKLHLWEKKLYDEVKAEEKMRVNHEKKLRKLKRMDERGAENQKVDSTRKLVRSLSTKIRIAIQVVDKISVTINKIRDEELWLQLNELIQGLSKMWKSMLECHKSQCEAIKEARGLGPIRASKNFGGEHLEVTRTLGYELINWIVGFSSWVSAQKGFVRELNSWLMKCLFYEPEETPDGIVPFSPGRIGAPMIFVICNQWEQALDRISEKEVIEAIRRFTTSVLHLWEQDRLATRERIIGHGDPRNMDREEQRIQKEIQELEMKMVLVGPGEDNIVYQSDTSNESLQGSLQRIFEAMERFTEESLKAYVDLLHRAEEEECDSRETDEED

SEQ ID NO: 84194 - protein, 659 aa, Arabidopsis thaliana
  peptide (1)..(659): Ceres Seq. ID no. 12673636
  misc_feature (261)..(557): Pfam Name: Protein of unknown function (DUF632) Pfam Description: Protein of unknown function (DUF632)
  misc_feature (35)..(659): Homolog of NCBI NO: 15236929 NR Description: putative protein; protein id: At4g35240.1
  misc_feature (1)..(101): Homolog of NCBI NO: 15236929 NR Description: putative protein; protein id: At4g35240.1
  misc_feature (261)..(659): Homolog of NCBI NO: 18398315 NR Description: expressed protein; protein id: At2g17110.1, by cDNA: gi_15724285 [Arabidopsis thaliana] AT4g35240/F23E12_200 [Arabidopsis thaliana]
  misc_feature (41)..(646): Homolog of NCBI NO: 38345928 NR Description: OSJNBb0078D11.3 [Oryza sativa (japonica
  misc_feature (1)..(76): Homolog of NCBI NO: 38345928 NR Description: OSJNBb0078D11.3 [Oryza sativa (japonica
  misc_feature (118)..(643): Homolog of NCBI NO: 15223973 NR Description: unknown protein; protein id: At1g77500.1
  misc_feature (1)..(104): Homolog of NCBI NO: 15223973 NR Description: unknown protein; protein id: At1g77500.1
  misc_feature (233)..(641): Homolog of NCBI NO: 15217965 NR Description: hypothetical protein; protein id: At1g20530.1 thaliana] >gi|8778601|gb|AAF79609.1|AC027665_10 F5M15.15
  misc_feature (1)..(49): Homolog of NCBI NO: 15217965 NR Description: hypothetical protein; protein id: At1g20530.1 thaliana] >gi|8778601|gb|AAF79609.1|AC027665_10 F5M15.15
  misc_feature (74)..(164): Homolog of NCBI NO: 15217965 NR Description: hypothetical protein; protein id: At1g20530.1 thaliana] >gi|8778601|gb|AAF79609.1|AC027665_10 F5M15.15
MDSGSGHLDFDSDSDSDDDDDIDSLHSSPLHHHLEDDDSNPKSYLHMNYMKNSYMPPSLVYEQRPSSPQRVHFGESSSSSTSEYNPYLNSNYGSKLPPPPPSPPREKVWDFLDPFDTYYTPYTPSRDTRELRDELGVPDLEEDDVVVKEVHGKQKFVAAVSVEEPLGNSGASTSGGGGGGGKASLYQTRPSVSVEKEEMEHEVHIVEKKIVEDSGGDEVRKSKAAVARGGGGVRRGVPEVAKEIEAQFLRAAESGNEIAVMLEVGKHPYGRKNVSSKKLYEGTPSPSVVSSAQSSTSKKAKAEASSSVTAPTYADIEAELALKSRNLSSTLHKLHLWEKKLYDEVKAEEKMRVNHEKKLRKLKRMDERGAENQKVDSTRKLVRSLSTKIRIAIQVVDKISVTINKIRDEELWLQLNELIQGLSKMWKSMLECHKSQCEAIKEARGLGPIRASKNFGGEHLEVTRTLGYELINWIVGFSSWVSAQKGFVRELNSWLMKCLFYEPEETPDGIVPFSPGRIGAPMIFVICNQWEQALDRISEKEVIEAIRRFTTSVLHLWEQDRLATRERIIGHGDPRNMDREEQRIQKEIQELEMKMVLVGPGEDNIVYQSDTSNESLQGSLQRIFEAMERFTEESLKAYVDLLHRAEEEECDSRETDEED

SEQ ID NO: 84195 - protein, 613 aa, Arabidopsis thaliana
  peptide (1)..(613): Ceres Seq. ID no. 12673637
  misc_feature (215)..(511): Pfam Name: Protein of unknown function (DUF632) Pfam Description: Protein of unknown function (DUF632)
  misc_feature (1)..(613): Homolog of NCBI NO: 15236929 NR Description: putative protein; protein id: At4g35240.1
  misc_feature (1)..(55): Homolog of NCBI NO: 15236929 NR Description: putative protein; protein id: At4g35240.1
  misc_feature (215)..(613): Homolog of NCBI NO: 18398315 NR Description: expressed protein; protein id: At2g17110.1, by cDNA: gi_15724285 [Arabidopsis thaliana] AT4g35240/F23E12_200 [Arabidopsis thaliana]
  misc_feature (1)..(600): Homolog of NCBI NO: 38345928 NR Description: OSJNBb0078D11.3 [Oryza sativa (japonica
  misc_feature (1)..(30): Homolog of NCBI NO: 38345928 NR Description: OSJNBb0078D11.3 [Oryza sativa (japonica
  misc_feature (72)..(597): Homolog of NCBI NO: 15223973 NR Description: unknown protein; protein id: At1g77500.1
  misc_feature (1)..(58): Homolog of NCBI NO: 15223973 NR Description: unknown protein; protein id: At1g77500.1
  misc_feature (187)..(595): Homolog of NCBI NO: 15217965 NR Description: hypothetical protein; protein id: At1g20530.1 thaliana] >gi|8778601|gb|AAF79609.1|AC027665_10 F5M15.15
  misc_feature (28)..(118): Homolog of NCBI NO: 15217965 NR Description: hypothetical protein; protein id: At1g20530.1 thaliana] >gi|8778601|gb|AAF79609.1|AC027665_10 F5M15.15
  misc_feature (122)..(609): Homolog of NCBI NO: 15219083 NR Description: putative bzip-like transcription factor; protein At1g21740.1 [Arabidopsis thaliana] >gi|25518309|pir||A86351
MNYMKNSYMPPSLVYEQRPSSPQRVHFGESSSSSTSEYNPYLNSNYGSKLPPPPPSPPREKVWDFLDPFDTYYTPYTPSRDTRELRDELGVPDLEEDDVVVKEVHGKQKFVAAVSVEEPLGNSGASTSGGGGGGGKASLYQTRPSVSVEKEEMEHEVHIVEKKIVEDSGGDEVRKSKAAVARGGGGVRRGVPEVAKEIEAQFLRAAESGNEIAVMLEVGKHPYGRKNVSSKKLYEGTPSPSVVSSAQSSTSKKAKAEASSSVTAPTYADIEAELALKSRNLSSTLHKLHLWEKKLYDEVKAEEKMRVNHEKKLRKLKRMDERGAENQKVDSTRKLVRSLSTKIRIAIQVVDKISVTINKIRDEELWLQLNELIQGLSKMWKSMLECHKSQCEAIKEARGLGPIRASKNFGGEHLEVTRTLGYELINWIVGFSSWVSAQKGFVRELNSWLMKCLFYEPEETPDGIVPFSPGRIGAPMIFVICNQWEQALDRISEKEVIEAIRRFTTSVLHLWEQDRLATRERIIGHGDPRNMDREEQRIQKEIQELEMKMVLVGPGEDNIVYQSDTSNESLQGSLQRIFEAMERFTEESLKAYVDLLHRAEEEECDSRETDEED

SEQ ID NO: 84196 - DNA, 3182 bp, Arabidopsis thaliana
  misc_feature (1)..(3182): Ceres Seq. ID no. 12673666
  misc_feature: MA Experiment ID: 20000307 Result: Down-regulated in Transcription
  misc_feature: MA Experiment 20000307 PARAMETER Experiment Name: At_Germinating_Seeds_Sub_P Parameter: Age (hr) Value: 24 vs. 0
  misc_feature: MA Experiment 20000307 PARAMETER Experiment Name: At_Germinating_Seeds_Sub_P Parameter: Organism Value: A. thaliana
  misc_feature: MA Experiment 20000307 PARAMETER Experiment Name: At_Germinating_Seeds_Sub_P Parameter: Plant Line Value: WS
  misc_feature: MA Experiment 20000307 PARAMETER Experiment Name: At_Germinating_Seeds_Sub_P Parameter: Tissue Value: Germinating Seeds
  misc_feature: MA Experiment ID: 20000314 Result: Up-regulated in Transcription
  misc_feature: MA Experiment 20000314 PARAMETER Experiment Name: At_14day_Shoots-Roots_Sub_P Parameter: Age (day) Value: 14
  misc_feature: MA Experiment 20000314 PARAMETER Experiment Name: At_14day_Shoots-Roots_Sub_P Parameter: Organism Value: A. thaliana
  misc_feature: MA Experiment 20000314 PARAMETER Experiment Name: At_14day_Shoots-Roots_Sub_P Parameter: Plant Line Value: WS
  misc_feature: MA Experiment 20000314 PARAMETER Experiment Name: At_14day_Shoots-Roots_Sub_P Parameter: Tissue Value: Roots vs. Whole Plant
acttgtgtccagaagaaaaagaaggaaaaaaagaacacaccattcaagaaagagagaagcttcttgtgataagaaatttcacagattgggttttaacattccaaggagaggactttgtcttgtctctattcatcttcaagacccttatgagtttcggttcttgagtaaacaacagctaagcacagtctctgagaacttgaggatttggtagtatctgttggaggtataaaaacgaatctttagacatggaagatgatggtggtagtgatggaggcgaaggaaatggtgggttttcacctaattctagctttggggcattcgctgacactgccatggatttggatttcatggatgaactcttgtttgatggatgttggctagagacaacagatagtaagagcttgaagcagacagaacaatctccttcagcttctaccgccatgaatgacaatagccctttcctctgctttggtgagaatccatctcaagataatttctctaatgaagaaacagagagaatgtttcctcaggctgaaaagtttctcctagaagaagctgaggtgggaaaaagttggtggattgctccaagtgcaagtgaaggcccgtcttcatctgtgaaggagaggctactacaagctattagtggtcttaacgaggcggtgcaagataaggacttcttggttcagatatgggtgccaattcagcaggaagggaagagctttcttactacttgggctcagccacatttattcaaccaagaatactccagccttgcagaatacagacatgtttcagagacttataatttcccggctgatgagggtatgaaagattttgtgggtcttcccggtcgtgttttcttgcagaagtttcctgagtggactcctgatgtgcgtttctttagaagagatgaatatccacgcatcaaagaagcacaaaagtgtgatgttcgtggttcacttgcccttcctgttttcgaaagaggtagtgggacttgtttgggtgttgttgagatcgtcacaacaactcagaagatgaattaccggcaagaacttgagaagatgtgtaaagctcttgaggccgtcgatctaaggagttcaagtaacttgaacactccaagctctgagtttctgcaggtctatagtgatttctactgtgctgcattacctgaaataaaagatttcctggccacaatctgcagatcatatgattttcctctagctttgtcatgggcgccgtgtgctcggcaagggaaagttggttcccgacattctgatgagaacttctctgagtgtgtttcaacaatcgattctgcttgttctgtccccgacgaacagagcaaaagtttttgggaggcatgctctgaacaccatctgctccagggggaaggcattgttgggaaagcatttgaagccaccaaactcttttttgtgcccgaagtggccacatttagcaagactaactacccccttgcacaccacgccaagatatctggactacatgctgctttagcagttccattaaagagcaaatctggtttggttgagtttgtgttggaatttttctttccgaaagcatgccttgacactgaagcgcaacaggaaatgctcaagtcactatgtgtgacactgcagcaagatttcaggagttcaaatcttttcatcaaagacctagagttagaagtcgtattacctgtaagagagacaatgctcttctcagaaaacctgctatgtggagcagaaaccgtagagtcgttgacagaaattcaaatgcaagaatcctcatggatcgcccacatgataaaggcaaacgagaagggtaaagatgtatcactttcttgggagtaccagaaagaagatcctaaagagctctcatctggccgggagaacagtcagcttgatccagtccccaataatgttcctttagaagctgagcaattacagcaagcatcaactccaggactcagagtcgacatcggtccaagcacagaatcagcttcgactggtgggggaaatatgttaagcagtaggagaccaggggagaaaaaaagagcaaaaacagaaaagaccattggcttggaggttcttcgacaatactttgctggaagcctcaaggatgcagccaagagcattggtgtttgtccaactaccttgaaaaggatatgcaggcaacatggaataatgcgatggccctcccgaaaaatcaagaaggttgggcattcgttgaagaaactccaactagttatggactctgtccaaggtgcgcagggctctatccaactcgattcattctatacaagcttcccagagttgaactccccaaatatgtctagcaatggcccttccttgaagagtaatgaacagccaagtcatttgaatgctcaaaccgataatggtattatggcagaggaaaaccccaggtcaccatcatcttcttgcagcaagagctctggttcaagcaacaataatgagaatactggaaacattctagttgctgaggatgctgatgcggtgttaaagagagctcatagcgaagcacaactgcataatgtgaatcaggaggaaacaaaatgtcttgcaagaacccagagccataaaacattcaaggagcctcttgttcttgataattcatctccattaacaggtagtagcaacacgagtttaagagctagaggtgccatcaaagtgaaagcgacatttggtgaggccagaatacggtttaccttactcccgagttggggcttcgcagagctgaagcaagagattgctaggcgtttcaacatagatgacatttcctggtttgaccttaagtacctggatgatgataaggagtgggttcttctgacatgtgaagcggatctcgtggaatgcattgacatatatagattaacacagacccacacaattaaaataagtctgaacgaagcttctcaagtcaagctaagtggttcttttggcaacactggtctttcctgaaaaacattaaacgaagttttgtaactgcaaagcaccaggaagattctactgatttttttagcttttgtagaaatctcacttaccttttcagcatgggaatcctgtataaacatatttccagttccctgaacaacattttggaagtggcagtagtaactggtctcctgtattgccctagcagatttttgtataaaagagatgaattcc

SEQ ID NO: 84197 - protein, 909 aa, Arabidopsis thaliana
  peptide (1)..(909): Ceres Seq. ID no. 12673667
  misc_feature (811)..(894): Pfam Name: PB1 domain Pfam Description: PB1 domain
  misc_feature (95)..(513): Homolog of NCBI NO: 7486018 NR Description: hypothetical protein F23E12.170 - Arabidopsis >gi|3080423|emb|CAA18742.1| putative protein [Arabidopsis >gi|7270479|emb|CAB80244.1| putative protein [Arabidopsis
  misc_feature (524)..(901): Homolog of NCBI NO: 7486018 NR Description: hypothetical protein F23E12.170 - Arabidopsis >gi|3080423|emb|CAA18742.1| putative protein [Arabidopsis >gi|7270479|emb|CAB80244.1| putative protein [Arabidopsis
  misc_feature (4)..(94): Homolog of NCBI NO: 7486018 NR Description: hypothetical protein F23E12.170 - Arabidopsis >gi|3080423|emb|CAA18742.1| putative protein [Arabidopsis >gi|7270479|emb|CAB80244.1| putative protein [Arabidopsis
  misc_feature (95)..(513): Homolog of NCBI NO: 30690272 NR Description: RWP-RK domain containing protein [Arabidopsis
  misc_feature (629)..(908): Homolog of NCBI NO: 30690272 NR Description: RWP-RK domain containing protein [Arabidopsis
  misc_feature (4)..(94): Homolog of NCBI NO: 30690272 NR Description: RWP-RK domain containing protein [Arabidopsis
  misc_feature (288)..(738): Homolog of NCBI NO: 30690272 NR Description: RWP-RK domain containing protein [Arabidopsis
  misc_feature (23)..(738): Homolog of NCBI NO: 20503001 NR Description: Putataive nodule inception protein [Oryza sativa
  misc_feature (708)..(909): Homolog of NCBI NO: 20503001 NR Description: Putataive nodule inception protein [Oryza sativa
  misc_feature (27)..(513): Homolog of NCBI NO: 15223014 NR Description: hypothetical protein; protein id: At1g76350.1
MEDDGGSDGGEGNGGFSPNSSFGAFADTAMDLDFMDELLFDGCWLETTDSKSLKQTEQSPSASTAMNDNSPFLCFGENPSQDNFSNEETERMFPQAEKFLLEEAEVGKSWWIAPSASEGPSSSVKERLLQAISGLNEAVQDKDFLVQIWVPIQQEGKSFLTTWAQPHLFNQEYSSLAEYRHVSETYNFPADEGMKDFVGLPGRVFLQKFPEWTPDVRFFRRDEYPRIKEAQKCDVRGSLALPVFERGSGTCLGVVEIVTTTQKMNYRQELEKMCKALEAVDLRSSSNLNTPSSEFLQVYSDFYCAALPEIKDFLATICRSYDFPLALSWAPCARQGKVGSRHSDENFSECVSTIDSACSVPDEQSKSFWEACSEHHLLQGEGIVGKAFEATKLFFVPEVATFSKTNYPLAHHAKISGLHAALAVPLKSKSGLVEFVLEFFFPKACLDTEAQQEMLKSLCVTLQQDFRSSNLFIKDLELEVVLPVRETMLFSENLLCGAETVESLTEIQMQESSWIAHMIKANEKGKDVSLSWEYQKEDPKELSSGRENSQLDPVPNNVPLEAEQLQQASTPGLRVDIGPSTESASTGGGNMLSSRRPGEKKRAKTEKTIGLEVLRQYFAGSLKDAAKSIGVCPTTLKRICRQHGIMRWPSRKIKKVGHSLKKLQLVMDSVQGAQGSIQLDSFYTSFPELNSPNMSSNGPSLKSNEQPSHLNAQTDNGIMAEENPRSPSSSCSKSSGSSNNNENTGNILVAEDADAVLKRAHSEAQLHNVNQEETKCLARTQSHKTFKEPLVLDNSSPLTGSSNTSLRARGAIKVKATFGEARIRFTLLPSWGFAELKQEIARRFNIDDISWFDLKYLDDDKEWVLLTCEADLVECIDIYRLTQTHTIKISLNEASQVKLSGSFGNTGLS

SEQ ID NO: 84198 - protein, 880 aa, Arabidopsis thaliana
  peptide (1)..(880): Ceres Seq. ID no. 12673668
  misc_feature (782)..(865): Pfam Name: PB1 domain Pfam Description: PB1 domain
  misc_feature (66)..(484): Homolog of NCBI NO: 7486018 NR Description: hypothetical protein F23E12.170 - Arabidopsis >gi|3080423|emb|CAA18742.1| putative protein [Arabidopsis >gi|7270479|emb|CAB80244.1| putative protein [Arabidopsis
  misc_feature (495)..(872): Homolog of NCBI NO: 7486018 NR Description: hypothetical protein F23E12.170 - Arabidopsis >gi|3080423|emb|CAA18742.1| putative protein [Arabidopsis >gi|7270479|emb|CAB80244.1| putative protein [Arabidopsis
  misc_feature (1)..(65): Homolog of NCBI NO: 7486018 NR Description: hypothetical protein F23E12.170 - Arabidopsis >gi|3080423|emb|CAA18742.1| putative protein [Arabidopsis >gi|7270479|emb|CAB80244.1| putative protein [Arabidopsis
  misc_feature (66)..(484): Homolog of NCBI NO: 30690272 NR Description: RWP-RK domain containing protein [Arabidopsis
  misc_feature (600)..(879): Homolog of NCBI NO: 30690272 NR Description: RWP-RK domain containing protein [Arabidopsis
  misc_feature (1)..(65): Homolog of NCBI NO: 30690272 NR Description: RWP-RK domain containing protein [Arabidopsis
  misc_feature (259)..(709): Homolog of NCBI NO: 30690272 NR Description: RWP-RK domain containing protein [Arabidopsis
  misc_feature (1)..(709): Homolog of NCBI NO: 20503001 NR Description: Putataive nodule inception protein [Oryza sativa
  misc_feature (679)..(880): Homolog of NCBI NO: 20503001 NR Description: Putataive nodule inception protein [Oryza sativa
  misc_feature (1)..(484): Homolog of NCBI NO: 15223014 NR Description: hypothetical protein; protein id: At1g76350.1
MDLDFMDELLFDGCWLETTDSKSLKQTEQSPSASTAMNDNSPFLCFGENPSQDNFSNEETERMFPQAEKFLLEEAEVGKSWWIAPSASEGPSSSVKERLLQAISGLNEAVQDKDFLVQIWVPIQQEGKSFLTTWAQPHLFNQEYSSLAEYRHVSETYNFPADEGMKDFVGLPGRVFLQKFPEWTPDVRFFRRDEYPRIKEAQKCDVRGSLALPVFERGSGTCLGVVEIVTTTQKMNYRQELEKMCKALEAVDLRSSSNLNTPSSEFLQVYSDFYCAALPEIKDFLATICRSYDFPLALSWAPCARQGKVGSRHSDENFSECVSTIDSACSVPDEQSKSFWEACSEHHLLQGEGIVGKAFEATKLFFVPEVATFSKTNYPLAHHAKISGLHAALAVPLKSKSGLVEFVLEFFFPKACLDTEAQQEMLKSLCVTLQQDFRSSNLFIKDLELEVVLPVRETMLFSENLLCGAETVESLTEIQMQESSWIAHMIKANEKGKDVSLSWEYQKEDPKELSSGRENSQLDPVPNNVPLEAEQLQQASTPGLRVDIGPSTESASTGGGNMLSSRRPGEKKRAKTEKTIGLEVLRQYFAGSLKDAAKSIGVCPTTLKRICRQHGIMRWPSRKIKKVGHSLKKLQLVMDSVQGAQGSIQLDSFYTSFPELNSPNMSSNGPSLKSNEQPSHLNAQTDNGIMAEENPRSPSSSCSKSSGSSNNNENTGNILVAEDADAVLKRAHSEAQLHNVNQEETKCLARTQSHKTFKEPLVLDNSSPLTGSSNTSLRARGAIKVKATFGEARIRFTLLPSWGFAELKQEIARRFNIDDISWFDLKYLDDDKEWVLLTCEADLVECIDIYRLTQTHTIKISLNEASQVKLSGSFGNTGLS

SEQ ID NO: 84199 - protein, 875 aa, Arabidopsis thaliana
  peptide (1)..(875): Ceres Seq. ID no. 12673669
  misc_feature (777)..(860): Pfam Name: PB1 domain Pfam Description: PB1 domain
  misc_feature (61)..(479): Homolog of NCBI NO: 7486018 NR Description: hypothetical protein F23E12.170 - Arabidopsis >gi|3080423|emb|CAA18742.1| putative protein [Arabidopsis >gi|7270479|emb|CAB80244.1| putative protein [Arabidopsis
  misc_feature (490)..(867): Homolog of NCBI NO: 7486018 NR Description: hypothetical protein F23E12.170 - Arabidopsis >gi|3080423|emb|CAA18742.1| putative protein [Arabidopsis >gi|7270479|emb|CAB80244.1| putative protein [Arabidopsis
  misc_feature (1)..(60): Homolog of NCBI NO: 7486018 NR Description: hypothetical protein F23E12.170 - Arabidopsis >gi|3080423|emb|CAA18742.1| putative protein [Arabidopsis >gi|7270479|emb|CAB80244.1| putative protein [Arabidopsis
  misc_feature (61)..(479): Homolog of NCBI NO: 30690272 NR Description: RWP-RK domain containing protein [Arabidopsis
  misc_feature (595)..(874): Homolog of NCBI NO: 30690272 NR Description: RWP-RK domain containing protein [Arabidopsis
  misc_feature (1)..(60): Homolog of NCBI NO: 30690272 NR Description: RWP-RK domain containing protein [Arabidopsis
  misc_feature (254)..(704): Homolog of NCBI NO: 30690272 NR Description: RWP-RK domain containing protein [Arabidopsis
  misc_feature (1)..(704): Homolog of NCBI NO: 20503001 NR Description: Putataive nodule inception protein [Oryza sativa
  misc_feature (674)..(875): Homolog of NCBI NO: 20503001 NR Description: Putataive nodule inception protein [Oryza sativa
  misc_feature (1)..(479): Homolog of NCBI NO: 15223014 NR Description: hypothetical protein; protein id: At1g76350.1
MDELLFDGCWLETTDSKSLKQTEQSPSASTAMNDNSPFLCFGENPSQDNFSNEETERMFPQAEKFLLEEAEVGKSWWIAPSASEGPSSSVKERLLQAISGLNEAVQDKDFLVQIWVPIQQEGKSFLTTWAQPHLFNQEYSSLAEYRHVSETYNFPADEGMKDFVGLPGRVFLQKFPEWTPDVRFFRRDEYPRIKEAQKCDVRGSLALPVFERGSGTCLGVVEIVTTTQKMNYRQELEKMCKALEAVDLRSSSNLNTPSSEFLQVYSDFYCAALPEIKDFLATICRSYDFPLALSWAPCARQGKVGSRHSDENFSECVSTIDSACSVPDEQSKSFWEACSEHHLLQGEGIVGKAFEATKLFFVPEVATFSKTNYPLAHHAKISGLHAALAVPLKSKSGLVEFVLEFFFPKACLDTEAQQEMLKSLCVTLQQDFRSSNLFIKDLELEVVLPVRETMLFSENLLCGAETVESLTEIQMQESSWIAHMIKANEKGKDVSLSWEYQKEDPKELSSGRENSQLDPVPNNVPLEAEQLQQASTPGLRVDIGPSTESASTGGGNMLSSRRPGEKKRAKTEKTIGLEVLRQYFAGSLKDAAKSIGVCPTTLKRICRQHGIMRWPSRKIKKVGHSLKKLQLVMDSVQGAQGSIQLDSFYTSFPELNSPNMSSNGPSLKSNEQPSHLNAQTDNGIMAEENPRSPSSSCSKSSGSSNNNENTGNILVAEDADAVLKRAHSEAQLHNVNQEETKCLARTQSHKTFKEPLVLDNSSPLTGSSNTSLRARGAIKVKATFGEARIRFTLLPSWGFAELKQEIARRFNIDDISWFDLKYLDDDKEWVLLTCEADLVECIDIYRLTQTHTIKISLNEASQVKLSGSFGNTGLS

SEQ ID NO: 84200 - DNA, 4243 bp, Arabidopsis thaliana
  misc_feature (1)..(4243): Ceres Seq. ID no. 12673693
  misc_feature: MA Experiment ID: 20000182 Result: Up-regulated in Transcription
  misc_feature: MA Experiment 20000182 PARAMETER Experiment Name: At_2mM_SA_P Parameter: Age (day) Value: 14
  misc_feature: MA Experiment 20000182 PARAMETER Experiment Name: At_2mM_SA_P Parameter: Organism Value: A. thaliana
  misc_feature: MA Experiment 20000182 PARAMETER Experiment Name: At_2mM_SA_P Parameter: Plant Line Value: WS
  misc_feature: MA Experiment 20000182 PARAMETER Experiment Name: At_2mM_SA_P Parameter: Timepoint (hr) Value: 6
  misc_feature: MA Experiment 20000182 PARAMETER Experiment Name: At_2mM_SA_P Parameter: Tissue Value: Aerial
  misc_feature: MA Experiment 20000182 PARAMETER Experiment Name: At_2mM_SA_P Parameter: Treatment Value: 2mM SA vs. No Treatment
  misc_feature: MA Experiment ID: 20000185 Result: Up-regulated in Transcription
  misc_feature: MA Experiment 20000185 PARAMETER Experiment Name: At_Roots__P Parameter: Age (day) Value: 7 vs. 21
  misc_feature: MA Experiment 20000185 PARAMETER Experiment Name: At_Roots__P Parameter: Organism Value: A. thaliana
  misc_feature: MA Experiment 20000185 PARAMETER Experiment Name: At_Roots__P Parameter: Tissue Value: Roots vs. Whole Plant
  misc_feature: MA Experiment ID: 20000234 Result: Down-regulated in Transcription
  misc_feature: MA Experiment 20000234 PARAMETER Experiment Name: At_Siliques_P Parameter: Age (day) Value: 21
  misc_feature: MA Experiment 20000234 PARAMETER Experiment Name: At_Siliques_P Parameter: Organism Value: A. thaliana
  misc_feature: MA Experiment 20000234 PARAMETER Experiment Name: At_Siliques_P Parameter: Plant Line Value: WS
  misc_feature: MA Experiment 20000234 PARAMETER Experiment Name: At_Siliques_P Parameter: Tissue Value: Less Than 5mm Siliques vs. Whole Plant
  misc_feature: MA Experiment ID: 20000235 Result: Down-regulated in Transcription
  misc_feature: MA Experiment 20000235 PARAMETER Experiment Name: At_Siliques_P Parameter: Age (day) Value: 21
  misc_feature: MA Experiment 20000235 PARAMETER Experiment Name: At_Siliques_P Parameter: Organism Value: A. thaliana
  misc_feature: MA Experiment 20000235 PARAMETER Experiment Name: At_Siliques_P Parameter: Plant Line Value: WS
  misc_feature: MA Experiment 20000235 PARAMETER Experiment Name: At_Siliques_P Parameter: Tissue Value: 5-10mm Siliques vs. Whole Plant
  misc_feature: MA Experiment ID: 20000264 Result: Down-regulated in Transcription
  misc_feature: MA Experiment 20000264 PARAMETER Experiment Name: At_Open_Flower_P Parameter: Age (day) Value: 21
  misc_feature: MA Experiment 20000264 PARAMETER Experiment Name: At_Open_Flower_P Parameter: Plant Line Value: WS
  misc_feature: MA Experiment 20000264 PARAMETER Experiment Name: At_Open_Flower_P Parameter: Tissue Value: Open Flower vs. Whole Plant
  misc_feature: MA Experiment ID: 20000265 Result: Down-regulated in Transcription
  misc_feature: MA Experiment 20000265 PARAMETER Experiment Name: At_Open_Flower_P Parameter: Age (day) Value: 21
  misc_feature: MA Experiment 20000265 PARAMETER Experiment Name: At_Open_Flower_P Parameter: Plant Line Value: WS
  misc_feature: MA Experiment 20000265 PARAMETER Experiment Name: At_Open_Flower_P Parameter: Tissue Value: Closed Flower vs. Whole Plant
  misc_feature: MA Experiment ID: 20000437 Result: Down-regulated in Transcription
  misc_feature: MA Experiment 20000437 PARAMETER Experiment Name: At_Drought_P Parameter: Age (day) Value: 8
  misc_feature: MA Experiment 20000437 PARAMETER Experiment Name: At_Drought_P Parameter: Organism Value: A. thaliana
  misc_feature: MA Experiment 20000437 PARAMETER Experiment Name: At_Drought_P Parameter: Plant Line Value: WS
  misc_feature: MA Experiment 20000437 PARAMETER Experiment Name: At_Drought_P Parameter: Timepoint (hr) Value: 24
  misc_feature: MA Experiment 20000437 PARAMETER Experiment Name: At_Drought_P Parameter: Tissue Value: Whole Plant
  misc_feature: MA Experiment 20000437 PARAMETER Experiment Name: At_Drought_P Parameter: Treatment Value: Drought vs. No Drought
  misc_feature: MA Experiment ID: 20000438 Result: Down-regulated in Transcription
  misc_feature: MA Experiment 20000438 PARAMETER Experiment Name: At_Shoots__P Parameter: Age (day) Value: 14
  misc_feature: MA Experiment 20000438 PARAMETER Experiment Name: At_Shoots__P Parameter: Tissue Value: Shoots vs. Whole Plant
  misc_feature: MA Experiment ID: 20000439 Result: Up-regulated in Transcription
  misc_feature: MA Experiment 20000439 PARAMETER Experiment Name: At_Roots__P Parameter: Age (day) Value: 14 vs. 21
  misc_feature: MA Experiment 20000439 PARAMETER Experiment Name: At_Roots__P Parameter: Organism Value: A. thaliana
  misc_feature: MA Experiment 20000439 PARAMETER Experiment Name: At_Roots__P Parameter: Tissue Value: Roots vs. Whole Plant
  misc_feature: MA Experiment ID: 20000441 Result: Up-regulated in Transcription
  misc_feature: MA Experiment 20000441 PARAMETER Experiment Name: At_1uM_BR-BRZ__P Parameter: Tissue Value: Shoot Apices
  misc_feature: MA Experiment 20000441 PARAMETER Experiment Name: At_1uM_BR-BRZ__P Parameter: Treatment Value: 1uM BR vs. No Treatment
  misc_feature: MA Experiment ID: 20000453 Result: Down-regulated in Transcription
  misc_feature: MA Experiment 20000453 PARAMETER Experiment Name: At_100uM_ABA_P Parameter: Age (day) Value: 15
  misc_feature: MA Experiment 20000453 PARAMETER Experiment Name: At_100uM_ABA_P Parameter: Organism Value: A. thaliana
  misc_feature: MA Experiment 20000453 PARAMETER Experiment Name: At_100uM_ABA_P Parameter: Plant Line Value: WS
  misc_feature: MA Experiment 20000453 PARAMETER Experiment Name: At_100uM_ABA_P Parameter: Timepoint (hr) Value: 24
  misc_feature: MA Experiment 20000453 PARAMETER Experiment Name: At_100uM_ABA_P Parameter: Tissue Value: Aerial
  misc_feature: MA Experiment 20000453 PARAMETER Experiment Name: At_100uM_ABA_P Parameter: Treatment Value: 100uM ABA vs. No Treatment
  misc_feature: MA Experiment ID: 20000527 Result: Down-regulated in Transcription
  misc_feature: MA Experiment 20000527 PARAMETER Experiment Name: At_10percent_PEG_P Parameter: Age (day) Value: 20
  misc_feature: MA Experiment 20000527 PARAMETER Experiment Name: At_10percent_PEG_P Parameter: Organism Value: A. thaliana
  misc_feature: MA Experiment 20000527 PARAMETER Experiment Name: At_10percent_PEG_P Parameter: Plant Line Value: WS
  misc_feature: MA Experiment 20000527 PARAMETER Experiment Name: At_10percent_PEG_P Parameter: Timepoint (day) Value: 20
  misc_feature: MA Experiment 20000527 PARAMETER Experiment Name: At_10percent_PEG_P Parameter: Tissue Value: Whole Plant
  misc_feature: MA Experiment 20000527 PARAMETER Experiment Name: At_10percent_PEG_P Parameter: Treatment Value: 10percent PEG vs. No Treatment
  misc_feature: MA Experiment ID: 20000794 Result: Down-regulated in Transcription
  misc_feature: MA Experiment 20000794 PARAMETER Experiment Name: At_Petals_P Parameter: Age (day) Value: 23-25 days
  misc_feature: MA Experiment 20000794 PARAMETER Experiment Name: At_Petals_P Parameter: Plant Line Value: WS
  misc_feature: MA Experiment 20000794 PARAMETER Experiment Name: At_Petals_P Parameter: Tissue Value: Petals vs. Whole plant
  misc_feature: MA Experiment ID: 20001554 Result: Down-regulated in Transcription
  misc_feature: MA Experiment 20001554 PARAMETER Experiment Name: At_Drought_Soil_Dry_P Parameter: Age (day) Value: 21
  misc_feature: MA Experiment 20001554 PARAMETER Experiment Name: At_Drought_Soil_Dry_P Parameter: Organism Value: A. thaliana
  misc_feature: MA Experiment 20001554 PARAMETER Experiment Name: At_Drought_Soil_Dry_P Parameter: Plant Line Value: WS
  misc_feature: MA Experiment 20001554 PARAMETER Experiment Name: At_Drought_Soil_Dry_P Parameter: Post Timepoint (hr) Value: None
  misc_feature: MA Experiment 20001554 PARAMETER Experiment Name: At_Drought_Soil_Dry_P Parameter: Post-Treatment Value: None
  misc_feature: MA Experiment 20001554 PARAMETER Experiment Name: At_Drought_Soil_Dry_P Parameter: Timepoint (day) Value: 7
  misc_feature: MA Experiment 20001554 PARAMETER Experiment Name: At_Drought_Soil_Dry_P Parameter: Treatment Value: Drought vs. No Drought
  misc_feature: MA Experiment ID: 20001556 Result: Down-regulated in Transcription
  misc_feature: MA Experiment 20001556 PARAMETER Experiment Name: At_Drought_Soil_Dry_P Parameter: Age (day) Value: 26
  misc_feature: MA Experiment 20001556 PARAMETER Experiment Name: At_Drought_Soil_Dry_P Parameter: Organism Value: A. thaliana
  misc_feature: MA Experiment 20001556 PARAMETER Experiment Name: At_Drought_Soil_Dry_P Parameter: Plant Line Value: WS
  misc_feature: MA Experiment 20001556 PARAMETER Experiment Name: At_Drought_Soil_Dry_P Parameter: Post Timepoint (hr) Value: None
  misc_feature: MA Experiment 20001556 PARAMETER Experiment Name: At_Drought_Soil_Dry_P Parameter: Post-Treatment Value: None
  misc_feature: MA Experiment 20001556 PARAMETER Experiment Name: At_Drought_Soil_Dry_P Parameter: Timepoint (day) Value: 12
  misc_feature: MA Experiment 20001556 PARAMETER Experiment Name: At_Drought_Soil_Dry_P Parameter: Treatment Value: Drought vs. No Drought
  misc_feature: MA Experiment ID: 20001558 Result: Down-regulated in Transcription
  misc_feature: MA Experiment 20001558 PARAMETER Experiment Name: At_Drought_Soil_Dry_P Parameter: Age (day) Value: 27
  misc_feature: MA Experiment 20001558 PARAMETER Experiment Name: At_Drought_Soil_Dry_P Parameter: Organism Value: A. thaliana
  misc_feature: MA Experiment 20001558 PARAMETER Experiment Name: At_Drought_Soil_Dry_P Parameter: Plant Line Value: WS
  misc_feature: MA Experiment 20001558 PARAMETER Experiment Name: At_Drought_Soil_Dry_P Parameter: Post Timepoint (hr) Value: 6
  misc_feature: MA Experiment 20001558 PARAMETER Experiment Name: At_Drought_Soil_Dry_P Parameter: Post-Treatment Value: Re-Water vs. No Drought
  misc_feature: MA Experiment 20001558 PARAMETER Experiment Name: At_Drought_Soil_Dry_P Parameter: Timepoint (day) Value: 13
  misc_feature: MA Experiment 20001558 PARAMETER Experiment Name: At_Drought_Soil_Dry_P Parameter: Treatment Value: Drought vs. No Drought
  misc_feature: MA Experiment ID: 20001771 Result: Down-regulated in Transcription
  misc_feature: MA Experiment 20001771 PARAMETER Experiment Name: At_Far-red-enriched-adult_P Parameter: Age (day) Value: 28
  misc_feature: MA Experiment 20001771 PARAMETER Experiment Name: At_Far-red-enriched-adult_P Parameter: Light Value: Far-red enriched vs. White
  misc_feature: MA Experiment 20001771 PARAMETER Experiment Name: At_Far-red-enriched-adult_P Parameter: Organism Value: A. thaliana
  misc_feature: MA Experiment 20001771 PARAMETER Experiment Name: At_Far-red-enriched-adult_P Parameter: Plant Line Value: Columbia
  misc_feature: MA Experiment 20001771 PARAMETER Experiment Name: At_Far-red-enriched-adult_P Parameter: Timepoint (hr) Value: 16
  misc_feature: MA Experiment 20001771 PARAMETER Experiment Name: At_Far-red-enriched-adult_P Parameter: Tissue Value: Aerial
  misc_feature: MA Experiment ID: 20001773 Result: Down-regulated in Transcription
  misc_feature: MA Experiment 20001773 PARAMETER Experiment Name: At_Far-red-enriched-adult_P Parameter: Age (day) Value: 30
  misc_feature: MA Experiment 20001773 PARAMETER Experiment Name: At_Far-red-enriched-adult_P Parameter: Light Value: Far-red enriched vs. White
  misc_feature: MA Experiment 20001773 PARAMETER Experiment Name: At_Far-red-enriched-adult_P Parameter: Organism Value: A. thaliana
  misc_feature: MA Experiment 20001773 PARAMETER Experiment Name: At_Far-red-enriched-adult_P Parameter: Plant Line Value: Columbia
  misc_feature: MA Experiment 20001773 PARAMETER Experiment Name: At_Far-red-enriched-adult_P Parameter: Timepoint (hr) Value: 48
  misc_feature: MA Experiment 20001773 PARAMETER Experiment Name: At_Far-red-enriched-adult_P Parameter: Tissue Value: Aerial
  misc_feature: MA Experiment ID: 20001774 Result: Down-regulated in Transcription
  misc_feature: MA Experiment 20001774 PARAMETER Experiment Name: At_Far-red-enriched-adult_P Parameter: Age (day) Value: 31
  misc_feature: MA Experiment 20001774 PARAMETER Experiment Name: At_Far-red-enriched-adult_P Parameter: Light Value: Far-red enriched vs. White
  misc_feature: MA Experiment 20001774 PARAMETER Experiment Name: At_Far-red-enriched-adult_P Parameter: Organism Value: A. thaliana
  misc_feature: MA Experiment 20001774 PARAMETER Experiment Name: At_Far-red-enriched-adult_P Parameter: Plant Line Value: Columbia
  misc_feature: MA Experiment 20001774 PARAMETER Experiment Name: At_Far-red-enriched-adult_P Parameter: Timepoint (hr) Value: 72
  misc_feature: MA Experiment 20001774 PARAMETER Experiment Name: At_Far-red-enriched-adult_P Parameter: Tissue Value: Aerial
  misc_feature: MA Experiment ID: 20001904 Result: Down-regulated in Transcription
  misc_feature: MA Experiment 20001904 PARAMETER Experiment Name: At_Drought_Reproduction_P Parameter: Age (day) Value: 37
  misc_feature: MA Experiment 20001904 PARAMETER Experiment Name: At_Drought_Reproduction_P Parameter: Organism Value: A. thaliana
  misc_feature: MA Experiment 20001904 PARAMETER Experiment Name: At_Drought_Reproduction_P Parameter: Plant Line Value: WS
  misc_feature: MA Experiment 20001904 PARAMETER Experiment Name: At_Drought_Reproduction_P Parameter: Timepoint (day) Value: 7
  misc_feature: MA Experiment 20001904 PARAMETER Experiment Name: At_Drought_Reproduction_P Parameter: Tissue Value: Rosettes
  misc_feature: MA Experiment 20001904 PARAMETER Experiment Name: At_Drought_Reproduction_P Parameter: Treatment Value: Drought vs. No Drought
gaattcttatattaacttttgttccttcagttttatacatatagtcatatgacattgaaaaaccagcacaaactccttcagttgatcaccaatagaaacaacaaaatacagtataatatttctaatttttagtgaaaatttacgaatattgtggaaacaacttttatagatgtctgagtctgacttatgtcagtattattttttcttcacttatagcagtataacattcattatttcacattaatgccaaaaaaaaattaaaaactttattatcaaatataatattcaaatctcgatattgacaggtttgccctcgtcctttgcctataaatttgacatgatctacgttcattcaaacaaaaaccaagccacaaagaaattaaatacacacaatgaccaaagaagtttgctccaacattggactttggttattgctcacgttacttattggtaactatgtcgtcaatcttgaagcctcgcaccatgtctacaagagacttacccaaagcactaacaccaaatctccttccgtaaaccagccctaccggaccggtttccatttccaaccccccaaaaattggatgaacggtatgaccaaaatgccatatcaacctcaatctcaatgtttgttattttcattactctcttacctttgcttttatttcgttgtggttcgtgcttggacaaaatggattgatcattggtcatgagcagatcctaatggttagtttttctctcttttatctcctatctttttaatttttttctcttagtcaactcttcaaatccaatagacagatcattttccctgaaaactcgtgttttttattattttataaaacattgattacaccaatatatgtcagcatacaactgtacatttgattattgtattgtattggtcgaccttgtgttacgctgcaggatccttttacactatccatatacttaactaataaaaatacacatatttaaaattttaatacagggcctatgatatacaaaggaatatatcatcttttctaccaatggaacccgaaaggagccgtgtggggtaacatcgtgtgggctcattccacgtcaacagacttaatcaattgggatccacatcctccagctatcttcccatctgcacccttcgatatcaacggatgctggtccggttcagctactattctccctaatggaaaaccggttatcctctataccggaatcgaccctaagaaccaacaggtccaaaacatagccgagcctaagaatctctccgatccttatctccgagaatggaaaaagtcgccgttaaatcctctcatggctcctgacgccgttaacggaatcaacgccagctcgttccgtgacccaaccaccgcgtggctaggccaagacaagaaatggagagtgatcatcggaagcaagattcaccgtcgtggactagccattacttacacgagtaaagactttctaaaatgggaaaaatctccagagccgttgcattacgacgacggaagtggaatgtgggaatgtcctgattttttcccggtcacgaggtttggttctaacggcgtggaaacgtcttcgtttggtgaacctaatgagattttgaagcacgtgttgaaaataagtttggacgacacgaaacatgattattacacgattggtacgtacgatcgggttaaagataaattcgtaccggacaatggtttcaagatggacggtacggctccgagatacgattacggaaagtattacgcgtctaaaacgttttttgactcggctaagaaccggagaatcttgtggggttggactaacgagtcatcgtcggttgaggatgatgttgagaaaggctggtccggtattcaggtaattagttacgcttaactgaaactaataatgtgaatataattgttagagattgaatcaattttttgtttctttcttgattagacgattccaaggaaaatatggcttgatagatcagggaaacaattaattcagtggccggttagggaagttgaaagattacgtacaaaacaagtcaaaaacttacgcaacaaagttctaaagtcaggatctaggcttgaagtctatggtgtgacagctgcacaggtttgattattatcatttttttttgaaaaatcagtaggtatgagaaaattagggttttaaaagtcttgtgatttgtacaggcggatgtagaagtattgttcaaagtgagagacttggagaaagcggatgtgatagaaccaagttggactgatccgcagttgatttgtagcaagatgaatgtatcggttaagtctggtttaggtccattcggtttaatggttttggcatctaagaatttggaagagtacacatctgtttattttagaatcttcaaagcccgtcaaaacagcaataagtacgttgtgctcatgtgcagtgaccaaagcaggtacgtttctttgattaagatcgggattaagtatattaatttttataatcttttgtcacaattcacaaatatttatgtttgttttaaacagtcggtcacaaaagatagatctaaaattgggttccctagaaatatccaaaacttgacttataattttgaggactttttggtgatgtggatttgggacagatcttcgctgaaggaagataatgacaaaacgacatacggagcttttgtggatattaatcctcaccaaccactatccctcagagccttggtaattaagtctcccattttgtattttacgtatatagttttatatattaatttatgttcatatgtaaaaacgcttgcaaatatagggaagaaaaacctcctttttaaaacccatgagagtaattatttaacagcttagcctcttgatcaagactatataatcttcaactatcttgttcaagtattaaggcgaatatttaattgtggatttgttaataaaagtttctgttatttgttgttgttggtgtagattgatcattcagtagtggagagtttcggtggaaagggaagagcatgcattacctcaagagtgtatccaaaattggcaataggaaaaagttcacatctctttgcttttaattatggatatcaaagtgttgatgtcttaaacttaaatgcttggagcatgaactctgcccaaatcagttgatcacgtaaagatacacacatgtaaacacattacatctccattgatttagcatttatatgagttgattttggagagatcttatatggtccactttgtttggttgtcaataaaattgtccaatttgtttgtttgaaataattctaaaaggctaatatatatgacattttatttgacttccttatagtatgacttactattataaaaaggacaattctagagtcggtagtcaaaatcttccaagttccaacgaacgtgataatagtggactttcaatgaatataaacgtaaatatgtatacatgtacatactatatgaaacaaattgagtacgatcttaaagtttggccccccaaaaaataactagtatgtgtatgtataggatcattctatgtaaatcagcacacgtaacttttttctaaaatgcccgacggctatattaccacaagtatgaaattgcccaatatgacgtaacgaacctataacactagcgcctatctatccatagcgatgccaacatgatttattatttattacaacggcgttgggtttacattgttttcatctaaacggcccaccgtttcagcatttaagaccaacaacttcacgtcaacgggtctggtcaactaattaaagcgatcaaaccatctccaccgtccgatactaatccaacttcgtctgtcccgcccaagggcaagcccgtaaatatgttcaccagcaatgatgggagtagcatgtgggacataacattgcatggtagtgttttttccaacagcgcgctaaggctaaatcgttgtcgtttagtaaactgctggctctagatttagaatacgtgcgtgagatgtagccagagcccagagggaagttatggttgaatccggtttgtgtccactttaatttggtgtgtagtgattctcgcctgcacatctctctctttcgaaatattcaagtctcaagcaatagtgatgatatggacatgtaagtagcgaccaaatcaggtgcagtttcatttcattttttgcatttaattttatcagaactcagaagttgaaagtacatattttattaagcaaaaaaaccttctcaaattcagattaatcagaattc

SEQ ID NO: 84201 - protein, 294 aa, Arabidopsis thaliana
  peptide (1)..(294): Ceres Seq. ID no. 12673694
  misc_feature (1)..(291): Pfam Name: Glycosyl hydrolases family 32 Pfam Description: Glycosyl hydrolases family 32
  misc_feature (1)..(291): Homolog of NCBI NO: 9294027 NR Description: beta-fructofuranosidase (EC 3.2.1.26)
  misc_feature (1)..(291): Homolog of NCBI NO: 18400170 NR Description: glycosyl hydrolase family 32; protein id: supported by cDNA: gi_15027838, supported by cDNA: gi_19310844
  misc_feature (1)..(289): Homolog of NCBI NO: 25289547 NR Description: probable beta-fructofuranosidase, [imported] -
  misc_feature (1)..(289): Homolog of NCBI NO: 18405222 NR Description: glycosyl hydrolase family 32; protein id:
  misc_feature (1)..(289): Homolog of NCBI NO: 6683112 NR Description: beta-fructofuranosidase [Arabidopsis thaliana]
  misc_feature (1)..(291): Homolog of NCBI NO: 15231374 NR Description: glycosyl hydrolase family 32; protein id:
  misc_feature (1)..(291): Homolog of NCBI NO: 4205115 NR Description: cell wall invertase precursor [Fragaria x
  misc_feature (1)..(291): Homolog of NCBI NO: 7435485 NR Description: beta-fructofuranosidase (EC 3.2.1.26) - garden pea
  misc_feature (1)..(291): Homolog of NCBI NO: 2500930 NR Description: BETA-FRUCTOFURANOSIDASE, CELL WALL ISOZYME
  misc_feature (1)..(291): Homolog of NCBI NO: 7435477 NR Description: beta-fructofuranosidase (EC 3.2.1.26), cell wall
MIYKGIYHLFYQWNPKGAVWGNIVWAHSTSTDLINWDPHPPAIFPSAPFDINGCWSGSATILPNGKPVILYTGIDPKNQQVQNIAEPKNLSDPYLREWKKSPLNPLMAPDAVNGINASSFRDPTTAWLGQDKKWRVIIGSKIHRRGLAITYTSKDFLKWEKSPEPLHYDDGSGMWECPDFFPVTRFGSNGVETSSFGEPNEILKHVLKISLDDTKHDYYTIGTYDRVKDKFVPDNGFKMDGTAPRYDYGKYYASKTFFDSAKNRRILWGWTNESSSVEDDVEKGWSGIQVISYA

SEQ ID NO: 84202 - protein, 189 aa, Arabidopsis thaliana
  peptide (1)..(189): Ceres Seq. ID no. 12673695
  misc_feature (1)..(52): Pfam Name: Glycosyl hydrolases family 32 Pfam Description: Glycosyl hydrolases family 32
  misc_feature (1)..(52): Homolog of NCBI NO: 9294027 NR Description: beta-fructofuranosidase (EC 3.2.1.26)
  misc_feature (1)..(52): Homolog of NCBI NO: 18400170 NR Description: glycosyl hydrolase family 32; protein id: supported by cDNA: gi_15027838, supported by cDNA: gi_19310844
  misc_feature (103)..(153): Homolog of NCBI NO: 9294027 NR Description: beta-fructofuranosidase (EC 3.2.1.26)
  misc_feature (103)..(153): Homolog of NCBI NO: 18400170 NR Description: glycosyl hydrolase family 32; protein id: supported by cDNA: gi_15027838, supported by cDNA: gi_19310844
  misc_feature (1)..(52): Homolog of NCBI NO: 25289547 NR Description: probable beta-fructofuranosidase, [imported] -
  misc_feature (115)..(145): Homolog of NCBI NO: 25289547 NR Description: probable beta-fructofuranosidase, [imported] -
  misc_feature (1)..(52): Homolog of NCBI NO: 18405222 NR Description: glycosyl hydrolase family 32; protein id:
  misc_feature (115)..(145): Homolog of NCBI NO: 18405222 NR Description: glycosyl hydrolase family 32; protein id:
  misc_feature (1)..(52): Homolog of NCBI NO: 6683112 NR Description: beta-fructofuranosidase [Arabidopsis thaliana]
  misc_feature (115)..(145): Homolog of NCBI NO: 6683112 NR Description: beta-fructofuranosidase [Arabidopsis thaliana]
MNVSVKSGLGPFGLMVLASKNLEEYTSVYFRIFKARQNSNKYVVLMCSDQSRYVSLIKIGIKYINFYNLLSQFTNIYVCFKQSVTKDRSKIGFPRNIQNLTYNFEDFLVMWIWDRSSLKEDNDKTTYGAFVDINPHQPLSLRALVIKSPILYFTYIVLYINLCSYVKTLANIGKKNLLFKTHESNYLTA

SEQ ID NO: 84203 - protein, 188 aa, Arabidopsis thaliana
  peptide (1)..(188): Ceres Seq. ID no. 12673696
  misc_feature (1)..(185): Pfam Name: Glycosyl hydrolases family 32 Pfam Description: Glycosyl hydrolases family 32
  misc_feature (1)..(185): Homolog of NCBI NO: 9294027 NR Description: beta-fructofuranosidase (EC 3.2.1.26)
  misc_feature (1)..(185): Homolog of NCBI NO: 18400170 NR Description: glycosyl hydrolase family 32; protein id: supported by cDNA: gi_15027838, supported by cDNA: gi_19310844
  misc_feature (1)..(183): Homolog of NCBI NO: 25289547 NR Description: probable beta-fructofuranosidase, [imported] -
  misc_feature (1)..(183): Homolog of NCBI NO: 18405222 NR Description: glycosyl hydrolase family 32; protein id:
  misc_feature (1)..(183): Homolog of NCBI NO: 6683112 NR Description: beta-fructofuranosidase [Arabidopsis thaliana]
  misc_feature (1)..(185): Homolog of NCBI NO: 15231374 NR Description: glycosyl hydrolase family 32; protein id:
  misc_feature (1)..(185): Homolog of NCBI NO: 4205115 NR Description: cell wall invertase precursor [Fragaria x
  misc_feature (1)..(185): Homolog of NCBI NO: 7435485 NR Description: beta-fructofuranosidase (EC 3.2.1.26) - garden pea
  misc_feature (1)..(185): Homolog of NCBI NO: 2500930 NR Description: BETA-FRUCTOFURANOSIDASE, CELL WALL ISOZYME
  misc_feature (1)..(185): Homolog of NCBI NO: 7435477 NR Description: beta-fructofuranosidase (EC 3.2.1.26), cell wall
MAPDAVNGINASSFRDPTTAWLGQDKKWRVIIGSKIHRRGLAITYTSKDFLKWEKSPEPLHYDDGSGMWECPDFFPVTRFGSNGVETSSFGEPNEILKHVLKISLDDTKHDYYTIGTYDRVKDKFVPDNGFKMDGTAPRYDYGKYYASKTFFDSAKNRRILWGWTNESSSVEDDVEKGWSGIQVISYA

SEQ ID NO: 84204 - DNA, 1667 bp, Arabidopsis thaliana
  misc_feature (1)..(1667): Ceres Seq. ID no. 12673708
  misc_feature: MA Experiment ID: 20000314 Result: Down-regulated in Transcription
  misc_feature: MA Experiment 20000314 PARAMETER Experiment Name: At_14day_Shoots-Roots_Sub_P Parameter: Age (day) Value: 14
  misc_feature: MA Experiment 20000314 PARAMETER Experiment Name: At_14day_Shoots-Roots_Sub_P Parameter: Organism Value: A. thaliana
  misc_feature: MA Experiment 20000314 PARAMETER Experiment Name: At_14day_Shoots-Roots_Sub_P Parameter: Plant Line Value: WS
  misc_feature: MA Experiment 20000314 PARAMETER Experiment Name: At_14day_Shoots-Roots_Sub_P Parameter: Tissue Value: Roots vs. Whole Plant
  misc_feature: MA Experiment ID: 20000327 Result: Up-regulated in Transcription
  misc_feature: MA Experiment 20000327 PARAMETER Experiment Name: At_42deg_Heat_Sub_P Parameter: Age (day) Value: 14
  misc_feature: MA Experiment 20000327 PARAMETER Experiment Name: At_42deg_Heat_Sub_P Parameter: Organism Value: A. thaliana
  misc_feature: MA Experiment 20000327 PARAMETER Experiment Name: At_42deg_Heat_Sub_P Parameter: Plant Line Value: WS
  misc_feature: MA Experiment 20000327 PARAMETER Experiment Name: At_42deg_Heat_Sub_P Parameter: Temperature (deg C) Value: 42 vs. 22
  misc_feature: MA Experiment 20000327 PARAMETER Experiment Name: At_42deg_Heat_Sub_P Parameter: Timepoint (hr) Value: 1
  misc_feature: MA Experiment 20000327 PARAMETER Experiment Name: At_42deg_Heat_Sub_P Parameter: Tissue Value: Aerial
  misc_feature: MA Experiment ID: 20000328 Result: Up-regulated in Transcription
  misc_feature: MA Experiment 20000328 PARAMETER Experiment Name: At_42deg_Heat_Sub_P Parameter: Age (day) Value: 14
  misc_feature: MA Experiment 20000328 PARAMETER Experiment Name: At_42deg_Heat_Sub_P Parameter: Organism Value: A. thaliana
  misc_feature: MA Experiment 20000328 PARAMETER Experiment Name: At_42deg_Heat_Sub_P Parameter: Plant Line Value: WS
  misc_feature: MA Experiment 20000328 PARAMETER Experiment Name: At_42deg_Heat_Sub_P Parameter: Temperature (deg C) Value: 42 vs. 22
  misc_feature: MA Experiment 20000328 PARAMETER Experiment Name: At_42deg_Heat_Sub_P Parameter: Timepoint (hr) Value: 6
  misc_feature: MA Experiment 20000328 PARAMETER Experiment Name: At_42deg_Heat_Sub_P Parameter: Tissue Value: Aerial
  misc_feature: MA Experiment ID: 20000440 Result: Up-regulated in Transcription
  misc_feature: MA Experiment 20000440 PARAMETER Experiment Name: At_Closed-Flower__Sub_P Parameter: Tissue Value: Closed Flower vs. Whole Plant
atcaataaacacaaaaacaaaagaagaagagaataaacaaaagaagaaaaaaaaagtattaaaacaaaatcaataaaaagagaataaaaaatggtgggttctcacaaagcaagcggagtgcttcttgtgctactagtggttatggccaccacaatagcaaacgggacacctgttgtcgatacagcaaaaaatgcagctacagcagttgaagatacagcaaaaaatgcagctacagcagttggcggtgcagctgcatcagttggtgctaaagtaacaggtgccaaaccaggcggtgcatcacttgatgttaaagcatcaggagccaaaggagacggcaaaactgatgatagtgcggcatttgcggctgcatggaaagaagcttgtgcagcagggagcacgattacagtgccaaaaggtgagtatttggtagagagcctagagttcaaaggtccatgcaaaggtccagtcactttggaattgaatggcaattttaaggctccggctacggtcaagaccactaagcctcatgccggatggattgatttcgaaaatctcgctgatttcactttgaatggaaacaaagctatttttgacggtcaagggtccctcgcttggaaggccaatgactgcgccaaaaccggcaaatgcaactctctccctatcaacatccgattcactggtctaacaaactcaaagattaacagtattacatcaacaaacagcaagcttttccacatgaacatccttaactgcaagaacataactcttacggatatcggtattgatgcacctccggagagtctcaacaccgatggtatccacatcggaaggtccaatggagtcaacttaattggggcaaagattaaaaccggagatgactgcgtttccattggagatggtaccgaaaatctcattgttgagaacgtagaatgtggaccaggacacggaatttccattggaagtcttggaagataccctaatgaacaaccagtaaaaggagtcaccgtgaggaaatgcctcatcaagaacactgacaatggtgttcgcatcaagacatggccaggatctccccccggtatcgcctccaacattcttttcgaagatatcacaatggacaatgttagccttcccgttctcatcgaccaagagtactgtccttatggccactgcaaagctggggtaccatcgaaagtgaagttgtcagacgtgactatcaagaacattaagggaacatcagcaacaaaggtagcagtgaagctaatgtgcagcaaaggcgttccttgcaccaatattgctctctctgacatcaacttggtccacaacggcaaagagggaccagctgtctcagcatgttctaacatcaagcctattctcagcggaaagttggttccagcggcttgcactgaagtcgctaaaccgggtccttaaattaaagttgcatgtccaccataaatccatccaatctggtgaagacgctttgattagggtgcgatgaaaaattttgcaatattttttttgagatataaattatataatagataaaacagagtccattcagggttggagtttatcacctgaagagtgacttgtgtgattgggtagtaatgttatgtgattcgcaatatgcgagagttatgtaaattatttttaaaaaaaaatccatggat

SEQ ID NO: 84205 - protein, 445 aa, Arabidopsis thaliana
  peptide (1)..(445): Ceres Seq. ID no. 12673709
  misc_feature (98)..(437): Pfam Name: Glycosyl hydrolases family 28 Pfam Description: Glycosyl hydrolases family 28
  misc_feature (1)..(445): Homolog of NCBI NO: 15231771 NR Description: exopolygalacturonase; protein id: At3g14040.1, by cDNA: gi_17064741 [Arabidopsis thaliana]
  misc_feature (1)..(445): Homolog of NCBI NO: 3004442 NR Description: polygalacturonase [Arabidopsis thaliana]
  misc_feature (1)..(445): Homolog of NCBI NO: 421833 NR Description: polygalacturonase (EC 3.2.1.15) [imported] - thaliana >gi|311962|emb|CAA51692.1| exopolygalacturonase
  misc_feature (1)..(445): Homolog of NCBI NO: 17064742 NR Description: polygalacturonase; pectinase [Arabidopsis >gi|21387101|gb|AAM47954.1| polygalacturonase; pectinase
  misc_feature (1)..(445): Homolog of NCBI NO: 421832 NR Description: polygalacturonase (EC 3.2.1.15) [imported] - thaliana >gi|313684|emb|CAA51033.1| exopolygalacturonase
  misc_feature (1)..(445): Homolog of NCBI NO: 15231880 NR Description: exopolygalacturonase; protein id: At3g07850.1, by cDNA: gi_15810268, supported by cDNA: gi_20259592 [Arabidopsis >gi|27735237|sp|P49063|PGL2_ARATH Exopolygalacturonase clone
  misc_feature (61)..(438): Homolog of NCBI NO: 3024386 NR Description: POLYGALACTURONASE PRECURSOR (PG) (PECTINASE)
  misc_feature (61)..(438): Homolog of NCBI NO: 3024385 NR Description: POLYGALACTURONASE PRECURSOR (PG) (PECTINASE)
  misc_feature (79)..(437): Homolog of NCBI NO: 6714530 NR Description: polygalacturonase [Salix gilgiana]
  misc_feature (79)..(437): Homolog of NCBI NO: 6714524 NR Description: polygalacturonase [Salix gilgiana]
MVGSHKASGVLLVLLVVMATTIANGTPVVDTAKNAATAVEDTAKNAATAVGGAAASVGAKVTGAKPGGASLDVKASGAKGDGKTDDSAAFAAAWKEACAAGSTITVPKGEYLVESLEFKGPCKGPVTLELNGNFKAPATVKTTKPHAGWIDFENLADFTLNGNKAIFDGQGSLAWKANDCAKTGKCNSLPINIRFTGLTNSKINSITSTNSKLFHMNILNCKNITLTDIGIDAPPESLNTDGIHIGRSNGVNLIGAKIKTGDDCVSIGDGTENLIVENVECGPGHGISIGSLGRYPNEQPVKGVTVRKCLIKNTDNGVRIKTWPGSPPGIASNILFEDITMDNVSLPVLIDQEYCPYGHCKAGVPSKVKLSDVTIKNIKGTSATKVAVKLMCSKGVPCTNIALSDINLVHNGKEGPAVSACSNIKPILSGKLVPAACTEVAKPGP

SEQ ID NO: 84206 - protein, 428 aa, Arabidopsis thaliana
  peptide (1)..(428): Ceres Seq. ID no. 12673710
  misc_feature (81)..(420): Pfam Name: Glycosyl hydrolases family 28 Pfam Description: Glycosyl hydrolases family 28
  misc_feature (1)..(428): Homolog of NCBI NO: 15231771 NR Description: exopolygalacturonase; protein id: At3g14040.1, by cDNA: gi_17064741 [Arabidopsis thaliana]
  misc_feature (1)..(428): Homolog of NCBI NO: 3004442 NR Description: polygalacturonase [Arabidopsis thaliana]
  misc_feature (1)..(428): Homolog of NCBI NO: 421833 NR Description: polygalacturonase (EC 3.2.1.15) [imported] - thaliana >gi|311962|emb|CAA51692.1| exopolygalacturonase
  misc_feature (1)..(428): Homolog of NCBI NO: 17064742 NR Description: polygalacturonase; pectinase [Arabidopsis >gi|21387101|gb|AAM47954.1| polygalacturonase; pectinase
  misc_feature (1)..(428): Homolog of NCBI NO: 421832 NR Description: polygalacturonase (EC 3.2.1.15) [imported] - thaliana >gi|313684|emb|CAA51033.1| exopolygalacturonase
  misc_feature (1)..(428): Homolog of NCBI NO: 15231880 NR Description: exopolygalacturonase; protein id: At3g07850.1, by cDNA: gi_15810268, supported by cDNA: gi_20259592 [Arabidopsis >gi|27735237|sp|P49063|PGL2_ARATH Exopolygalacturonase clone
  misc_feature (44)..(421): Homolog of NCBI NO: 3024386 NR Description: POLYGALACTURONASE PRECURSOR (PG) (PECTINASE)
  misc_feature (44)..(421): Homolog of NCBI NO: 3024385 NR Description: POLYGALACTURONASE PRECURSOR (PG) (PECTINASE)
  misc_feature (62)..(420): Homolog of NCBI NO: 6714530 NR Description: polygalacturonase [Salix gilgiana]
  misc_feature (62)..(420): Homolog of NCBI NO: 6714524 NR Description: polygalacturonase [Salix gilgiana]
MATTIANGTPVVDTAKNAATAVEDTAKNAATAVGGAAASVGAKVTGAKPGGASLDVKASGAKGDGKTDDSAAFAAAWKEACAAGSTITVPKGEYLVESLEFKGPCKGPVTLELNGNFKAPATVKTTKPHAGWIDFENLADFTLNGNKAIFDGQGSLAWKANDCAKTGKCNSLPINIRFTGLTNSKINSITSTNSKLFHMNILNCKNITLTDIGIDAPPESLNTDGIHIGRSNGVNLIGAKIKTGDDCVSIGDGTENLIVENVECGPGHGISIGSLGRYPNEQPVKGVTVRKCLIKNTDNGVRIKTWPGSPPGIASNILFEDITMDNVSLPVLIDQEYCPYGHCKAGVPSKVKLSDVTIKNIKGTSATKVAVKLMCSKGVPCTNIALSDINLVHNGKEGPAVSACSNIKPILSGKLVPAACTEVAKPGP

SEQ ID NO: 84207 - protein, 230 aa, Arabidopsis thaliana
  peptide (1)..(230): Ceres Seq. ID no. 12673711
  misc_feature (1)..(222): Pfam Name: Glycosyl hydrolases family 28 Pfam Description: Glycosyl hydrolases family 28
  misc_feature (1)..(230): Homolog of NCBI NO: 15231771 NR Description: exopolygalacturonase; protein id: At3g14040.1, by cDNA: gi_17064741 [Arabidopsis thaliana]
  misc_feature (1)..(230): Homolog of NCBI NO: 3004442 NR Description: polygalacturonase [Arabidopsis thaliana]
  misc_feature (1)..(230): Homolog of NCBI NO: 421833 NR Description: polygalacturonase (EC 3.2.1.15) [imported] - thaliana >gi|311962|emb|CAA51692.1| exopolygalacturonase
  misc_feature (1)..(230): Homolog of NCBI NO: 17064742 NR Description: polygalacturonase; pectinase [Arabidopsis >gi|21387101|gb|AAM47954.1| polygalacturonase; pectinase
  misc_feature (1)..(230): Homolog of NCBI NO: 421832 NR Description: polygalacturonase (EC 3.2.1.15) [imported] - thaliana >gi|313684|emb|CAA51033.1| exopolygalacturonase
  misc_feature (1)..(230): Homolog of NCBI NO: 15231880 NR Description: exopolygalacturonase; protein id: At3g07850.1, by cDNA: gi_15810268, supported by cDNA: gi_20259592 [Arabidopsis >gi|27735237|sp|P49063|PGL2_ARATH Exopolygalacturonase clone
  misc_feature (1)..(223): Homolog of NCBI NO: 3024386 NR Description: POLYGALACTURONASE PRECURSOR (PG) (PECTINASE)
  misc_feature (1)..(223): Homolog of NCBI NO: 3024385 NR Description: POLYGALACTURONASE PRECURSOR (PG) (PECTINASE)
  misc_feature (1)..(222): Homolog of NCBI NO: 6714530 NR Description: polygalacturonase [Salix gilgiana]
  misc_feature (1)..(222): Homolog of NCBI NO: 6714524 NR Description: polygalacturonase [Salix gilgiana]
MNILNCKNITLTDIGIDAPPESLNTDGIHIGRSNGVNLIGAKIKTGDDCVSIGDGTENLIVENVECGPGHGISIGSLGRYPNEQPVKGVTVRKCLIKNTDNGVRIKTWPGSPPGIASNILFEDITMDNVSLPVLIDQEYCPYGHCKAGVPSKVKLSDVTIKNIKGTSATKVAVKLMCSKGVPCTNIALSDINLVHNGKEGPAVSACSNIKPILSGKLVPAACTEVAKPGP

SEQ ID NO: 84208 - DNA, 1601 bp, Arabidopsis thaliana
  misc_feature (1)..(1601): Ceres Seq. ID no. 12673712
  misc_feature: MA Experiment ID: 20000314 Result: Down-regulated in Transcription
  misc_feature: MA Experiment 20000314 PARAMETER Experiment Name: At_14day_Shoots-Roots_Sub_P Parameter: Age (day) Value: 14
  misc_feature: MA Experiment 20000314 PARAMETER Experiment Name: At_14day_Shoots-Roots_Sub_P Parameter: Organism Value: A. thaliana
  misc_feature: MA Experiment 20000314 PARAMETER Experiment Name: At_14day_Shoots-Roots_Sub_P Parameter: Plant Line Value: WS
  misc_feature: MA Experiment 20000314 PARAMETER Experiment Name: At_14day_Shoots-Roots_Sub_P Parameter: Tissue Value: Roots vs. Whole Plant
  misc_feature: MA Experiment ID: 20000327 Result: Up-regulated in Transcription
  misc_feature: MA Experiment 20000327 PARAMETER Experiment Name: At_42deg_Heat_Sub_P Parameter: Age (day) Value: 14
  misc_feature: MA Experiment 20000327 PARAMETER Experiment Name: At_42deg_Heat_Sub_P Parameter: Organism Value: A. thaliana
  misc_feature: MA Experiment 20000327 PARAMETER Experiment Name: At_42deg_Heat_Sub_P Parameter: Plant Line Value: WS
  misc_feature: MA Experiment 20000327 PARAMETER Experiment Name: At_42deg_Heat_Sub_P Parameter: Temperature (deg C) Value: 42 vs. 22
  misc_feature: MA Experiment 20000327 PARAMETER Experiment Name: At_42deg_Heat_Sub_P Parameter: Timepoint (hr) Value: 1
  misc_feature: MA Experiment 20000327 PARAMETER Experiment Name: At_42deg_Heat_Sub_P Parameter: Tissue Value: Aerial
  misc_feature: MA Experiment ID: 20000328 Result: Up-regulated in Transcription
  misc_feature: MA Experiment 20000328 PARAMETER Experiment Name: At_42deg_Heat_Sub_P Parameter: Age (day) Value: 14
  misc_feature: MA Experiment 20000328 PARAMETER Experiment Name: At_42deg_Heat_Sub_P Parameter: Organism Value: A. thaliana
  misc_feature: MA Experiment 20000328 PARAMETER Experiment Name: At_42deg_Heat_Sub_P Parameter: Plant Line Value: WS
  misc_feature: MA Experiment 20000328 PARAMETER Experiment Name: At_42deg_Heat_Sub_P Parameter: Temperature (deg C) Value: 42 vs. 22
  misc_feature: MA Experiment 20000328 PARAMETER Experiment Name: At_42deg_Heat_Sub_P Parameter: Timepoint (hr) Value: 6
  misc_feature: MA Experiment 20000328 PARAMETER Experiment Name: At_42deg_Heat_Sub_P Parameter: Tissue Value: Aerial
  misc_feature: MA Experiment ID: 20000440 Result: Up-regulated in Transcription
  misc_feature: MA Experiment 20000440 PARAMETER Experiment Name: At_Closed-Flower__Sub_P Parameter: Tissue Value: Closed Flower vs. Whole Plant
aaaaaaagtattaaaacaaaatcaataaaaagagaataaaaaatggtgggttctcacaaagcaagcggagtgcttcttgtgctactagtggttatggccaccacaatagcaaacgggacacctgttgtcgatacagcaaaaaatgcagctacagcagttgaagatacagcaaaaaatgcagctacagcagttggcggtgcagctgcatcagttggtgctaaagtaacaggtgccaaaccaggcggtgcatcacttgatgttaaagcatcaggagccaaaggagacggcaaaactgatgatagtgcggcatttgcggctgcatggaaagaagcttgtgcagcagggagcacgattacagtgccaaaaggtgagtatttggtagagagcctagagttcaaaggtccatgcaaaggtccagtcactttggaattgaatggcaattttaaggctccggctacggtcaagaccactaagcctcatgccggatggattgatttcgaaaatctcgctgatttcactttgaatggaaacaaagctatttttgacggtcaagggtccctcgcttggaaggccaatgactgcgccaaaaccggcaaatgcaactctctccctatcaacatccgattcactggtctaacaaactcaaagattaacagtattacatcaacaaacagcaagcttttccacatgaacatccttaactgcaagaacataactcttacggatatcggtattgatgcacctccggagagtctcaacaccgatggtatccacatcggaaggtccaatggagtcaacttaattggggcaaagattaaaaccggagatgactgcgtttccattggagatggtaccgaaaatctcattgttgagaacgtagaatgtggaccaggacacggaatttccattggaagtcttggaagataccctaatgaacaaccagtaaaaggagtcaccgtgaggaaatgcctcatcaagaacactgacaatggtgttcgcatcaagacatggccaggatctccccccggtatcgcctccaacattcttttcgaagatatcacaatggacaatgttagccttcccgttctcatcgaccaagagtactgtccttatggccactgcaaagctggggtaccatcgaaagtgaagttgtcagacgtgactatcaagaacattaagggaacatcagcaacaaaggtagcagtgaagctaatgtgcagcaaaggcgttccttgcaccaatattgctctctctgacatcaacttggtccacaacggcaaagagggaccagctgtctcagcatgttctaacatcaagcctattctcagcggaaagttggttccagcggcttgcactgaagtcgctaaaccgggtccttaaattaaagttgcatgtccaccataaatccatccaatctggtgaagacgctttgattagggtgcgatgaaaaattttgcaatattttttttgagatataaattatataatagataaaacagagtccattcagggttggagtttatcacctgaagagtgacttgtgtgattgggtagtaatgttatgtgattcgcaatatgcgagagttatgtaaattattttt

SEQ ID NO: 84209 - protein, 445 aa, Arabidopsis thaliana; identical to SEQ ID NO: 84205
  peptide (1)..(445): Ceres Seq. ID no. 12673713
  misc_feature (98)..(437): Pfam Name: Glycosyl hydrolases family 28 Pfam Description: Glycosyl hydrolases family 28
  misc_feature (1)..(445): Homolog of NCBI NO: 15231771 NR Description: exopolygalacturonase; protein id: At3g14040.1, by cDNA: gi_17064741 [Arabidopsis thaliana]
  misc_feature (1)..(445): Homolog of NCBI NO: 3004442 NR Description: polygalacturonase [Arabidopsis thaliana]
  misc_feature (1)..(445): Homolog of NCBI NO: 421833 NR Description: polygalacturonase (EC 3.2.1.15) [imported] - thaliana >gi|311962|emb|CAA51692.1| exopolygalacturonase
  misc_feature (1)..(445): Homolog of NCBI NO: 17064742 NR Description: polygalacturonase; pectinase [Arabidopsis >gi|21387101|gb|AAM47954.1| polygalacturonase; pectinase
  misc_feature (1)..(445): Homolog of NCBI NO: 421832 NR Description: polygalacturonase (EC 3.2.1.15) [imported] - thaliana >gi|313684|emb|CAA51033.1| exopolygalacturonase
  misc_feature (1)..(445): Homolog of NCBI NO: 15231880 NR Description: exopolygalacturonase; protein id: At3g07850.1, by cDNA: gi_15810268, supported by cDNA: gi_20259592 [Arabidopsis >gi|27735237|sp|P49063|PGL2_ARATH Exopolygalacturonase clone
  misc_feature (61)..(438): Homolog of NCBI NO: 3024386 NR Description: POLYGALACTURONASE PRECURSOR (PG) (PECTINASE)
  misc_feature (61)..(438): Homolog of NCBI NO: 3024385 NR Description: POLYGALACTURONASE PRECURSOR (PG) (PECTINASE)
  misc_feature (79)..(437): Homolog of NCBI NO: 6714530 NR Description: polygalacturonase [Salix gilgiana]
  misc_feature (79)..(437): Homolog of NCBI NO: 6714524 NR Description: polygalacturonase [Salix gilgiana]

SEQ ID NO: 84210 - protein, 428 aa, Arabidopsis thaliana; identical to SEQ ID NO: 84206
  peptide (1)..(428): Ceres Seq. ID no. 12673714
  misc_feature (81)..(420): Pfam Name: Glycosyl hydrolases family 28 Pfam Description: Glycosyl hydrolases family 28
  misc_feature (1)..(428): Homolog of NCBI NO: 15231771 NR Description: exopolygalacturonase; protein id: At3g14040.1, by cDNA: gi_17064741 [Arabidopsis thaliana]
  misc_feature (1)..(428): Homolog of NCBI NO: 3004442 NR Description: polygalacturonase [Arabidopsis thaliana]
  misc_feature (1)..(428): Homolog of NCBI NO: 421833 NR Description: polygalacturonase (EC 3.2.1.15) [imported] - thaliana >gi|311962|emb|CAA51692.1| exopolygalacturonase
  misc_feature (1)..(428): Homolog of NCBI NO: 17064742 NR Description: polygalacturonase; pectinase [Arabidopsis >gi|21387101|gb|AAM47954.1| polygalacturonase; pectinase
  misc_feature (1)..(428): Homolog of NCBI NO: 421832 NR Description: polygalacturonase (EC 3.2.1.15) [imported] - thaliana >gi|313684|emb|CAA51033.1| exopolygalacturonase
  misc_feature (1)..(428): Homolog of NCBI NO: 15231880 NR Description: exopolygalacturonase; protein id: At3g07850.1, by cDNA: gi_15810268, supported by cDNA: gi_20259592 [Arabidopsis >gi|27735237|sp|P49063|PGL2_ARATH Exopolygalacturonase clone
  misc_feature (44)..(421): Homolog of NCBI NO: 3024386 NR Description: POLYGALACTURONASE PRECURSOR (PG) (PECTINASE)
  misc_feature (44)..(421): Homolog of NCBI NO: 3024385 NR Description: POLYGALACTURONASE PRECURSOR (PG) (PECTINASE)
  misc_feature (62)..(420): Homolog of NCBI NO: 6714530 NR Description: polygalacturonase [Salix gilgiana]
  misc_feature (62)..(420): Homolog of NCBI NO: 6714524 NR Description: polygalacturonase [Salix gilgiana]

SEQ ID NO: 84211 - protein, 230 aa, Arabidopsis thaliana; identical to SEQ ID NO: 84207
  peptide (1)..(230): Ceres Seq. ID no. 12673715
  misc_feature (1)..(222): Pfam Name: Glycosyl hydrolases family 28 Pfam Description: Glycosyl hydrolases family 28
  misc_feature (1)..(230): Homolog of NCBI NO: 15231771 NR Description: exopolygalacturonase; protein id: At3g14040.1, by cDNA: gi_17064741 [Arabidopsis thaliana]
  misc_feature (1)..(230): Homolog of NCBI NO: 3004442 NR Description: polygalacturonase [Arabidopsis thaliana]
  misc_feature (1)..(230): Homolog of NCBI NO: 421833 NR Description: polygalacturonase (EC 3.2.1.15) [imported] - thaliana >gi|311962|emb|CAA51692.1| exopolygalacturonase
  misc_feature (1)..(230): Homolog of NCBI NO: 17064742 NR Description: polygalacturonase; pectinase [Arabidopsis >gi|21387101|gb|AAM47954.1| polygalacturonase; pectinase
  misc_feature (1)..(230): Homolog of NCBI NO: 421832 NR Description: polygalacturonase (EC 3.2.1.15) [imported] - thaliana >gi|313684|emb|CAA51033.1| exopolygalacturonase
  misc_feature (1)..(230): Homolog of NCBI NO: 15231880 NR Description: exopolygalacturonase; protein id: At3g07850.1, by cDNA: gi_15810268, supported by cDNA: gi_20259592 [Arabidopsis >gi|27735237|sp|P49063|PGL2_ARATH Exopolygalacturonase clone
  misc_feature (1)..(223): Homolog of NCBI NO: 3024386 NR Description: POLYGALACTURONASE PRECURSOR (PG) (PECTINASE)
  misc_feature (1)..(223): Homolog of NCBI NO: 3024385 NR Description: POLYGALACTURONASE PRECURSOR (PG) (PECTINASE)
  misc_feature (1)..(222): Homolog of NCBI NO: 6714530 NR Description: polygalacturonase [Salix gilgiana]
  misc_feature (1)..(222): Homolog of NCBI NO: 6714524 NR Description: polygalacturonase [Salix gilgiana]

SEQ ID NO: 84212 - DNA, 510 bp, Arabidopsis thaliana
  misc_feature (1)..(510): Ceres Seq. ID no. 12673731
  misc_feature: MA Experiment ID: 108434 Result: Down-regulated in Transcription
  misc_feature: MA Experiment 108434 PARAMETER Experiment Name: At_Root_Tips_cDNA_P Parameter: Tissue Value: Root Tips
  misc_feature: MA Experiment ID: 108435 Result: Up-regulated in Transcription
  misc_feature: MA Experiment 108435 PARAMETER Experiment Name: At_stm_Mutants_cDNA_P Parameter: Plant Line Value: wt Landsburg vs stm
  misc_feature: MA Experiment 108435 PARAMETER Experiment Name: At_stm_Mutants_cDNA_P Parameter: Tissue Value: Shoot Apical Meristem Region
  misc_feature: MA Experiment ID: 108461 Result: Up-regulated in Transcription
  misc_feature: MA Experiment 108461 PARAMETER Experiment Name: At_Germinating_Seeds_cDNA_P Parameter: Age (day) Value: 1 vs. 0
  misc_feature: MA Experiment 108461 PARAMETER Experiment Name: At_Germinating_Seeds_cDNA_P Parameter: Tissue Value: Germinating Seeds
  misc_feature: MA Experiment ID: 108462 Result: Up-regulated in Transcription
  misc_feature: MA Experiment 108462 PARAMETER Experiment Name: At_Germinating_Seeds_cDNA_P Parameter: Age (day) Value: 2 vs. 0
  misc_feature: MA Experiment 108462 PARAMETER Experiment Name: At_Germinating_Seeds_cDNA_P Parameter: Tissue Value: Germinating Seeds
  misc_feature: MA Experiment ID: 108561 Result: Down-regulated in Transcription
  misc_feature: MA Experiment 108561 PARAMETER Experiment Name: At_100uM_ABA_cDNA_P Parameter: Timepoint (hr) Value: 6
  misc_feature: MA Experiment 108561 PARAMETER Experiment Name: At_100uM_ABA_cDNA_P Parameter: Tissue Value: Aerial
  misc_feature: MA Experiment 108561 PARAMETER Experiment Name: At_100uM_ABA_cDNA_P Parameter: Treatment Value: 100uM ABA vs. No Treatment
  misc_feature: MA Experiment ID: 108577 Result: Down-regulated in Transcription
  misc_feature: MA Experiment 108577 PARAMETER Experiment Name: At_42deg_Heat_cDNA_P Parameter: Temperature (deg C) Value: 42 vs. 22
  misc_feature: MA Experiment 108577 PARAMETER Experiment Name: At_42deg_Heat_cDNA_P Parameter: Timepoint (hr) Value: 6
  misc_feature: MA Experiment 108577 PARAMETER Experiment Name: At_42deg_Heat_cDNA_P Parameter: Tissue Value: Aerial
  misc_feature: MA Experiment ID: 108595 Result: Up-regulated in Transcription
  misc_feature: MA Experiment 108595 PARAMETER Experiment Name: At_Ler-pi_Ovule_cDNA_P Parameter: Plant Line Value: null
  misc_feature: MA Experiment ID: 20000069 Result: Down-regulated in Transcription
  misc_feature: MA Experiment 20000069 PARAMETER Experiment Name: At_100uM_ABA_Mutants_cDNA_P Parameter: Plant Line Value: CS23
  misc_feature: MA Experiment 20000069 PARAMETER Experiment Name: At_100uM_ABA_Mutants_cDNA_P Parameter: Timepoint (hr) Value: 6
  misc_feature: MA Experiment 20000069 PARAMETER Experiment Name: At_100uM_ABA_Mutants_cDNA_P Parameter: Tissue Value: Aerial
  misc_feature: MA Experiment 20000069 PARAMETER Experiment Name: At_100uM_ABA_Mutants_cDNA_P Parameter: Treatment Value: 100uM ABA vs. No Treatment
  misc_feature: MA Experiment ID: 20000093 Result: Down-regulated in Transcription
  misc_feature: MA Experiment 20000093 PARAMETER Experiment Name: At_42deg_Heat_cDNA_P Parameter: Temperature (deg C) Value: 42 vs. 22
  misc_feature: MA Experiment 20000093 PARAMETER Experiment Name: At_42deg_Heat_cDNA_P Parameter: Timepoint (hr) Value: 0.5
  misc_feature: MA Experiment 20000093 PARAMETER Experiment Name: At_42deg_Heat_cDNA_P Parameter: Tissue Value: Aerial
  misc_feature: MA Experiment ID: 20000111 Result: Down-regulated in Transcription
  misc_feature: MA Experiment 20000111 PARAMETER Experiment Name: At_42deg_Heat_cDNA_P Parameter: Temperature (deg C) Value: 42 vs. 22
  misc_feature: MA Experiment 20000111 PARAMETER Experiment Name: At_42deg_Heat_cDNA_P Parameter: Timepoint (hr) Value: 6
  misc_feature: MA Experiment 20000111 PARAMETER Experiment Name: At_42deg_Heat_cDNA_P Parameter: Tissue Value: Aerial
  misc_feature: MA Experiment ID: 20000112 Result: Down-regulated in Transcription
  misc_feature: MA Experiment 20000112 PARAMETER Experiment Name: At_42deg_Heat_cDNA_P Parameter: Temperature (deg C) Value: 42 vs. 22
  misc_feature: MA Experiment 20000112 PARAMETER Experiment Name: At_42deg_Heat_cDNA_P Parameter: Timepoint (hr) Value: 2
  misc_feature: MA Experiment 20000112 PARAMETER Experiment Name: At_42deg_Heat_cDNA_P Parameter: Tissue Value: Aerial
  misc_feature: MA Experiment ID: 20000113 Result: Down-regulated in Transcription
  misc_feature: MA Experiment 20000113 PARAMETER Experiment Name: At_42deg_Heat_cDNA_P Parameter: Temperature (deg C) Value: 42 vs. 22
  misc_feature: MA Experiment 20000113 PARAMETER Experiment Name: At_42deg_Heat_cDNA_P Parameter: Timepoint (hr) Value: 8
  misc_feature: MA Experiment 20000113 PARAMETER Experiment Name: At_42deg_Heat_cDNA_P Parameter: Tissue Value: Aerial
  misc_feature: MA Experiment ID: 20000117 Result: Down-regulated in Transcription
  misc_feature: MA Experiment 20000117 PARAMETER Experiment Name: At_100uM_ABA_Mutants_cDNA_P Parameter: Plant Line Value: Columbia
  misc_feature: MA Experiment 20000117 PARAMETER Experiment Name: At_100uM_ABA_Mutants_cDNA_P Parameter: Timepoint (hr) Value: 6
  misc_feature: MA Experiment 20000117 PARAMETER Experiment Name: At_100uM_ABA_Mutants_cDNA_P Parameter: Tissue Value: Aerial
  misc_feature: MA Experiment 20000117 PARAMETER Experiment Name: At_100uM_ABA_Mutants_cDNA_P Parameter: Treatment Value: 100uM ABA vs. No Treatment
  misc_feature: MA Experiment ID: 20000144 Result: Down-regulated in Transcription
  misc_feature: MA Experiment 20000144 PARAMETER Experiment Name: At_42deg_Heat_cDNA_P Parameter: Temperature (deg C) Value: 42 vs. 22
  misc_feature: MA Experiment 20000144 PARAMETER Experiment Name: At_42deg_Heat_cDNA_P Parameter: Timepoint (hr) Value: 1
  misc_feature: MA Experiment 20000144 PARAMETER Experiment Name: At_42deg_Heat_cDNA_P Parameter: Tissue Value: Aerial
  misc_feature: MA Experiment ID: 20000171 Result: Down-regulated in Transcription
  misc_feature: MA Experiment 20000171 PARAMETER Experiment Name: At_42deg_Heat_P Parameter: Age (day) Value: 14
  misc_feature: MA Experiment 20000171 PARAMETER Experiment Name: At_42deg_Heat_P Parameter: Organism Value: A. thaliana
  misc_feature: MA Experiment 20000171 PARAMETER Experiment Name: At_42deg_Heat_P Parameter: Plant Line Value: WS
  misc_feature: MA Experiment 20000171 PARAMETER Experiment Name: At_42deg_Heat_P Parameter: Temperature (deg C) Value: 42 vs. 22
  misc_feature: MA Experiment 20000171 PARAMETER Experiment Name: At_42deg_Heat_P Parameter: Timepoint (hr) Value: 1
  misc_feature: MA Experiment 20000171 PARAMETER Experiment Name: At_42deg_Heat_P Parameter: Tissue Value: Aerial
  misc_feature: MA Experiment ID: 20000173 Result: Down-regulated in Transcription
  misc_feature: MA Experiment 20000173 PARAMETER Experiment Name: At_42deg_Heat_P Parameter: Age (day) Value: 14
  misc_feature: MA Experiment 20000173 PARAMETER Experiment Name: At_42deg_Heat_P Parameter: Organism Value: A. thaliana
  misc_feature: MA Experiment 20000173 PARAMETER Experiment Name: At_42deg_Heat_P Parameter: Plant Line Value: WS
  misc_feature: MA Experiment 20000173 PARAMETER Experiment Name: At_42deg_Heat_P Parameter: Temperature (deg C) Value: 42 vs. 22
  misc_feature: MA Experiment 20000173 PARAMETER Experiment Name: At_42deg_Heat_P Parameter: Timepoint (hr) Value: 6
  misc_feature: MA Experiment 20000173 PARAMETER Experiment Name: At_42deg_Heat_P Parameter: Tissue Value: Aerial
  misc_feature: MA Experiment ID: 20000179 Result: Up-regulated in Transcription
  misc_feature: MA Experiment 20000179 PARAMETER Experiment Name: At_Germinating_Seeds_P Parameter: Age (hr) Value: 6 vs. 0
  misc_feature: MA Experiment 20000179 PARAMETER Experiment Name: At_Germinating_Seeds_P Parameter: Tissue Value: Germinating Seeds
  misc_feature: MA Experiment ID: 20000180 Result: Up-regulated in Transcription
  misc_feature: MA Experiment 20000180 PARAMETER Experiment Name: At_Germinating_Seeds_P Parameter: Age (hr) Value: 24 vs. 0
  misc_feature: MA Experiment 20000180 PARAMETER Experiment Name: At_Germinating_Seeds_P Parameter: Tissue Value: Germinating Seeds
  misc_feature: MA Experiment ID: 20000184 Result: Down-regulated in Transcription
  misc_feature: MA Experiment 20000184 PARAMETER Experiment Name: At_Shoots__P Parameter: Age (day) Value: 7
  misc_feature: MA Experiment 20000184 PARAMETER Experiment Name: At_Shoots__P Parameter: Tissue Value: Shoots vs. Whole Plant
  misc_feature: MA Experiment ID: 20000185 Result: Down-regulated in Transcription
  misc_feature: MA Experiment 20000185 PARAMETER Experiment Name: At_Roots__P Parameter: Age (day) Value: 7 vs. 21
  misc_feature: MA Experiment 20000185 PARAMETER Experiment Name: At_Roots__P Parameter: Organism Value: A. thaliana
  misc_feature: MA Experiment 20000185 PARAMETER Experiment Name: At_Roots__P Parameter: Tissue Value: Roots vs. Whole Plant
  misc_feature: MA Experiment ID: 20000224 Result: Up-regulated in Transcription
  misc_feature: MA Experiment ID: 20000227 Result: Down-regulated in Transcription
  misc_feature: MA Experiment 20000227 PARAMETER Experiment Name: At_Root-Tips-vs-Tops_P Parameter: Tissue Value: Root Tips vs. Root Tops
  misc_feature: MA Experiment ID: 20000234 Result: Up-regulated in Transcription
  misc_feature: MA Experiment 20000234 PARAMETER Experiment Name: At_Siliques_P Parameter: Age (day) Value: 21
  misc_feature: MA Experiment 20000234 PARAMETER Experiment Name: At_Siliques_P Parameter: Organism Value: A. thaliana
  misc_feature: MA Experiment 20000234 PARAMETER Experiment Name: At_Siliques_P Parameter: Plant Line Value: WS
  misc_feature: MA Experiment 20000234 PARAMETER Experiment Name: At_Siliques_P Parameter: Tissue Value: Less Than 5mm Siliques vs. Whole Plant
  misc_feature: MA Experiment ID: 20000235 Result: Up-regulated in Transcription
  misc_feature: MA Experiment 20000235 PARAMETER Experiment Name: At_Siliques_P Parameter: Age (day) Value: 21
  misc_feature: MA Experiment 20000235 PARAMETER Experiment Name: At_Siliques_P Parameter: Organism Value: A. thaliana
  misc_feature: MA Experiment 20000235 PARAMETER Experiment Name: At_Siliques_P Parameter: Plant Line Value: WS
  misc_feature: MA Experiment 20000235 PARAMETER Experiment Name: At_Siliques_P Parameter: Tissue Value: 5-10mm Siliques vs. Whole Plant
  misc_feature: MA Experiment ID: 20000264 Result: Up-regulated in Transcription
  misc_feature: MA Experiment 20000264 PARAMETER Experiment Name: At_Open_Flower_P Parameter: Age (day) Value: 21
  misc_feature: MA Experiment 20000264 PARAMETER Experiment Name: At_Open_Flower_P Parameter: Plant Line Value: WS
  misc_feature: MA Experiment 20000264 PARAMETER Experiment Name: At_Open_Flower_P Parameter: Tissue Value: Open Flower vs. Whole Plant
  misc_feature: MA Experiment ID: 20000265 Result: Up-regulated in Transcription
  misc_feature: MA Experiment 20000265 PARAMETER Experiment Name: At_Open_Flower_P Parameter: Age (day) Value: 21
  misc_feature: MA Experiment 20000265 PARAMETER Experiment Name: At_Open_Flower_P Parameter: Plant Line Value: WS
  misc_feature: MA Experiment 20000265 PARAMETER Experiment Name: At_Open_Flower_P Parameter: Tissue Value: Closed Flower vs. Whole Plant
  misc_feature: MA Experiment ID: 20000286 Result: Up-regulated in Transcription
  misc_feature: MA Experiment 20000286 PARAMETER Experiment Name: At_Open_Flower_P Parameter: Age (day) Value: 21
  misc_feature: MA Experiment 20000286 PARAMETER Experiment Name: At_Open_Flower_P Parameter: Plant Line Value: WS
  misc_feature: MA Experiment 20000286 PARAMETER Experiment Name: At_Open_Flower_P Parameter: Tissue Value: Half Open vs. Whole Plant
  misc_feature: MA Experiment ID: 20000437 Result: Down-regulated in Transcription
  misc_feature: MA Experiment 20000437 PARAMETER Experiment Name: At_Drought_P Parameter: Age (day) Value: 8
  misc_feature: MA Experiment 20000437 PARAMETER Experiment Name: At_Drought_P Parameter: Organism Value: A. thaliana
  misc_feature: MA Experiment 20000437 PARAMETER Experiment Name: At_Drought_P Parameter: Plant Line Value: WS
  misc_feature: MA Experiment 20000437 PARAMETER Experiment Name: At_Drought_P Parameter: Timepoint (hr) Value: 24
  misc_feature: MA Experiment 20000437 PARAMETER Experiment Name: At_Drought_P Parameter: Tissue Value: Whole Plant
  misc_feature: MA Experiment 20000437 PARAMETER Experiment Name: At_Drought_P Parameter: Treatment Value: Drought vs. No Drought
  misc_feature: MA Experiment ID: 20000439 Result: Down-regulated in Transcription
  misc_feature: MA Experiment 20000439 PARAMETER Experiment Name: At_Roots__P Parameter: Age (day) Value: 14 vs. 21
  misc_feature: MA Experiment 20000439 PARAMETER Experiment Name: At_Roots__P Parameter: Organism Value: A. thaliana
  misc_feature: MA Experiment 20000439 PARAMETER Experiment Name: At_Roots__P Parameter: Tissue Value: Roots vs. Whole Plant
  misc_feature: MA Experiment ID: 20000451 Result: Up-regulated in Transcription
  misc_feature: MA Experiment 20000451 PARAMETER Experiment Name: At_CS6879_Shoots-Roots_P Parameter: Age (day) Value: 14
  misc_feature: MA Experiment 20000451 PARAMETER Experiment Name: At_CS6879_Shoots-Roots_P Parameter: Organism Value: A. thaliana
  misc_feature: MA Experiment 20000451 PARAMETER Experiment Name: At_CS6879_Shoots-Roots_P Parameter: Plant Line Value: CS6879 vs. WS
  misc_feature: MA Experiment 20000451 PARAMETER Experiment Name: At_CS6879_Shoots-Roots_P Parameter: Tissue Value: Roots
  misc_feature: MA Experiment ID: 20000460 Result: Up-regulated in Transcription
  misc_feature: MA Experiment 20000460 PARAMETER Experiment Name: At_10percent_PEG_P Parameter: Age (day) Value: 12
  misc_feature: MA Experiment 20000460 PARAMETER Experiment Name: At_10percent_PEG_P Parameter: Organism Value: A. thaliana
  misc_feature: MA Experiment 20000460 PARAMETER Experiment Name: At_10percent_PEG_P Parameter: Plant Line Value: WS
  misc_feature: MA Experiment 20000460 PARAMETER Experiment Name: At_10percent_PEG_P Parameter: Timepoint (day) Value: 12
  misc_feature: MA Experiment 20000460 PARAMETER Experiment Name: At_10percent_PEG_P Parameter: Tissue Value: Whole Plant
  misc_feature: MA Experiment 20000460 PARAMETER Experiment Name: At_10percent_PEG_P Parameter: Treatment Value: 10percent PEG vs. No Treatment
  misc_feature: MA Experiment ID: 20000495 Result: Up-regulated in Transcription
  misc_feature: MA Experiment 20000495 PARAMETER Experiment Name: At_Guard_Cells_P Parameter: Harvest Date Value: 8/2/2002
  misc_feature: MA Experiment 20000495 PARAMETER Experiment Name: At_Guard_Cells_P Parameter: Organism Value: A. thaliana
  misc_feature: MA Experiment 20000495 PARAMETER Experiment Name: At_Guard_Cells_P Parameter: Tissue Value: Guard Cells vs. Leaves
  misc_feature: MA Experiment ID: 20000573 Result: Down-regulated in Transcription
  misc_feature: MA Experiment 20000573 PARAMETER Experiment Name: At_100uM_ABA_Mutants__P Parameter: Organism Value: A. thaliana
  misc_feature: MA Experiment 20000573 PARAMETER Experiment Name: At_100uM_ABA_Mutants__P Parameter: Plant Line Value: CS22 vs. Ler wt
  misc_feature: MA Experiment 20000573 PARAMETER Experiment Name: At_100uM_ABA_Mutants__P Parameter: Timepoint (hr) Value: N/A
  misc_feature: MA Experiment 20000573 PARAMETER Experiment Name: At_100uM_ABA_Mutants__P Parameter: Tissue Value: Whole Plant
  misc_feature: MA Experiment 20000573 PARAMETER Experiment Name: At_100uM_ABA_Mutants__P Parameter: Treatment Value: None
  misc_feature: MA Experiment ID: 20000574 Result: Down-regulated in Transcription
  misc_feature: MA Experiment 20000574 PARAMETER Experiment Name: At_100uM_ABA_Mutants__P Parameter: Organism Value: A. thaliana
  misc_feature: MA Experiment 20000574 PARAMETER Experiment Name: At_100uM_ABA_Mutants__P Parameter: Plant Line Value: CS23 vs. Ler wt
  misc_feature: MA Experiment 20000574 PARAMETER Experiment Name: At_100uM_ABA_Mutants__P Parameter: Timepoint (hr) Value: N/A
  misc_feature: MA Experiment 20000574 PARAMETER Experiment Name: At_100uM_ABA_Mutants__P Parameter: Tissue Value: Whole Plant
  misc_feature: MA Experiment 20000574 PARAMETER Experiment Name: At_100uM_ABA_Mutants__P Parameter: Treatment Value: None
  misc_feature: MA Experiment ID: 20000794 Result: Down-regulated in Transcription
  misc_feature: MA Experiment 20000794 PARAMETER Experiment Name: At_Petals_P Parameter: Age (day) Value: 23-25 days
  misc_feature: MA Experiment 20000794 PARAMETER Experiment Name: At_Petals_P Parameter: Plant Line Value: WS
  misc_feature: MA Experiment 20000794 PARAMETER Experiment Name: At_Petals_P Parameter: Tissue Value: Petals vs. Whole plant
  misc_feature: MA Experiment ID: 20001248 Result: Down-regulated in Transcription
  misc_feature: MA Experiment 20001248 PARAMETER Experiment Name: At_Far-red-induction_P Parameter: Age (day) Value: 7
  misc_feature: MA Experiment 20001248 PARAMETER Experiment Name: At_Far-red-induction_P Parameter: Light Value: Far-red vs. White
  misc_feature: MA Experiment 20001248 PARAMETER Experiment Name: At_Far-red-induction_P Parameter: Organism Value: A. thaliana
  misc_feature: MA Experiment 20001248 PARAMETER Experiment Name: At_Far-red-induction_P Parameter: Plant Line Value: Columbia
  misc_feature: MA Experiment 20001248 PARAMETER Experiment Name: At_Far-red-induction_P Parameter: Timepoint (hr) Value: 4
  misc_feature: MA Experiment 20001248 PARAMETER Experiment Name: At_Far-red-induction_P Parameter: Tissue Value: Whole Plant
  misc_feature: MA Experiment ID: 20001450 Result: Down-regulated in Transcription
  misc_feature: MA Experiment 20001450 PARAMETER Experiment Name: At_Far-red-induction_P Parameter: Age (day) Value: 7
  misc_feature: MA Experiment 20001450 PARAMETER Experiment Name: At_Far-red-induction_P Parameter: Light Value: Far-red vs. White
  misc_feature: MA Experiment 20001450 PARAMETER Experiment Name: At_Far-red-induction_P Parameter: Organism Value: A. thaliana
  misc_feature: MA Experiment 20001450 PARAMETER Experiment Name: At_Far-red-induction_P Parameter: Plant Line Value: Columbia
  misc_feature: MA Experiment 20001450 PARAMETER Experiment Name: At_Far-red-induction_P Parameter: Timepoint (hr) Value: 8
  misc_feature: MA Experiment 20001450 PARAMETER Experiment Name: At_Far-red-induction_P Parameter: Tissue Value: Whole Plant
  misc_feature: MA Experiment ID: 20001451 Result: Down-regulated in Transcription
  misc_feature: MA Experiment 20001451 PARAMETER Experiment Name: At_Far-red-induction_P Parameter: Age (day) Value: 7
  misc_feature: MA Experiment 20001451 PARAMETER Experiment Name: At_Far-red-induction_P Parameter: Light Value: Far-red vs. White
  misc_feature: MA Experiment 20001451 PARAMETER Experiment Name: At_Far-red-induction_P Parameter: Organism Value: A. thaliana
  misc_feature: MA Experiment 20001451 PARAMETER Experiment Name: At_Far-red-induction_P Parameter: Plant Line Value: Columbia
  misc_feature: MA Experiment 20001451 PARAMETER Experiment Name: At_Far-red-induction_P Parameter: Timepoint (hr) Value: 24
  misc_feature: MA Experiment 20001451 PARAMETER Experiment Name: At_Far-red-induction_P Parameter: Tissue Value: Whole Plant
  misc_feature: MA Experiment ID: 20001457 Result: Up-regulated in Transcription
  misc_feature: MA Experiment 20001457 PARAMETER Experiment Name: At_50mM_NH4NO3_L-to-H_P Parameter: Age (day) Value: Undefined
  misc_feature: MA Experiment 20001457 PARAMETER Experiment Name: At_50mM_NH4NO3_L-to-H_P Parameter: Organism Value: Undefined
  misc_feature: MA Experiment 20001457 PARAMETER Experiment Name: At_50mM_NH4NO3_L-to-H_P Parameter: Plant Line Value: Undefined
  misc_feature: MA Experiment 20001457 PARAMETER Experiment Name: At_50mM_NH4NO3_L-to-H_P Parameter: Timepoint (hr) Value: 0.5
  misc_feature: MA Experiment 20001457 PARAMETER Experiment Name: At_50mM_NH4NO3_L-to-H_P Parameter: Tissue Value: Siliques
  misc_feature: MA Experiment 20001457 PARAMETER Experiment Name: At_50mM_NH4NO3_L-to-H_P Parameter: Treatment Value: 50mM NH4NO3 vs. 100mM Manitol
  misc_feature: MA Experiment ID: 20001555 Result: Down-regulated in Transcription
  misc_feature: MA Experiment 20001555 PARAMETER Experiment Name: At_Drought_Soil_Dry_P Parameter: Age (day) Value: 24
  misc_feature: MA Experiment 20001555 PARAMETER Experiment Name: At_Drought_Soil_Dry_P Parameter: Organism Value: A. thaliana
  misc_feature: MA Experiment 20001555 PARAMETER Experiment Name: At_Drought_Soil_Dry_P Parameter: Plant Line Value: WS
  misc_feature: MA Experiment 20001555 PARAMETER Experiment Name: At_Drought_Soil_Dry_P Parameter: Post Timepoint (hr) Value: None
  misc_feature: MA Experiment 20001555 PARAMETER Experiment Name: At_Drought_Soil_Dry_P Parameter: Post-Treatment Value: None
  misc_feature: MA Experiment 20001555 PARAMETER Experiment Name: At_Drought_Soil_Dry_P Parameter: Timepoint (day) Value: 10
  misc_feature: MA Experiment 20001555 PARAMETER Experiment Name: At_Drought_Soil_Dry_P Parameter: Treatment Value: Drought vs. No Drought
  misc_feature: MA Experiment ID: 20001556 Result: Down-regulated in Transcription
  misc_feature: MA Experiment 20001556 PARAMETER Experiment Name: At_Drought_Soil_Dry_P Parameter: Age (day) Value: 26
  misc_feature: MA Experiment 20001556 PARAMETER Experiment Name: At_Drought_Soil_Dry_P Parameter: Organism Value: A. thaliana
  misc_feature: MA Experiment 20001556 PARAMETER Experiment Name: At_Drought_Soil_Dry_P Parameter: Plant Line Value: WS
  misc_feature: MA Experiment 20001556 PARAMETER Experiment Name: At_Drought_Soil_Dry_P Parameter: Post Timepoint (hr) Value: None
  misc_feature: MA Experiment 20001556 PARAMETER Experiment Name: At_Drought_Soil_Dry_P Parameter: Post-Treatment Value: None
  misc_feature: MA Experiment 20001556 PARAMETER Experiment Name: At_Drought_Soil_Dry_P Parameter: Timepoint (day) Value: 12
  misc_feature: MA Experiment 20001556 PARAMETER Experiment Name: At_Drought_Soil_Dry_P Parameter: Treatment Value: Drought vs. No Drought
  misc_feature: MA Experiment ID: 20001558 Result: Up-regulated in Transcription
  misc_feature: MA Experiment 20001558 PARAMETER Experiment Name: At_Drought_Soil_Dry_P Parameter: Age (day) Value: 27
  misc_feature: MA Experiment 20001558 PARAMETER Experiment Name: At_Drought_Soil_Dry_P Parameter: Organism Value: A. thaliana
  misc_feature: MA Experiment 20001558 PARAMETER Experiment Name: At_Drought_Soil_Dry_P Parameter: Plant Line Value: WS
  misc_feature: MA Experiment 20001558 PARAMETER Experiment Name: At_Drought_Soil_Dry_P Parameter: Post Timepoint (hr) Value: 6
  misc_feature: MA Experiment 20001558 PARAMETER Experiment Name: At_Drought_Soil_Dry_P Parameter: Post-Treatment Value: Re-Water vs. No Drought
  misc_feature: MA Experiment 20001558 PARAMETER Experiment Name: At_Drought_Soil_Dry_P Parameter: Timepoint (day) Value: 13
  misc_feature: MA Experiment 20001558 PARAMETER Experiment Name: At_Drought_Soil_Dry_P Parameter: Treatment Value: Drought vs. No Drought
  misc_feature: MA Experiment ID: 20001559 Result: Down-regulated in Transcription
  misc_feature: MA Experiment 20001559 PARAMETER Experiment Name: At_Drought_Soil_Dry_P Parameter: Age (day) Value: 28
  misc_feature: MA Experiment 20001559 PARAMETER Experiment Name: At_Drought_Soil_Dry_P Parameter: Organism Value: A. thaliana
  misc_feature: MA Experiment 20001559 PARAMETER Experiment Name: At_Drought_Soil_Dry_P Parameter: Plant Line Value: WS
  misc_feature: MA Experiment 20001559 PARAMETER Experiment Name: At_Drought_Soil_Dry_P Parameter: Post Timepoint (hr) Value: 29
  misc_feature: MA Experiment 20001559 PARAMETER Experiment Name: At_Drought_Soil_Dry_P Parameter: Post-Treatment Value: Re-Water vs. No Drought
  misc_feature: MA Experiment 20001559 PARAMETER Experiment Name: At_Drought_Soil_Dry_P Parameter: Timepoint (day) Value: 14
  misc_feature: MA Experiment 20001559 PARAMETER Experiment Name: At_Drought_Soil_Dry_P Parameter: Treatment Value: Drought vs. No Drought
  misc_feature: MA Experiment ID: 20001560 Result: Up-regulated in Transcription
  misc_feature: MA Experiment 20001560 PARAMETER Experiment Name: At_Drought_Soil_Dry_P Parameter: Age (day) Value: 28
  misc_feature: MA Experiment 20001560 PARAMETER Experiment Name: At_Drought_Soil_Dry_P Parameter: Organism Value: A. thaliana
  misc_feature: MA Experiment 20001560 PARAMETER Experiment Name: At_Drought_Soil_Dry_P Parameter: Plant Line Value: WS
  misc_feature: MA Experiment 20001560 PARAMETER Experiment Name: At_Drought_Soil_Dry_P Parameter: Post Timepoint (hr) Value: None
  misc_feature: MA Experiment 20001560 PARAMETER Experiment Name: At_Drought_Soil_Dry_P Parameter: Post-Treatment Value: None
  misc_feature: MA Experiment 20001560 PARAMETER Experiment Name: At_Drought_Soil_Dry_P Parameter: Timepoint (day) Value: 14
  misc_feature: MA Experiment 20001560 PARAMETER Experiment Name: At_Drought_Soil_Dry_P Parameter: Treatment Value: Drought vs. No Drought
aaaaaaaaaacagaaagtaacatgagatctctcttattagccgtgtgcctggttcttgctttacactgcggtgaagcagccgtgtcttgcaacacggtgattgcggatctttacccttgcttatcctacgtgactcagggcggaccggtcccaaccctctgctgcaacggtctcacaacactcaagagtcaggctcaaacttctgtggaccgtcagggggtctgtcgttgcatcaaatctgctattggaggactcactctctctcctagaaccatccaaaatgctttggaattgccttctaaatgtggtgtcgatctcccttacaagttcagcccttccactgactgcgacagtatccagtgagacaagcagaaaatcttaaaggaagctactacaagaactataataacctaataattaataaatgagggcattggtttgctagttgctaattgatcagtgatgtattgtcattttgaatgttctaatatcagcaggcacttatctctg

SEQ ID NO: 84213 - protein, 120 aa, Arabidopsis thaliana
  peptide (1)..(120): Ceres Seq. ID no. 12673732
  misc_feature (30)..(116): Pfam Name: Protease inhibitor/seed storage/LTP family Pfam Description: Protease inhibitor/seed storage/LTP family
  misc_feature (8)..(120): Homolog of NCBI NO: 15231964 NR Description: putative nonspecific lipid-transfer protein; id: At3g08770.1, supported by cDNA: 26569., supported by cDNA: supported by cDNA: gi_20148576, supported by cDNA: transfer
  misc_feature (8)..(120): Homolog of NCBI NO: 15241086 NR Description: lipid-transfer protein-like; protein id:
  misc_feature (15)..(120): Homolog of NCBI NO: 16903206 NR Description: lipid transfer protein precursor [Davidia
  misc_feature (10)..(120): Homolog of NCBI NO: 6782436 NR Description: lipid-transfer protein [Nicotiana glauca]
  misc_feature (11)..(120): Homolog of NCBI NO: 2497753 NR Description: NONSPECIFIC LIPID-TRANSFER PROTEIN 3 PRECURSOR
  misc_feature (16)..(120): Homolog of NCBI NO: 6093512 NR Description: NONSPECIFIC LIPID-TRANSFER PROTEIN PRECURSOR
  misc_feature (12)..(120): Homolog of NCBI NO: 16930759 NR Description: lipid transfer protein-like protein [Retama
  misc_feature (16)..(120): Homolog of NCBI NO: 7438274 NR Description: lipid transfer protein SDi-9, drought-induced -
  misc_feature (10)..(120): Homolog of NCBI NO: 18477856 NR Description: lipid transfer protein [Fragaria x ananassa]
  misc_feature (12)..(120): Homolog of NCBI NO: 11095210 NR Description: lipid transfer protein 3 precursor [Gossypium
KKKTESNMRSLLLAVCLVLALHCGEAAVSCNTVIADLYPCLSYVTQGGPVPTLCCNGLTTLKSQAQTSVDRQGVCRCIKSAIGGLTLSPRTIQNALELPSKCGVDLPYKFSPSTDCDSIQ

SEQ ID NO: 84214 - protein, 113 aa, Arabidopsis thaliana; identical to SEQ ID NO: 36177
  peptide (1)..(113): Ceres Seq. ID no. 12673733
  misc_feature (23)..(109): Pfam Name: Protease inhibitor/seed storage/LTP family Pfam Description: Protease inhibitor/seed storage/LTP family
  misc_feature (1)..(113): Homolog of NCBI NO: 15231964 NR Description: putative nonspecific lipid-transfer protein; id: At3g08770.1, supported by cDNA: 26569., supported by cDNA: supported by cDNA: gi_20148576, supported by cDNA: transfer
  misc_feature (1)..(113): Homolog of NCBI NO: 15241086 NR Description: lipid-transfer protein-like; protein id:
  misc_feature (8)..(113): Homolog of NCBI NO: 16903206 NR Description: lipid transfer protein precursor [Davidia
  misc_feature (3)..(113): Homolog of NCBI NO: 6782436 NR Description: lipid-transfer protein [Nicotiana glauca]
  misc_feature (4)..(113): Homolog of NCBI NO: 2497753 NR Description: NONSPECIFIC LIPID-TRANSFER PROTEIN 3 PRECURSOR
  misc_feature (9)..(113): Homolog of NCBI NO: 6093512 NR Description: NONSPECIFIC LIPID-TRANSFER PROTEIN PRECURSOR
  misc_feature (5)..(113): Homolog of NCBI NO: 16930759 NR Description: lipid transfer protein-like protein [Retama
  misc_feature (9)..(113): Homolog of NCBI NO: 7438274 NR Description: lipid transfer protein SDi-9, drought-induced -
  misc_feature (3)..(113): Homolog of NCBI NO: 18477856 NR Description: lipid transfer protein [Fragaria x ananassa]
  misc_feature (5)..(113): Homolog of NCBI NO: 11095210 NR Description: lipid transfer protein 3 precursor [Gossypium

SEQ ID NO: 84215 - DNA, 1074 bp, Arabidopsis thaliana
  misc_feature (1)..(1074): Ceres Seq. ID no. 12673761
  misc_feature: MA Experiment ID: 108668 Result: Up-regulated in Transcription
  misc_feature: MA Experiment 108668 PARAMETER Experiment Name: At_2mM_SA_cDNA_P Parameter: Plant Line Value: WS
  misc_feature: MA Experiment 108668 PARAMETER Experiment Name: At_2mM_SA_cDNA_P Parameter: Timepoint (hr) Value: 6
  misc_feature: MA Experiment 108668 PARAMETER Experiment Name: At_2mM_SA_cDNA_P Parameter: Treatment Value: 2mM SA vs. No Treatment
  misc_feature: MA Experiment ID: 20000182 Result: Up-regulated in Transcription
  misc_feature: MA Experiment 20000182 PARAMETER Experiment Name: At_2mM_SA_P Parameter: Age (day) Value: 14
  misc_feature: MA Experiment 20000182 PARAMETER Experiment Name: At_2mM_SA_P Parameter: Organism Value: A. thaliana
  misc_feature: MA Experiment 20000182 PARAMETER Experiment Name: At_2mM_SA_P Parameter: Plant Line Value: WS
  misc_feature: MA Experiment 20000182 PARAMETER Experiment Name: At_2mM_SA_P Parameter: Timepoint (hr) Value: 6
  misc_feature: MA Experiment 20000182 PARAMETER Experiment Name: At_2mM_SA_P Parameter: Tissue Value: Aerial
  misc_feature: MA Experiment 20000182 PARAMETER Experiment Name: At_2mM_SA_P Parameter: Treatment Value: 2mM SA vs. No Treatment
  misc_feature: MA Experiment ID: 20000235 Result: Down-regulated in Transcription
  misc_feature: MA Experiment 20000235 PARAMETER Experiment Name: At_Siliques_P Parameter: Age (day) Value: 21
  misc_feature: MA Experiment 20000235 PARAMETER Experiment Name: At_Siliques_P Parameter: Organism Value: A. thaliana
  misc_feature: MA Experiment 20000235 PARAMETER Experiment Name: At_Siliques_P Parameter: Plant Line Value: WS
  misc_feature: MA Experiment 20000235 PARAMETER Experiment Name: At_Siliques_P Parameter: Tissue Value: 5-10mm Siliques vs. Whole Plant
  misc_feature: MA Experiment ID: 20000264 Result: Down-regulated in Transcription
  misc_feature: MA Experiment 20000264 PARAMETER Experiment Name: At_Open_Flower_P Parameter: Age (day) Value: 21
  misc_feature: MA Experiment 20000264 PARAMETER Experiment Name: At_Open_Flower_P Parameter: Plant Line Value: WS
  misc_feature: MA Experiment 20000264 PARAMETER Experiment Name: At_Open_Flower_P Parameter: Tissue Value: Open Flower vs. Whole Plant
  misc_feature: MA Experiment ID: 20000286 Result: Down-regulated in Transcription
  misc_feature: MA Experiment 20000286 PARAMETER Experiment Name: At_Open_Flower_P Parameter: Age (day) Value: 21
  misc_feature: MA Experiment 20000286 PARAMETER Experiment Name: At_Open_Flower_P Parameter: Plant Line Value: WS
  misc_feature: MA Experiment 20000286 PARAMETER Experiment Name: At_Open_Flower_P Parameter: Tissue Value: Half Open vs. Whole Plant
  misc_feature: MA Experiment ID: 20000438 Result: Down-regulated in Transcription
  misc_feature: MA Experiment 20000438 PARAMETER Experiment Name: At_Shoots__P Parameter: Age (day) Value: 14
  misc_feature: MA Experiment 20000438 PARAMETER Experiment Name: At_Shoots__P Parameter: Tissue Value: Shoots vs. Whole Plant
  misc_feature: MA Experiment ID: 20000439 Result: Down-regulated in Transcription
  misc_feature: MA Experiment 20000439 PARAMETER Experiment Name: At_Roots__P Parameter: Age (day) Value: 14 vs. 21
  misc_feature: MA Experiment 20000439 PARAMETER Experiment Name: At_Roots__P Parameter: Organism Value: A. thaliana
  misc_feature: MA Experiment 20000439 PARAMETER Experiment Name: At_Roots__P Parameter: Tissue Value: Roots vs. Whole Plant
  misc_feature: MA Experiment ID: 20001247 Result: Up-regulated in Transcription
  misc_feature: MA Experiment 20001247 PARAMETER Experiment Name: At_Far-red-induction_P Parameter: Age (day) Value: 7
  misc_feature: MA Experiment 20001247 PARAMETER Experiment Name: At_Far-red-induction_P Parameter: Light Value: Far-red vs. White
  misc_feature: MA Experiment 20001247 PARAMETER Experiment Name: At_Far-red-induction_P Parameter: Organism Value: A. thaliana
  misc_feature: MA Experiment 20001247 PARAMETER Experiment Name: At_Far-red-induction_P Parameter: Plant Line Value: Columbia
  misc_feature: MA Experiment 20001247 PARAMETER Experiment Name: At_Far-red-induction_P Parameter: Timepoint (hr) Value: 1
  misc_feature: MA Experiment 20001247 PARAMETER Experiment Name: At_Far-red-induction_P Parameter: Tissue Value: Whole Plant
  misc_feature: MA Experiment ID: 20001248 Result: Up-regulated in Transcription
  misc_feature: MA Experiment 20001248 PARAMETER Experiment Name: At_Far-red-induction_P Parameter: Age (day) Value: 7
  misc_feature: MA Experiment 20001248 PARAMETER Experiment Name: At_Far-red-induction_P Parameter: Light Value: Far-red vs. White
  misc_feature: MA Experiment 20001248 PARAMETER Experiment Name: At_Far-red-induction_P Parameter: Organism Value: A. thaliana
  misc_feature: MA Experiment 20001248 PARAMETER Experiment Name: At_Far-red-induction_P Parameter: Plant Line Value: Columbia
  misc_feature: MA Experiment 20001248 PARAMETER Experiment Name: At_Far-red-induction_P Parameter: Timepoint (hr) Value: 4
  misc_feature: MA Experiment 20001248 PARAMETER Experiment Name: At_Far-red-induction_P Parameter: Tissue Value: Whole Plant
gctttttcgttgctctttctcataaattcgtggagtttttgttatgtgtgttgatcttctttctgaggttgtagctggatcggcagcgtggttaggccgtggcctttcctgtgtttgtgttcagggtagagacggtgaccctcgtccttcatttgatctaacgcctgctcaggaggaatgcctgcagaggttgcaaagccgcattgatgttgcttatgacagctcaatacctcagcatcaggaagctctaaaggatctttggaaacttgcatttcctgaagaagagctacacggaattgtatctgatcagtggaaggaaatgggttggcagggaaaagatccatcgacagattttaggggtggtggttttatttctctcgaaaacttgttgtacttcgctaggaaattcccgaaatctttccacggccttctgcggaaacaggttggcgatcgttctgtgtgggaatacccctttgctgttgctggcatcaatataacattcatgctcatccagatgcttgaccttgaagcagtgaaaccacgaagtattgttggggaaacatttctaagattcctttcggtgaacgagtctgcgtttgaccttctttattgcattgccttcaagctaatggatcagcaatggctatccatgcgtgcttcatacatggagtttaacactgtgatgaaatcaacaaggcggcaactggagagagagattatgattgaagacattacaagtctcgaagatttgccatcatacagtcttctcagtcaatagcaaatagcttaccaaaaactactttgtaagtagaaagatctaacagctcagaaaccctatatcaaagctaaaacaacagcagagcaagtaagcaagcaaaaaagaagacaaggtttctctctctctcgctcttcactccatcttcctcgatattagtgttggttccatgaaatttgggttgttatttctatgaaaccagggtcagattttgtttcttatggggtcagattttctaacttgtggtgcttgtaaaacgttgttggttagttggtgttttgggctaataaatcatttgg

SEQ ID NO: 84216 - protein, 244 aa, Arabidopsis thaliana
  peptide (1)..(244): Ceres Seq. ID no. 12673762
  misc_feature (63)..(224): Pfam Name: Protein of unknown function, DUF609 Pfam Description: Protein of unknown function, DUF609
  misc_feature (7)..(244): Homolog of NCBI NO: 18411543 NR Description: putative protein; protein id: At3g60260.1, by cDNA: 104796., supported by cDNA: gi_17473881, supported by gi_20148670 [Arabidopsis thaliana] >gi|17473882|gb|AAL38361.1|
  misc_feature (7)..(244): Homolog of NCBI NO: 11288393 NR Description: hypothetical protein F27H5.50 - Arabidopsis >gi|7576202|emb|CAB87863.1| putative protein [Arabidopsis
  misc_feature (7)..(244): Homolog of NCBI NO: 18406626 NR Description: expressed protein; protein id: At2g44770.1, by cDNA: 36996., supported by cDNA: gi_15810013, supported by gi_17981658 [Arabidopsis thaliana] >gi|20197031|gb|AAC27479.2|
  misc_feature (7)..(244): Homolog of NCBI NO: 15810014 NR Description: At2g44770/F16B22.26 [Arabidopsis thaliana]
  misc_feature (7)..(244): Homolog of NCBI NO: 7485547 NR Description: hypothetical protein At2g44770 [imported] -
  misc_feature (7)..(244): Homolog of NCBI NO: 14140119 NR Description: putative protein [Oryza sativa]
  misc_feature (7)..(244): Homolog of NCBI NO: 38345956 NR Description: OSJNBb0038F03.14 [Oryza sativa (japonica
  misc_feature (11)..(243): Homolog of NCBI NO: 18408759 NR Description: hypothetical protein; protein id: At1g67400.1 thaliana] >gi|9828622|gb|AAG00245.1|AC002130_10 F1N21.22
  misc_feature (10)..(244): Homolog of NCBI NO: 15218859 NR Description: hypothetical protein; protein id: At1g03620.1
  misc_feature (6)..(242): Homolog of NCBI NO: 18396599 NR Description: expressed protein; protein id: At3g03610.1, by cDNA: 28199., supported by cDNA: gi_18377968 [Arabidopsis >gi|18377969|gb|AAL67127.1| unknown protein [Arabidopsis
MCVDLLSEVVAGSAAWLGRGLSCVCVQGRDGDPRPSFDLTPAQEECLQRLQSRIDVAYDSSIPQHQEALKDLWKLAFPEEELHGIVSDQWKEMGWQGKDPSTDFRGGGFISLENLLYFARKFPKSFHGLLRKQVGDRSVWEYPFAVAGINITFMLIQMLDLEAVKPRSIVGETFLRFLSVNESAFDLLYCIAFKLMDQQWLSMRASYMEFNTVMKSTRRQLEREIMIEDITSLEDLPSYSLLSQ

SEQ ID NO: 84217 - protein, 152 aa, Arabidopsis thaliana; identical to SEQ ID NO: 39197
  peptide (1)..(152): Ceres Seq. ID no. 12673763
  misc_feature (1)..(132): Pfam Name: Protein of unknown function, DUF609 Pfam Description: Protein of unknown function, DUF609
  misc_feature (1)..(152): Homolog of NCBI NO: 18411543 NR Description: putative protein; protein id: At3g60260.1, by cDNA: 104796., supported by cDNA: gi_17473881, supported by gi_20148670 [Arabidopsis thaliana] >gi|17473882|gb|AAL38361.1|
  misc_feature (1)..(152): Homolog of NCBI NO: 11288393 NR Description: hypothetical protein F27H5.50 - Arabidopsis >gi|7576202|emb|CAB87863.1| putative protein [Arabidopsis
  misc_feature (1)..(152): Homolog of NCBI NO: 18406626 NR Description: expressed protein; protein id: At2g44770.1, by cDNA: 36996., supported by cDNA: gi_15810013, supported by gi_17981658 [Arabidopsis thaliana] >gi|20197031|gb|AAC27479.2|
  misc_feature (1)..(152): Homolog of NCBI NO: 15810014 NR Description: At2g44770/F16B22.26 [Arabidopsis thaliana]
  misc_feature (1)..(152): Homolog of NCBI NO: 7485547 NR Description: hypothetical protein At2g44770 [imported] -
  misc_feature (1)..(152): Homolog of NCBI NO: 14140119 NR Description: putative protein [Oryza sativa]
  misc_feature (1)..(152): Homolog of NCBI NO: 38345956 NR Description: OSJNBb0038F03.14 [Oryza sativa (japonica
  misc_feature (1)..(151): Homolog of NCBI NO: 18408759 NR Description: hypothetical protein; protein id: At1g67400.1 thaliana] >gi|9828622|gb|AAG00245.1|AC002130_10 F1N21.22
  misc_feature (1)..(152): Homolog of NCBI NO: 15218859 NR Description: hypothetical protein; protein id: At1g03620.1
  misc_feature (1)..(150): Homolog of NCBI NO: 18396599 NR Description: expressed protein; protein id: At3g03610.1, by cDNA: 28199., supported by cDNA: gi_18377968 [Arabidopsis >gi|18377969|gb|AAL67127.1| unknown protein [Arabidopsis

SEQ ID NO: 84218 - DNA, 1296 bp, Arabidopsis thaliana
  misc_feature (1)..(1296): Ceres Seq. ID no. 12673764
  misc_feature: MA Experiment ID: 108569 Result: Up-regulated in Transcription
  misc_feature: MA Experiment 108569 PARAMETER Experiment Name: At_0.001%_MeJA__cDNA_P Parameter: Timepoint (hr) Value: 6
  misc_feature: MA Experiment 108569 PARAMETER Experiment Name: At_0.001%_MeJA__cDNA_P Parameter: Tissue Value: Aerial
  misc_feature: MA Experiment 108569 PARAMETER Experiment Name: At_0.001%_MeJA__cDNA_P Parameter: Treatment Value: 0.001% MeJA vs. No Treatment
  misc_feature: MA Experiment ID: 108573 Result: Up-regulated in Transcription
  misc_feature: MA Experiment 108573 PARAMETER Experiment Name: At_Drought_cDNA_P Parameter: Timepoint (hr) Value: 6
  misc_feature: MA Experiment 108573 PARAMETER Experiment Name: At_Drought_cDNA_P Parameter: Tissue Value: Aerial
  misc_feature: MA Experiment 108573 PARAMETER Experiment Name: At_Drought_cDNA_P Parameter: Treatment Value: Drought vs. No Drought
  misc_feature: MA Experiment ID: 108579 Result: Down-regulated in Transcription
  misc_feature: MA Experiment 108579 PARAMETER Experiment Name: At_4deg_Cold_cDNA_P Parameter: Temperature (deg C) Value: 4 vs. 22
  misc_feature: MA Experiment 108579 PARAMETER Experiment Name: At_4deg_Cold_cDNA_P Parameter: Timepoint (hr) Value: 6
  misc_feature: MA Experiment 108579 PARAMETER Experiment Name: At_4deg_Cold_cDNA_P Parameter: Tissue Value: Aerial
  misc_feature: MA Experiment ID: 108595 Result: Down-regulated in Transcription
  misc_feature: MA Experiment 108595 PARAMETER Experiment Name: At_Ler-pi_Ovule_cDNA_P Parameter: Plant Line Value: null
  misc_feature: MA Experiment ID: 20000113 Result: Up-regulated in Transcription
  misc_feature: MA Experiment 20000113 PARAMETER Experiment Name: At_42deg_Heat_cDNA_P Parameter: Temperature (deg C) Value: 42 vs. 22
  misc_feature: MA Experiment 20000113 PARAMETER Experiment Name: At_42deg_Heat_cDNA_P Parameter: Timepoint (hr) Value: 8
  misc_feature: MA Experiment 20000113 PARAMETER Experiment Name: At_42deg_Heat_cDNA_P Parameter: Tissue Value: Aerial
  misc_feature: MA Experiment ID: 20001450 Result: Up-regulated in Transcription
  misc_feature: MA Experiment 20001450 PARAMETER Experiment Name: At_Far-red-induction_P Parameter: Age (day) Value: 7
  misc_feature: MA Experiment 20001450 PARAMETER Experiment Name: At_Far-red-induction_P Parameter: Light Value: Far-red vs. White
  misc_feature: MA Experiment 20001450 PARAMETER Experiment Name: At_Far-red-induction_P Parameter: Organism Value: A. thaliana
  misc_feature: MA Experiment 20001450 PARAMETER Experiment Name: At_Far-red-induction_P Parameter: Plant Line Value: Columbia
  misc_feature: MA Experiment 20001450 PARAMETER Experiment Name: At_Far-red-induction_P Parameter: Timepoint (hr) Value: 8
  misc_feature: MA Experiment 20001450 PARAMETER Experiment Name: At_Far-red-induction_P Parameter: Tissue Value: Whole Plant
aaaatccggtcggcgacgagacttactttcgccgcaaaatttgttctccggtaccggatatttacgtatctgttctcaaattttaccattcccaccactaaaaccctagattaaaagcttcaattaccggaaaaagtctctacttaagagatttatctgtttgttgtcttaaatcacaggaagagaatggattttcttaaggcaacgattatagttgccctaatttgcaatttcgcctcactggcgtcttctgttcctttcatagttctgcatggaattggggataaatgcagtaatgcaggagtgacacaattcacagagcttttaagcgattggtctggttctcaaggatattgcttggagattgggaatggctcatgggactcatggactatgcctctccttgatcagacatcagttgtttgtgagaaggtgaaaagtatgccagagcttagtgacggttacagcattgtggggctttctcagggtaacatgattggtcgagctctcattgagttttgcgatggagcaccacctgttaagagttttgtttcggtagcgggtcctcatgctggcactgcatcgattccgttctgtggtgctacctggatttgcatcatgttggacagtatgatcaaagcagagatctatagcgactatatgcaggaacatttggctcctagcggttttctcaaaatcccaactgacatagcgggttacatggaaggctgtaggtttctcccaaagctaaacaacgaacttccagtcaaaaactcgacttataaggagaggttctcgagtttggagaatcttgtgcttattatgtttgagcatgacacaatattgatacctaaagaaacctcatggtttggatattatcctgatgggtctttcaagaccattcttccgccgcaagagaccaagctatatactgaagactggattggtttgagaaccttagatgaagctggaaaagtgaagttcgttaacgtctctggaaatcatcttcagatatctcatacagacatgaagaagcatatagtgccatacctctgtgataaatcatcgtcgtcatcatccacaacaatggcagtttccggatcatcttcctcacaccagtggcttccaagtgtagggaacattattatggatcttattggtccagaagtggatcagcttcagcttgtgctacgtcatgtgtaaatctgatgtcctgtgttgttgtttgttctcttactaaacacgatcgtctcgtgatatgtttgtaacttgaagataaaacaagaaaactgttcc

SEQ ID NO: 84219 - protein, 338 aa, Arabidopsis thaliana; identical to SEQ ID NO: 41246
  peptide (1)..(338): Ceres Seq. ID no. 12673765
  misc_feature (20)..(290): Pfam Name: Palmitoyl protein thioesterase Pfam Description: Palmitoyl protein thioesterase
  misc_feature (1)..(338): Homolog of NCBI NO: 15232301 NR Description: palmitoyl-protein thioesterase precursor - like; id: At3g60340.1, supported by cDNA: 38539., supported by cDNA:
  misc_feature (1)..(338): Homolog of NCBI NO: 14334718 NR Description: putative palmitoyl-protein thioesterase precursor
  misc_feature (1)..(338): Homolog of NCBI NO: 21593393 NR Description: palmitoyl-protein thioesterase precursor-like
  misc_feature (19)..(271): Homolog of NCBI NO: 37536884 NR Description: putative palmitoyl-protein thioesterase [Oryza
  misc_feature (8)..(298): Homolog of NCBI NO: 15238063 NR Description: palmitoyl-protein thioesterase precursor-like;
  misc_feature (8)..(298): Homolog of NCBI NO: 28393539 NR Description: putative palmitoyl-protein thioesterase precursor
  misc_feature (1)..(289): Homolog of NCBI NO: 15236079 NR Description: putative protein; protein id: At4g17483.1 thaliana] >gi|22136628|gb|AAM91633.1| unknown protein
  misc_feature (3)..(297): Homolog of NCBI NO: 15236078 NR Description: putative protein; protein id: At4g17480.1, by cDNA: 253398. [Arabidopsis thaliana] unknown protein [Arabidopsis thaliana]
  misc_feature (3)..(297): Homolog of NCBI NO: 21554369 NR Description: palmitoyl-protein thioesterase precursor-like
  misc_feature (3)..(297): Homolog of NCBI NO: 15236077 NR Description: putative protein; protein id: At4g17470.1

SEQ ID NO: 84220 - protein, 269 aa, Arabidopsis thaliana; identical to SEQ ID NO: 41247
  peptide (1)..(269): Ceres Seq. ID no. 12673766
  misc_feature (1)..(221): Pfam Name: Palmitoyl protein thioesterase Pfam Description: Palmitoyl protein thioesterase
  misc_feature (1)..(269): Homolog of NCBI NO: 15232301 NR Description: palmitoyl-protein thioesterase precursor - like; id: At3g60340.1, supported by cDNA: 38539., supported by cDNA:
  misc_feature (1)..(269): Homolog of NCBI NO: 14334718 NR Description: putative palmitoyl-protein thioesterase precursor
  misc_feature (1)..(269): Homolog of NCBI NO: 21593393 NR Description: palmitoyl-protein thioesterase precursor-like
  misc_feature (1)..(202): Homolog of NCBI NO: 37536884 NR Description: putative palmitoyl-protein thioesterase [Oryza
  misc_feature (1)..(229): Homolog of NCBI NO: 15238063 NR Description: palmitoyl-protein thioesterase precursor-like;
  misc_feature (1)..(229): Homolog of NCBI NO: 28393539 NR Description: putative palmitoyl-protein thioesterase precursor
  misc_feature (1)..(220): Homolog of NCBI NO: 15236079 NR Description: putative protein; protein id: At4g17483.1 thaliana] >gi|22136628|gb|AAM91633.1| unknown protein
  misc_feature (1)..(228): Homolog of NCBI NO: 15236078 NR Description: putative protein; protein id: At4g17480.1, by cDNA: 253398. [Arabidopsis thaliana] unknown protein [Arabidopsis thaliana]
  misc_feature (1)..(228): Homolog of NCBI NO: 21554369 NR Description: palmitoyl-protein thioesterase precursor-like
  misc_feature (1)..(228): Homolog of NCBI NO: 15236077 NR Description: putative protein; protein id: At4g17470.1

SEQ ID NO: 84221 - protein, 253 aa, Arabidopsis thaliana; identical to SEQ ID NO: 41248
  peptide (1)..(253): Ceres Seq. ID no. 12673767
  misc_feature (1)..(205): Pfam Name: Palmitoyl protein thioesterase Pfam Description: Palmitoyl protein thioesterase
  misc_feature (1)..(253): Homolog of NCBI NO: 15232301 NR Description: palmitoyl-protein thioesterase precursor - like; id: At3g60340.1, supported by cDNA: 38539., supported by cDNA:
  misc_feature (1)..(253): Homolog of NCBI NO: 14334718 NR Description: putative palmitoyl-protein thioesterase precursor
  misc_feature (1)..(253): Homolog of NCBI NO: 21593393 NR Description: palmitoyl-protein thioesterase precursor-like
  misc_feature (1)..(186): Homolog of NCBI NO: 37536884 NR Description: putative palmitoyl-protein thioesterase [Oryza
  misc_feature (1)..(213): Homolog of NCBI NO: 15238063 NR Description: palmitoyl-protein thioesterase precursor-like;
  misc_feature (1)..(213): Homolog of NCBI NO: 28393539 NR Description: putative palmitoyl-protein thioesterase precursor
  misc_feature (1)..(204): Homolog of NCBI NO: 15236079 NR Description: putative protein; protein id: At4g17483.1 thaliana] >gi|22136628|gb|AAM91633.1| unknown protein
  misc_feature (1)..(212): Homolog of NCBI NO: 15236078 NR Description: putative protein; protein id: At4g17480.1, by cDNA: 253398. [Arabidopsis thaliana] unknown protein [Arabidopsis thaliana]
  misc_feature (1)..(212): Homolog of NCBI NO: 21554369 NR Description: palmitoyl-protein thioesterase precursor-like
  misc_feature (1)..(212): Homolog of NCBI NO: 15236077 NR Description: putative protein; protein id: At4g17470.1

SEQ ID NO: 84222 - DNA, 2115 bp, Arabidopsis thaliana
  misc_feature (1)..(2115): Ceres Seq. ID no. 12673792
  misc_feature: MA Experiment ID: 20000794 Result: Up-regulated in Transcription
  misc_feature: MA Experiment 20000794 PARAMETER Experiment Name: At_Petals_P Parameter: Age (day) Value: 23-25 days
  misc_feature: MA Experiment 20000794 PARAMETER Experiment Name: At_Petals_P Parameter: Plant Line Value: WS
  misc_feature: MA Experiment 20000794 PARAMETER Experiment Name: At_Petals_P Parameter: Tissue Value: Petals vs. Whole plant
  misc_feature: MA Experiment ID: 20001247 Result: Up-regulated in Transcription
  misc_feature: MA Experiment 20001247 PARAMETER Experiment Name: At_Far-red-induction_P Parameter: Age (day) Value: 7
  misc_feature: MA Experiment 20001247 PARAMETER Experiment Name: At_Far-red-induction_P Parameter: Light Value: Far-red vs. White
  misc_feature: MA Experiment 20001247 PARAMETER Experiment Name: At_Far-red-induction_P Parameter: Organism Value: A. thaliana
  misc_feature: MA Experiment 20001247 PARAMETER Experiment Name: At_Far-red-induction_P Parameter: Plant Line Value: Columbia
  misc_feature: MA Experiment 20001247 PARAMETER Experiment Name: At_Far-red-induction_P Parameter: Timepoint (hr) Value: 1
  misc_feature: MA Experiment 20001247 PARAMETER Experiment Name: At_Far-red-induction_P Parameter: Tissue Value: Whole Plant
  misc_feature: MA Experiment ID: 20001450 Result: Up-regulated in Transcription
  misc_feature: MA Experiment 20001450 PARAMETER Experiment Name: At_Far-red-induction_P Parameter: Age (day) Value: 7
  misc_feature: MA Experiment 20001450 PARAMETER Experiment Name: At_Far-red-induction_P Parameter: Light Value: Far-red vs. White
  misc_feature: MA Experiment 20001450 PARAMETER Experiment Name: At_Far-red-induction_P Parameter: Organism Value: A. thaliana
  misc_feature: MA Experiment 20001450 PARAMETER Experiment Name: At_Far-red-induction_P Parameter: Plant Line Value: Columbia
  misc_feature: MA Experiment 20001450 PARAMETER Experiment Name: At_Far-red-induction_P Parameter: Timepoint (hr) Value: 8
  misc_feature: MA Experiment 20001450 PARAMETER Experiment Name: At_Far-red-induction_P Parameter: Tissue Value: Whole Plant
  misc_feature: MA Experiment ID: 20001451 Result: Up-regulated in Transcription
  misc_feature: MA Experiment 20001451 PARAMETER Experiment Name: At_Far-red-induction_P Parameter: Age (day) Value: 7
  misc_feature: MA Experiment 20001451 PARAMETER Experiment Name: At_Far-red-induction_P Parameter: Light Value: Far-red vs. White
  misc_feature: MA Experiment 20001451 PARAMETER Experiment Name: At_Far-red-induction_P Parameter: Organism Value: A. thaliana
  misc_feature: MA Experiment 20001451 PARAMETER Experiment Name: At_Far-red-induction_P Parameter: Plant Line Value: Columbia
  misc_feature: MA Experiment 20001451 PARAMETER Experiment Name: At_Far-red-induction_P Parameter: Timepoint (hr) Value: 24
  misc_feature: MA Experiment 20001451 PARAMETER Experiment Name: At_Far-red-induction_P Parameter: Tissue Value: Whole Plant
actttggtctcgttgagcctttcgtctatctctcacctgaaagaaagacgttcagctttctctttccaaaatcaaaagctctccgatcagtttctccggcttaggaaattaattgaaggaaggtgatgagaggtactactgagaatacggatctgttcgatcccaaaacccaaatggatcctgacttcactcgtcatggttcttcctccgacggcgattttggattcgcttttaacgacagtaacttctctgatcgtttgcttcggatcgagatcatgggtggaccttcggattctcggtctgaagttgaagggtgtacgagtatcgctgattgggctcgtcatcgcaagagaagaagagaagatatcaagaaggaatctggtgtcacgatttcagacattgtggcatgtcctgaggagcagattttaactgatgaacaacctgacatggatggatgtcctggtggtgagaatcctgatgatgaaggaggagaggcaatggttgaagaagctttatcaggtgatgaagaggaaacgtctagtgagccaaactggggaatggattgttctacagttgttagggttaaagaacttcatattagttctcctattttagctgccaaaagccctttcttttacaagttgttctccaatggaatgagggaatctgagcaaaggcatgtcacccttaggattaatgcatcagaggaagctgctttgatggagcttttaaactttatgtatagcaatgcggtatctgtcaccacagcacctgccttattagatgtgttgatggctgctgataagtttgaagttgcctcttgtatgaggtactgcagtagacttctccgtaatatgcctatgactccagagtctgccctgctctatctcgagcttccctctagtgttctaatggccaaagctgttcagcctttaactgatgctgcaaaacagttccttgcagcccgctacaaggatattaccaagtttcatgaggaggtaatgtctctacctttggctggaattgaggcaattctatcaagcgatgaactccaaattgcatcagaggatgcagtttatgattttatcttgaagtgggcaagggcgcaatacccttgtttggaagagcgaagagagattctcgggtcacgccttgcactctccatccgcttcccattcatgacatgccgaaagctgaagaaagtgctgacttgcagtgactttgagcatgaaatagcatcaaagcttgttctagaagctcttttcttcaaagcagaagccccacacagacaacgtagcctagcctccgaagaatctgcatccctgaaccgccgcctgatagagagggcttacaaatacagacccgtcaaagtggtcgagtttgagcttcctagaccgcagtgtgtagtctacctagacttgaaaagagaagaatgtgggggactgttcccgtcgggtagagtgtattcgcaggcctttcacttgggaggtcaagggtttttcctgtcagctcactgcaacatggaccaacagagctcgttccactgtttcgggctgttcctagggatgcaggagaaagggtcggtgagtttcggagtggactatgaattctcggcaaggtcaaagcccgcagaggatttcataagcaaatacaaagggaactacacattcacaggagggaaagcagtaggttacagaaacctgtttggggtcccatggacgtcttttatagcggaagatagtcaatacttcatcaatggcattctccatctcagagcagagcttaccatcaaaaggtctacagatccttagtgaccgtttacttctcaattgtcactgtctctctttcctttacctgctgctaaatctctcgctctctctaacttgccttttttttcttttcttttataaggcttgaagaagactaataaagcttataaaagtaaggttaaaaacgtttcgacgacaacgttataagaagaatgtaaatgcgttctttttttctatctacccttactcttttggctttggattataagtttaactcttcaatgaaattcttagcgtagagattcttgtattatgaacgaagttgtgaacagaaaagaacgaacgt

SEQ ID NO: 84223 - protein, 561 aa, Arabidopsis thaliana
  peptide (1)..(561): Ceres Seq. ID no. 12673793
  misc_feature (138)..(245): Pfam Name: BTB/POZ domain Pfam Description: BTB/POZ domain
  misc_feature (1)..(561): Homolog of NCBI NO: 30695452 NR Description: POZ domain protein family [Arabidopsis thaliana]
  misc_feature (1)..(557): Homolog of NCBI NO: 18412063 NR Description: putative protein; protein id: At3g61600.1, by cDNA: gi_12006854 [Arabidopsis thaliana]
  misc_feature (17)..(561): Homolog of NCBI NO: 11282344 NR Description: hypothetical protein F2A19.200 - Arabidopsis >gi|6850851|emb|CAB71090.1| putative protein [Arabidopsis
  misc_feature (1)..(560): Homolog of NCBI NO: 18407023 NR Description: expressed protein; protein id: At2g46260.1, by cDNA: 111153., supported by cDNA: gi_15028122, supported by gi_19310796 [Arabidopsis thaliana] >gi|15028123|gb|AAK76685.1|
  misc_feature (17)..(560): Homolog of NCBI NO: 25352317 NR Description: hypothetical protein At2g46260 [imported] -
  misc_feature (17)..(560): Homolog of NCBI NO: 21536778 NR Description: unknown [Arabidopsis thaliana]
  misc_feature (26)..(556): Homolog of NCBI NO: 15234082 NR Description: hypothetical protein; protein id: At4g01160.1
  misc_feature (283)..(527): Homolog of NCBI NO: 27948452 NR Description: GAMYB-binding protein [Hordeum vulgare subsp.
  misc_feature (144)..(381): Homolog of NCBI NO: 38194229 NR Description: actinfilin [Homo sapiens]
  misc_feature (144)..(381): Homolog of NCBI NO: 21728394 NR Description: actinfilin [Rattus norvegicus]
MRGTTENTDLFDPKTQMDPDFTRHGSSSDGDFGFAFNDSNFSDRLLRIEIMGGPSDSRSEVEGCTSIADWARHRKRRREDIKKESGVTISDIVACPEEQILTDEQPDMDGCPGGENPDDEGGEAMVEEALSGDEEETSSEPNWGMDCSTVVRVKELHISSPILAAKSPFFYKLFSNGMRESEQRHVTLRINASEEAALMELLNFMYSNAVSVTTAPALLDVLMAADKFEVASCMRYCSRLLRNMPMTPESALLYLELPSSVLMAKAVQPLTDAAKQFLAARYKDITKFHEEVMSLPLAGIEAILSSDELQIASEDAVYDFILKWARAQYPCLEERREILGSRLALSIRFPFMTCRKLKKVLTCSDFEHEIASKLVLEALFFKAEAPHRQRSLASEESASLNRRLIERAYKYRPVKVVEFELPRPQCVVYLDLKREECGGLFPSGRVYSQAFHLGGQGFFLSAHCNMDQQSSFHCFGLFLGMQEKGSVSFGVDYEFSARSKPAEDFISKYKGNYTFTGGKAVGYRNLFGVPWTSFIAEDSQYFINGILHLRAELTIKRSTDP

SEQ ID NO: 84224 - protein, 545 aa, Arabidopsis thaliana
  peptide (1)..(545): Ceres Seq. ID no. 12673794
  misc_feature (122)..(229): Pfam Name: BTB/POZ domain Pfam Description: BTB/POZ domain
  misc_feature (1)..(545): Homolog of NCBI NO: 30695452 NR Description: POZ domain protein family [Arabidopsis thaliana]
  misc_feature (1)..(541): Homolog of NCBI NO: 18412063 NR Description: putative protein; protein id: At3g61600.1, by cDNA: gi_12006854 [Arabidopsis thaliana]
  misc_feature (1)..(545): Homolog of NCBI NO: 11282344 NR Description: hypothetical protein F2A19.200 - Arabidopsis >gi|6850851|emb|CAB71090.1| putative protein [Arabidopsis
  misc_feature (1)..(544): Homolog of NCBI NO: 18407023 NR Description: expressed protein; protein id: At2g46260.1, by cDNA: 111153., supported by cDNA: gi_15028122, supported by gi_19310796 [Arabidopsis thaliana] >gi|15028123|gb|AAK76685.1|
  misc_feature (1)..(544): Homolog of NCBI NO: 25352317 NR Description: hypothetical protein At2g46260 [imported] -
  misc_feature (1)..(544): Homolog of NCBI NO: 21536778 NR Description: unknown [Arabidopsis thaliana]
  misc_feature (10)..(540): Homolog of NCBI NO: 15234082 NR Description: hypothetical protein; protein id: At4g01160.1
  misc_feature (267)..(511): Homolog of NCBI NO: 27948452 NR Description: GAMYB-binding protein [Hordeum vulgare subsp.
  misc_feature (128)..(365): Homolog of NCBI NO: 38194229 NR Description: actinfilin [Homo sapiens]
  misc_feature (128)..(365): Homolog of NCBI NO: 21728394 NR Description: actinfilin [Rattus norvegicus]
MDPDFTRHGSSSDGDFGFAFNDSNFSDRLLRIEIMGGPSDSRSEVEGCTSIADWARHRKRRREDIKKESGVTISDIVACPEEQILTDEQPDMDGCPGGENPDDEGGEAMVEEALSGDEEETSSEPNWGMDCSTVVRVKELHISSPILAAKSPFFYKLFSNGMRESEQRHVTLRINASEEAALMELLNFMYSNAVSVTTAPALLDVLMAADKFEVASCMRYCSRLLRNMPMTPESALLYLELPSSVLMAKAVQPLTDAAKQFLAARYKDITKFHEEVMSLPLAGIEAILSSDELQIASEDAVYDFILKWARAQYPCLEERREILGSRLALSIRFPFMTCRKLKKVLTCSDFEHEIASKLVLEALFFKAEAPHRQRSLASEESASLNRRLIERAYKYRPVKVVEFELPRPQCVVYLDLKREECGGLFPSGRVYSQAFHLGGQGFFLSAHCNMDQQSSFHCFGLFLGMQEKGSVSFGVDYEFSARSKPAEDFISKYKGNYTFTGGKAVGYRNLFGVPWTSFIAEDSQYFINGILHLRAELTIKRSTDP

SEQ ID NO: 84225 - protein, 511 aa, Arabidopsis thaliana
  peptide (1)..(511): Ceres Seq. ID no. 12673795
  misc_feature (88)..(195): Pfam Name: BTB/POZ domain Pfam Description: BTB/POZ domain
  misc_feature (1)..(511): Homolog of NCBI NO: 30695452 NR Description: POZ domain protein family [Arabidopsis thaliana]
  misc_feature (1)..(507): Homolog of NCBI NO: 18412063 NR Description: putative protein; protein id: At3g61600.1, by cDNA: gi_12006854 [Arabidopsis thaliana]
  misc_feature (1)..(511): Homolog of NCBI NO: 11282344 NR Description: hypothetical protein F2A19.200 - Arabidopsis >gi|6850851|emb|CAB71090.1| putative protein [Arabidopsis
  misc_feature (1)..(510): Homolog of NCBI NO: 18407023 NR Description: expressed protein; protein id: At2g46260.1, by cDNA: 111153., supported by cDNA: gi_15028122, supported by gi_19310796 [Arabidopsis thaliana] >gi|15028123|gb|AAK76685.1|
  misc_feature (1)..(510): Homolog of NCBI NO: 25352317 NR Description: hypothetical protein At2g46260 [imported] -
  misc_feature (1)..(510): Homolog of NCBI NO: 21536778 NR Description: unknown [Arabidopsis thaliana]
  misc_feature (1)..(506): Homolog of NCBI NO: 15234082 NR Description: hypothetical protein; protein id: At4g01160.1
  misc_feature (233)..(477): Homolog of NCBI NO: 27948452 NR Description: GAMYB-binding protein [Hordeum vulgare subsp.
  misc_feature (94)..(331): Homolog of NCBI NO: 38194229 NR Description: actinfilin [Homo sapiens]
  misc_feature (94)..(331): Homolog of NCBI NO: 21728394 NR Description: actinfilin [Rattus norvegicus]
MGGPSDSRSEVEGCTSIADWARHRKRRREDIKKESGVTISDIVACPEEQILTDEQPDMDGCPGGENPDDEGGEAMVEEALSGDEEETSSEPNWGMDCSTVVRVKELHISSPILAAKSPFFYKLFSNGMRESEQRHVTLRINASEEAALMELLNFMYSNAVSVTTAPALLDVLMAADKFEVASCMRYCSRLLRNMPMTPESALLYLELPSSVLMAKAVQPLTDAAKQFLAARYKDITKFHEEVMSLPLAGIEAILSSDELQIASEDAVYDFILKWARAQYPCLEERREILGSRLALSIRFPFMTCRKLKKVLTCSDFEHEIASKLVLEALFFKAEAPHRQRSLASEESASLNRRLIERAYKYRPVKVVEFELPRPQCVVYLDLKREECGGLFPSGRVYSQAFHLGGQGFFLSAHCNMDQQSSFHCFGLFLGMQEKGSVSFGVDYEFSARSKPAEDFISKYKGNYTFTGGKAVGYRNLFGVPWTSFIAEDSQYFINGILHLRAELTIKRSTDP

SEQ ID NO: 84226 - DNA, 975 bp, Arabidopsis thaliana
  misc_feature (1)..(975): Ceres Seq. ID no. 12673820
  misc_feature: MA Experiment ID: 108433 Result: Up-regulated in Transcription
  misc_feature: MA Experiment 108433 PARAMETER Experiment Name: At_rhl_Mutant2_cDNA_P Parameter: Age (day) Value: 7
  misc_feature: MA Experiment 108433 PARAMETER Experiment Name: At_rhl_Mutant2_cDNA_P Parameter: Organism Value: A. thaliana
  misc_feature: MA Experiment 108433 PARAMETER Experiment Name: At_rhl_Mutant2_cDNA_P Parameter: Plant Line Value: rhl Mutant vs. wt landsburg
  misc_feature: MA Experiment 108433 PARAMETER Experiment Name: At_rhl_Mutant2_cDNA_P Parameter: Tissue Value: Roots
  misc_feature: MA Experiment ID: 108434 Result: Down-regulated in Transcription
  misc_feature: MA Experiment 108434 PARAMETER Experiment Name: At_Root_Tips_cDNA_P Parameter: Tissue Value: Root Tips
  misc_feature: MA Experiment ID: 108462 Result: Up-regulated in Transcription
  misc_feature: MA Experiment 108462 PARAMETER Experiment Name: At_Germinating_Seeds_cDNA_P Parameter: Age (day) Value: 2 vs. 0
  misc_feature: MA Experiment 108462 PARAMETER Experiment Name: At_Germinating_Seeds_cDNA_P Parameter: Tissue Value: Germinating Seeds
  misc_feature: MA Experiment ID: 108463 Result: Up-regulated in Transcription
  misc_feature: MA Experiment 108463 PARAMETER Experiment Name: At_Germinating_Seeds_cDNA_P Parameter: Age (day) Value: 3 vs. 0
  misc_feature: MA Experiment 108463 PARAMETER Experiment Name: At_Germinating_Seeds_cDNA_P Parameter: Tissue Value: Germinating Seeds
  misc_feature: MA Experiment ID: 108464 Result: Up-regulated in Transcription
  misc_feature: MA Experiment 108464 PARAMETER Experiment Name: At_Germinating_Seeds_cDNA_P Parameter: Age (day) Value: 4 vs. 0
  misc_feature: MA Experiment 108464 PARAMETER Experiment Name: At_Germinating_Seeds_cDNA_P Parameter: Tissue Value: Germinating Seeds
  misc_feature: MA Experiment ID: 108473 Result: Up-regulated in Transcription
  misc_feature: MA Experiment 108473 PARAMETER Experiment Name: At_Drought_Flowers_cDNA_P Parameter: Timepoint (hr) Value: 7 d
  misc_feature: MA Experiment 108473 PARAMETER Experiment Name: At_Drought_Flowers_cDNA_P Parameter: Tissue Value: Flower
  misc_feature: MA Experiment 108473 PARAMETER Experiment Name: At_Drought_Flowers_cDNA_P Parameter: Treatment Value: Drought vs. No Drought
  misc_feature: MA Experiment ID: 108488 Result: Down-regulated in Transcription
  misc_feature: MA Experiment ID: 108561 Result: Up-regulated in Transcription
  misc_feature: MA Experiment 108561 PARAMETER Experiment Name: At_100uM_ABA_cDNA_P Parameter: Timepoint (hr) Value: 6
  misc_feature: MA Experiment 108561 PARAMETER Experiment Name: At_100uM_ABA_cDNA_P Parameter: Tissue Value: Aerial
  misc_feature: MA Experiment 108561 PARAMETER Experiment Name: At_100uM_ABA_cDNA_P Parameter: Treatment Value: 100uM ABA vs. No Treatment
  misc_feature: MA Experiment ID: 108572 Result: Up-regulated in Transcription
  misc_feature: MA Experiment 108572 PARAMETER Experiment Name: At_Drought_cDNA_P Parameter: Timepoint (hr) Value: 1
  misc_feature: MA Experiment 108572 PARAMETER Experiment Name: At_Drought_cDNA_P Parameter: Tissue Value: Aerial
  misc_feature: MA Experiment 108572 PARAMETER Experiment Name: At_Drought_cDNA_P Parameter: Treatment Value: Drought vs. No Drought
  misc_feature: MA Experiment ID: 108573 Result: Up-regulated in Transcription
  misc_feature: MA Experiment 108573 PARAMETER Experiment Name: At_Drought_cDNA_P Parameter: Timepoint (hr) Value: 6
  misc_feature: MA Experiment 108573 PARAMETER Experiment Name: At_Drought_cDNA_P Parameter: Tissue Value: Aerial
  misc_feature: MA Experiment 108573 PARAMETER Experiment Name: At_Drought_cDNA_P Parameter: Treatment Value: Drought vs. No Drought
  misc_feature: MA Experiment ID: 108579 Result: Down-regulated in Transcription
  misc_feature: MA Experiment 108579 PARAMETER Experiment Name: At_4deg_Cold_cDNA_P Parameter: Temperature (deg C) Value: 4 vs. 22
  misc_feature: MA Experiment 108579 PARAMETER Experiment Name: At_4deg_Cold_cDNA_P Parameter: Timepoint (hr) Value: 6
  misc_feature: MA Experiment 108579 PARAMETER Experiment Name: At_4deg_Cold_cDNA_P Parameter: Tissue Value: Aerial
  misc_feature: MA Experiment ID: 108595 Result: Up-regulated in Transcription
  misc_feature: MA Experiment 108595 PARAMETER Experiment Name: At_Ler-pi_Ovule_cDNA_P Parameter: Plant Line Value: null
  misc_feature: MA Experiment ID: 108605 Result: Up-regulated in Transcription
  misc_feature: MA Experiment 108605 PARAMETER Experiment Name: At_100uM_ABA_cDNA_P Parameter: Timepoint (hr) Value: 6
  misc_feature: MA Experiment 108605 PARAMETER Experiment Name: At_100uM_ABA_cDNA_P Parameter: Tissue Value: Aerial
  misc_feature: MA Experiment 108605 PARAMETER Experiment Name: At_100uM_ABA_cDNA_P Parameter: Treatment Value: 100uM ABA vs. No Treatment
  misc_feature: MA Experiment ID: 108607 Result: Up-regulated in Transcription
  misc_feature: MA Experiment 108607 PARAMETER Experiment Name: At_100uM_ABA_cDNA_P Parameter: Timepoint (hr) Value: 4
  misc_feature: MA Experiment 108607 PARAMETER Experiment Name: At_100uM_ABA_cDNA_P Parameter: Tissue Value: Aerial
  misc_feature: MA Experiment 108607 PARAMETER Experiment Name: At_100uM_ABA_cDNA_P Parameter: Treatment Value: 100uM ABA vs. No Treatment
  misc_feature: MA Experiment ID: 108608 Result: Up-regulated in Transcription
  misc_feature: MA Experiment 108608 PARAMETER Experiment Name: At_100uM_ABA_cDNA_P Parameter: Timepoint (hr) Value: 1
  misc_feature: MA Experiment 108608 PARAMETER Experiment Name: At_100uM_ABA_cDNA_P Parameter: Tissue Value: Aerial
  misc_feature: MA Experiment 108608 PARAMETER Experiment Name: At_100uM_ABA_cDNA_P Parameter: Treatment Value: 100uM ABA vs. No Treatment
  misc_feature: MA Experiment ID: 108609 Result: Up-regulated in Transcription
  misc_feature: MA Experiment 108609 PARAMETER Experiment Name: At_100uM_ABA_cDNA_P Parameter: Timepoint (hr) Value: 24
  misc_feature: MA Experiment 108609 PARAMETER Experiment Name: At_100uM_ABA_cDNA_P Parameter: Tissue Value: Aerial
  misc_feature: MA Experiment 108609 PARAMETER Experiment Name: At_100uM_ABA_cDNA_P Parameter: Treatment Value: 100uM ABA vs. No Treatment
  misc_feature: MA Experiment ID: 108668 Result: Up-regulated in Transcription
  misc_feature: MA Experiment 108668 PARAMETER Experiment Name: At_2mM_SA_cDNA_P Parameter: Plant Line Value: WS
  misc_feature: MA Experiment 108668 PARAMETER Experiment Name: At_2mM_SA_cDNA_P Parameter: Timepoint (hr) Value: 6
  misc_feature: MA Experiment 108668 PARAMETER Experiment Name: At_2mM_SA_cDNA_P Parameter: Treatment Value: 2mM SA vs. No Treatment
  misc_feature: MA Experiment ID: 20000070 Result: Up-regulated in Transcription
  misc_feature: MA Experiment 20000070 PARAMETER Experiment Name: At_100uM_ABA_Mutants_cDNA_P Parameter: Plant Line Value: CS24
  misc_feature: MA Experiment 20000070 PARAMETER Experiment Name: At_100uM_ABA_Mutants_cDNA_P Parameter: Timepoint (hr) Value: 6
  misc_feature: MA Experiment 20000070 PARAMETER Experiment Name: At_100uM_ABA_Mutants_cDNA_P Parameter: Tissue Value: Aerial
  misc_feature: MA Experiment 20000070 PARAMETER Experiment Name: At_100uM_ABA_Mutants_cDNA_P Parameter: Treatment Value: 100uM ABA vs. No Treatment
  misc_feature: MA Experiment ID: 20000071 Result: Up-regulated in Transcription
  misc_feature: MA Experiment 20000071 PARAMETER Experiment Name: At_100uM_ABA_Mutants_cDNA_P Parameter: Plant Line Value: CS8104
  misc_feature: MA Experiment 20000071 PARAMETER Experiment Name: At_100uM_ABA_Mutants_cDNA_P Parameter: Timepoint (hr) Value: 6
  misc_feature: MA Experiment 20000071 PARAMETER Experiment Name: At_100uM_ABA_Mutants_cDNA_P Parameter: Tissue Value: Aerial
  misc_feature: MA Experiment 20000071 PARAMETER Experiment Name: At_100uM_ABA_Mutants_cDNA_P Parameter: Treatment Value: 100uM ABA vs. No Treatment
  misc_feature: MA Experiment ID: 20000087 Result: Up-regulated in Transcription
  misc_feature: MA Experiment 20000087 PARAMETER Experiment Name: At_100uM_ABA_Mutants_cDNA_P Parameter: Plant Line Value: WS
  misc_feature: MA Experiment 20000087 PARAMETER Experiment Name: At_100uM_ABA_Mutants_cDNA_P Parameter: Timepoint (hr) Value: 6
  misc_feature: MA Experiment 20000087 PARAMETER Experiment Name: At_100uM_ABA_Mutants_cDNA_P Parameter: Tissue Value: Aerial
  misc_feature: MA Experiment 20000087 PARAMETER Experiment Name: At_100uM_ABA_Mutants_cDNA_P Parameter: Treatment Value: 100uM ABA vs. No Treatment
  misc_feature: MA Experiment ID: 20000088 Result: Up-regulated in Transcription
  misc_feature: MA Experiment 20000088 PARAMETER Experiment Name: At_100uM_ABA_Mutants_cDNA_P Parameter: Plant Line Value: Landsberg
  misc_feature: MA Experiment 20000088 PARAMETER Experiment Name: At_100uM_ABA_Mutants_cDNA_P Parameter: Timepoint (hr) Value: 6
  misc_feature: MA Experiment 20000088 PARAMETER Experiment Name: At_100uM_ABA_Mutants_cDNA_P Parameter: Tissue Value: Aerial
  misc_feature: MA Experiment 20000088 PARAMETER Experiment Name: At_100uM_ABA_Mutants_cDNA_P Parameter: Treatment Value: 100uM ABA vs. No Treatment
  misc_feature: MA Experiment ID: 20000090 Result: Down-regulated in Transcription
  misc_feature: MA Experiment ID: 20000117 Result: Up-regulated in Transcription
  misc_feature: MA Experiment 20000117 PARAMETER Experiment Name: At_100uM_ABA_Mutants_cDNA_P Parameter: Plant Line Value: Columbia
  misc_feature: MA Experiment 20000117 PARAMETER Experiment Name: At_100uM_ABA_Mutants_cDNA_P Parameter: Timepoint (hr) Value: 6
  misc_feature: MA Experiment 20000117 PARAMETER Experiment Name: At_100uM_ABA_Mutants_cDNA_P Parameter: Tissue Value: Aerial
  misc_feature: MA Experiment 20000117 PARAMETER Experiment Name: At_100uM_ABA_Mutants_cDNA_P Parameter: Treatment Value: 100uM ABA vs. No Treatment
  misc_feature: MA Experiment ID: 20000166 Result: Up-regulated in Transcription
  misc_feature: MA Experiment 20000166 PARAMETER Experiment Name: At_100uM_ABA_P Parameter: Age (day) Value: 14
  misc_feature: MA Experiment 20000166 PARAMETER Experiment Name: At_100uM_ABA_P Parameter: Organism Value: A. thaliana
  misc_feature: MA Experiment 20000166 PARAMETER Experiment Name: At_100uM_ABA_P Parameter: Plant Line Value: WS
  misc_feature: MA Experiment 20000166 PARAMETER Experiment Name: At_100uM_ABA_P Parameter: Timepoint (hr) Value: 1
  misc_feature: MA Experiment 20000166 PARAMETER Experiment Name: At_100uM_ABA_P Parameter: Tissue Value: Aerial
  misc_feature: MA Experiment 20000166 PARAMETER Experiment Name: At_100uM_ABA_P Parameter: Treatment Value: 100uM ABA vs. No Treatment
  misc_feature: MA Experiment ID: 20000169 Result: Up-regulated in Transcription
  misc_feature: MA Experiment 20000169 PARAMETER Experiment Name: At_100uM_ABA_P Parameter: Age (day) Value: 14
  misc_feature: MA Experiment 20000169 PARAMETER Experiment Name: At_100uM_ABA_P Parameter: Organism Value: A. thaliana
  misc_feature: MA Experiment 20000169 PARAMETER Experiment Name: At_100uM_ABA_P Parameter: Plant Line Value: WS
  misc_feature: MA Experiment 20000169 PARAMETER Experiment Name: At_100uM_ABA_P Parameter: Timepoint (hr) Value: 6
  misc_feature: MA Experiment 20000169 PARAMETER Experiment Name: At_100uM_ABA_P Parameter: Tissue Value: Aerial
  misc_feature: MA Experiment 20000169 PARAMETER Experiment Name: At_100uM_ABA_P Parameter: Treatment Value: 100uM ABA vs. No Treatment
  misc_feature: MA Experiment ID: 20000180 Result: Up-regulated in Transcription
  misc_feature: MA Experiment 20000180 PARAMETER Experiment Name: At_Germinating_Seeds_P Parameter: Age (hr) Value: 24 vs. 0
  misc_feature: MA Experiment 20000180 PARAMETER Experiment Name: At_Germinating_Seeds_P Parameter: Tissue Value: Germinating Seeds
  misc_feature: MA Experiment ID: 20000182 Result: Up-regulated in Transcription
  misc_feature: MA Experiment 20000182 PARAMETER Experiment Name: At_2mM_SA_P Parameter: Age (day) Value: 14
  misc_feature: MA Experiment 20000182 PARAMETER Experiment Name: At_2mM_SA_P Parameter: Organism Value: A. thaliana
  misc_feature: MA Experiment 20000182 PARAMETER Experiment Name: At_2mM_SA_P Parameter: Plant Line Value: WS
  misc_feature: MA Experiment 20000182 PARAMETER Experiment Name: At_2mM_SA_P Parameter: Timepoint (hr) Value: 6
  misc_feature: MA Experiment 20000182 PARAMETER Experiment Name: At_2mM_SA_P Parameter: Tissue Value: Aerial
  misc_feature: MA Experiment 20000182 PARAMETER Experiment Name: At_2mM_SA_P Parameter: Treatment Value: 2mM SA vs. No Treatment
  misc_feature: MA Experiment ID: 20000184 Result: Down-regulated in Transcription
  misc_feature: MA Experiment 20000184 PARAMETER Experiment Name: At_Shoots__P Parameter: Age (day) Value: 7
  misc_feature: MA Experiment 20000184 PARAMETER Experiment Name: At_Shoots__P Parameter: Tissue Value: Shoots vs. Whole Plant
  misc_feature: MA Experiment ID: 20000214 Result: Down-regulated in Transcription
  misc_feature: MA Experiment 20000214 PARAMETER Experiment Name: At_4deg_Cold_P Parameter: Timepoint (hr) Value: 6
  misc_feature: MA Experiment ID: 20000224 Result: Up-regulated in Transcription
  misc_feature: MA Experiment ID: 20000227 Result: Down-regulated in Transcription
  misc_feature: MA Experiment 20000227 PARAMETER Experiment Name: At_Root-Tips-vs-Tops_P Parameter: Tissue Value: Root Tips vs. Root Tops
  misc_feature: MA Experiment ID: 20000234 Result: Down-regulated in Transcription
  misc_feature: MA Experiment 20000234 PARAMETER Experiment Name: At_Siliques_P Parameter: Age (day) Value: 21
  misc_feature: MA Experiment 20000234 PARAMETER Experiment Name: At_Siliques_P Parameter: Organism Value: A. thaliana
  misc_feature: MA Experiment 20000234 PARAMETER Experiment Name: At_Siliques_P Parameter: Plant Line Value: WS
  misc_feature: MA Experiment 20000234 PARAMETER Experiment Name: At_Siliques_P Parameter: Tissue Value: Less Than 5mm Siliques vs. Whole Plant
  misc_feature: MA Experiment ID: 20000235 Result: Down-regulated in Transcription
  misc_feature: MA Experiment 20000235 PARAMETER Experiment Name: At_Siliques_P Parameter: Age (day) Value: 21
  misc_feature: MA Experiment 20000235 PARAMETER Experiment Name: At_Siliques_P Parameter: Organism Value: A. thaliana
  misc_feature: MA Experiment 20000235 PARAMETER Experiment Name: At_Siliques_P Parameter: Plant Line Value: WS
  misc_feature: MA Experiment 20000235 PARAMETER Experiment Name: At_Siliques_P Parameter: Tissue Value: 5-10mm Siliques vs. Whole Plant
  misc_feature: MA Experiment ID: 20000267 Result: Up-regulated in Transcription
  misc_feature: MA Experiment 20000267 PARAMETER Experiment Name: At_Drought_P Parameter: Age (day) Value: 7
  misc_feature: MA Experiment 20000267 PARAMETER Experiment Name: At_Drought_P Parameter: Organism Value: A. thaliana
  misc_feature: MA Experiment 20000267 PARAMETER Experiment Name: At_Drought_P Parameter: Plant Line Value: WS
  misc_feature: MA Experiment 20000267 PARAMETER Experiment Name: At_Drought_P Parameter: Timepoint (hr) Value: 6
  misc_feature: MA Experiment 20000267 PARAMETER Experiment Name: At_Drought_P Parameter: Tissue Value: Whole Plant
  misc_feature: MA Experiment 20000267 PARAMETER Experiment Name: At_Drought_P Parameter: Treatment Value: Drought vs. No Drought
  misc_feature: MA Experiment ID: 20000268 Result: Up-regulated in Transcription
  misc_feature: MA Experiment 20000268 PARAMETER Experiment Name: At_100mM_NaCl__P Parameter: Age (day) Value: 14
  misc_feature: MA Experiment 20000268 PARAMETER Experiment Name: At_100mM_NaCl__P Parameter: Organism Value: A. thaliana
  misc_feature: MA Experiment 20000268 PARAMETER Experiment Name: At_100mM_NaCl__P Parameter: Plant Line Value: WS
  misc_feature: MA Experiment 20000268 PARAMETER Experiment Name: At_100mM_NaCl__P Parameter: Timepoint (hr) Value: 6
  misc_feature: MA Experiment 20000268 PARAMETER Experiment Name: At_100mM_NaCl__P Parameter: Tissue Value: Whole Plant
  misc_feature: MA Experiment 20000268 PARAMETER Experiment Name: At_100mM_NaCl__P Parameter: Treatment Value: 100mM NaCl vs. No Treatment
  misc_feature: MA Experiment ID: 20000436 Result: Up-regulated in Transcription
  misc_feature: MA Experiment 20000436 PARAMETER Experiment Name: At_Drought_P Parameter: Age (day) Value: 7
  misc_feature: MA Experiment 20000436 PARAMETER Experiment Name: At_Drought_P Parameter: Organism Value: A. thaliana
  misc_feature: MA Experiment 20000436 PARAMETER Experiment Name: At_Drought_P Parameter: Plant Line Value: WS
  misc_feature: MA Experiment 20000436 PARAMETER Experiment Name: At_Drought_P Parameter: Timepoint (hr) Value: 12
  misc_feature: MA Experiment 20000436 PARAMETER Experiment Name: At_Drought_P Parameter: Tissue Value: Whole Plant
  misc_feature: MA Experiment 20000436 PARAMETER Experiment Name: At_Drought_P Parameter: Treatment Value: Drought vs. No Drought
  misc_feature: MA Experiment ID: 20000437 Result: Up-regulated in Transcription
  misc_feature: MA Experiment 20000437 PARAMETER Experiment Name: At_Drought_P Parameter: Age (day) Value: 8
  misc_feature: MA Experiment 20000437 PARAMETER Experiment Name: At_Drought_P Parameter: Organism Value: A. thaliana
  misc_feature: MA Experiment 20000437 PARAMETER Experiment Name: At_Drought_P Parameter: Plant Line Value: WS
  misc_feature: MA Experiment 20000437 PARAMETER Experiment Name: At_Drought_P Parameter: Timepoint (hr) Value: 24
  misc_feature: MA Experiment 20000437 PARAMETER Experiment Name: At_Drought_P Parameter: Tissue Value: Whole Plant
  misc_feature: MA Experiment 20000437 PARAMETER Experiment Name: At_Drought_P Parameter: Treatment Value: Drought vs. No Drought
  misc_feature: MA Experiment ID: 20000453 Result: Up-regulated in Transcription
  misc_feature: MA Experiment 20000453 PARAMETER Experiment Name: At_100uM_ABA_P Parameter: Age (day) Value: 15
  misc_feature: MA Experiment 20000453 PARAMETER Experiment Name: At_100uM_ABA_P Parameter: Organism Value: A. thaliana
  misc_feature: MA Experiment 20000453 PARAMETER Experiment Name: At_100uM_ABA_P Parameter: Plant Line Value: WS
  misc_feature: MA Experiment 20000453 PARAMETER Experiment Name: At_100uM_ABA_P Parameter: Timepoint (hr) Value: 24
  misc_feature: MA Experiment 20000453 PARAMETER Experiment Name: At_100uM_ABA_P Parameter: Tissue Value: Aerial
  misc_feature: MA Experiment 20000453 PARAMETER Experiment Name: At_100uM_ABA_P Parameter: Treatment Value: 100uM ABA vs. No Treatment
  misc_feature: MA Experiment ID: 20000496 Result: Down-regulated in Transcription
  misc_feature: MA Experiment 20000496 PARAMETER Experiment Name: At_Guard_Cells_P Parameter: Harvest Date Value: 7/19/2002
  misc_feature: MA Experiment 20000496 PARAMETER Experiment Name: At_Guard_Cells_P Parameter: Organism Value: Canola
  misc_feature: MA Experiment 20000496 PARAMETER Experiment Name: At_Guard_Cells_P Parameter: Tissue Value: Guard Cells vs. Leaves
  misc_feature: MA Experiment ID: 20000709 Result: Down-regulated in Transcription
  misc_feature: MA Experiment 20000709 PARAMETER Experiment Name: At_15mM_NH4NO3_L-to-H_P Parameter: Age (hr) Value: 14
  misc_feature: MA Experiment 20000709 PARAMETER Experiment Name: At_15mM_NH4NO3_L-to-H_P Parameter: Organism Value: A. thaliana
  misc_feature: MA Experiment 20000709 PARAMETER Experiment Name: At_15mM_NH4NO3_L-to-H_P Parameter: Plant Line Value: WS
  misc_feature: MA Experiment 20000709 PARAMETER Experiment Name: At_15mM_NH4NO3_L-to-H_P Parameter: Timepoint (hr) Value: 4
  misc_feature: MA Experiment 20000709 PARAMETER Experiment Name: At_15mM_NH4NO3_L-to-H_P Parameter: Tissue Value: Aerial
  misc_feature: MA Experiment 20000709 PARAMETER Experiment Name: At_15mM_NH4NO3_L-to-H_P Parameter: Treatment Value: 15mM NH4NO3 vs. 30mM Mannitol
  misc_feature: MA Experiment ID: 20000794 Result: Up-regulated in Transcription
  misc_feature: MA Experiment 20000794 PARAMETER Experiment Name: At_Petals_P Parameter: Age (day) Value: 23-25 days
  misc_feature: MA Experiment 20000794 PARAMETER Experiment Name: At_Petals_P Parameter: Plant Line Value: WS
  misc_feature: MA Experiment 20000794 PARAMETER Experiment Name: At_Petals_P Parameter: Tissue Value: Petals vs. Whole plant
  misc_feature: MA Experiment ID: 20001450 Result: Up-regulated in Transcription
  misc_feature: MA Experiment 20001450 PARAMETER Experiment Name: At_Far-red-induction_P Parameter: Age (day) Value: 7
  misc_feature: MA Experiment 20001450 PARAMETER Experiment Name: At_Far-red-induction_P Parameter: Light Value: Far-red vs. White
  misc_feature: MA Experiment 20001450 PARAMETER Experiment Name: At_Far-red-induction_P Parameter: Organism Value: A. thaliana
  misc_feature: MA Experiment 20001450 PARAMETER Experiment Name: At_Far-red-induction_P Parameter: Plant Line Value: Columbia
  misc_feature: MA Experiment 20001450 PARAMETER Experiment Name: At_Far-red-induction_P Parameter: Timepoint (hr) Value: 8
  misc_feature: MA Experiment 20001450 PARAMETER Experiment Name: At_Far-red-induction_P Parameter: Tissue Value: Whole Plant
  misc_feature: MA Experiment ID: 20001451 Result: Up-regulated in Transcription
  misc_feature: MA Experiment 20001451 PARAMETER Experiment Name: At_Far-red-induction_P Parameter: Age (day) Value: 7
  misc_feature: MA Experiment 20001451 PARAMETER Experiment Name: At_Far-red-induction_P Parameter: Light Value: Far-red vs. White
  misc_feature: MA Experiment 20001451 PARAMETER Experiment Name: At_Far-red-induction_P Parameter: Organism Value: A. thaliana
  misc_feature: MA Experiment 20001451 PARAMETER Experiment Name: At_Far-red-induction_P Parameter: Plant Line Value: Columbia
  misc_feature: MA Experiment 20001451 PARAMETER Experiment Name: At_Far-red-induction_P Parameter: Timepoint (hr) Value: 24
  misc_feature: MA Experiment 20001451 PARAMETER Experiment Name: At_Far-red-induction_P Parameter: Tissue Value: Whole Plant
  misc_feature: MA Experiment ID: 20001555 Result: Up-regulated in Transcription
  misc_feature: MA Experiment 20001555 PARAMETER Experiment Name: At_Drought_Soil_Dry_P Parameter: Age (day) Value: 24
  misc_feature: MA Experiment 20001555 PARAMETER Experiment Name: At_Drought_Soil_Dry_P Parameter: Organism Value: A. thaliana
  misc_feature: MA Experiment 20001555 PARAMETER Experiment Name: At_Drought_Soil_Dry_P Parameter: Plant Line Value: WS
  misc_feature: MA Experiment 20001555 PARAMETER Experiment Name: At_Drought_Soil_Dry_P Parameter: Post Timepoint (hr) Value: None
  misc_feature: MA Experiment 20001555 PARAMETER Experiment Name: At_Drought_Soil_Dry_P Parameter: Post-Treatment Value: None
  misc_feature: MA Experiment 20001555 PARAMETER Experiment Name: At_Drought_Soil_Dry_P Parameter: Timepoint (day) Value: 10
  misc_feature: MA Experiment 20001555 PARAMETER Experiment Name: At_Drought_Soil_Dry_P Parameter: Treatment Value: Drought vs. No Drought
  misc_feature: MA Experiment ID: 20001557 Result: Down-regulated in Transcription
  misc_feature: MA Experiment 20001557 PARAMETER Experiment Name: At_Drought_Soil_Dry_P Parameter: Age (day) Value: 27
  misc_feature: MA Experiment 20001557 PARAMETER Experiment Name: At_Drought_Soil_Dry_P Parameter: Organism Value: A. thaliana
  misc_feature: MA Experiment 20001557 PARAMETER Experiment Name: At_Drought_Soil_Dry_P Parameter: Plant Line Value: WS
  misc_feature: MA Experiment 20001557 PARAMETER Experiment Name: At_Drought_Soil_Dry_P Parameter: Post Timepoint (hr) Value: 3
  misc_feature: MA Experiment 20001557 PARAMETER Experiment Name: At_Drought_Soil_Dry_P Parameter: Post-Treatment Value: Re-Water vs. No Drought
  misc_feature: MA Experiment 20001557 PARAMETER Experiment Name: At_Drought_Soil_Dry_P Parameter: Timepoint (day) Value: 13
  misc_feature: MA Experiment 20001557 PARAMETER Experiment Name: At_Drought_Soil_Dry_P Parameter: Treatment Value: Drought vs. No Drought
  misc_feature: MA Experiment ID: 20001559 Result: Up-regulated in Transcription
  misc_feature: MA Experiment 20001559 PARAMETER Experiment Name: At_Drought_Soil_Dry_P Parameter: Age (day) Value: 28
  misc_feature: MA Experiment 20001559 PARAMETER Experiment Name: At_Drought_Soil_Dry_P Parameter: Organism Value: A. thaliana
  misc_feature: MA Experiment 20001559 PARAMETER Experiment Name: At_Drought_Soil_Dry_P Parameter: Plant Line Value: WS
  misc_feature: MA Experiment 20001559 PARAMETER Experiment Name: At_Drought_Soil_Dry_P Parameter: Post Timepoint (hr) Value: 29
  misc_feature: MA Experiment 20001559 PARAMETER Experiment Name: At_Drought_Soil_Dry_P Parameter: Post-Treatment Value: Re-Water vs. No Drought
  misc_feature: MA Experiment 20001559 PARAMETER Experiment Name: At_Drought_Soil_Dry_P Parameter: Timepoint (day) Value: 14
  misc_feature: MA Experiment 20001559 PARAMETER Experiment Name: At_Drought_Soil_Dry_P Parameter: Treatment Value: Drought vs. No Drought
  misc_feature: MA Experiment ID: 20001904 Result: Up-regulated in Transcription
  misc_feature: MA Experiment 20001904 PARAMETER Experiment Name: At_Drought_Reproduction_P Parameter: Age (day) Value: 37
  misc_feature: MA Experiment 20001904 PARAMETER Experiment Name: At_Drought_Reproduction_P Parameter: Organism Value: A. thaliana
  misc_feature: MA Experiment 20001904 PARAMETER Experiment Name: At_Drought_Reproduction_P Parameter: Plant Line Value: WS
  misc_feature: MA Experiment 20001904 PARAMETER Experiment Name: At_Drought_Reproduction_P Parameter: Timepoint (day) Value: 7
  misc_feature: MA Experiment 20001904 PARAMETER Experiment Name: At_Drought_Reproduction_P Parameter: Tissue Value: Rosettes
  misc_feature: MA Experiment 20001904 PARAMETER Experiment Name: At_Drought_Reproduction_P Parameter: Treatment Value: Drought vs. No Drought
  misc_feature: MA Experiment ID: 20001905 Result: Up-regulated in Transcription
  misc_feature: MA Experiment 20001905 PARAMETER Experiment Name: At_Drought_Reproduction_P Parameter: Age (day) Value: 40
  misc_feature: MA Experiment 20001905 PARAMETER Experiment Name: At_Drought_Reproduction_P Parameter: Organism Value: A. thaliana
  misc_feature: MA Experiment 20001905 PARAMETER Experiment Name: At_Drought_Reproduction_P Parameter: Plant Line Value: WS
  misc_feature: MA Experiment 20001905 PARAMETER Experiment Name: At_Drought_Reproduction_P Parameter: Timepoint (day) Value: 10
  misc_feature: MA Experiment 20001905 PARAMETER Experiment Name: At_Drought_Reproduction_P Parameter: Tissue Value: Rosettes
  misc_feature: MA Experiment 20001905 PARAMETER Experiment Name: At_Drought_Reproduction_P Parameter: Treatment Value: Drought vs. No Drought
  misc_feature: MA Experiment ID: 20001906 Result: Up-regulated in Transcription
  misc_feature: MA Experiment 20001906 PARAMETER Experiment Name: At_Drought_Reproduction_P Parameter: Age (day) Value: 35
  misc_feature: MA Experiment 20001906 PARAMETER Experiment Name: At_Drought_Reproduction_P Parameter: Organism Value: A. thaliana
  misc_feature: MA Experiment 20001906 PARAMETER Experiment Name: At_Drought_Reproduction_P Parameter: Plant Line Value: WS
  misc_feature: MA Experiment 20001906 PARAMETER Experiment Name: At_Drought_Reproduction_P Parameter: Timepoint (day) Value: 5
  misc_feature: MA Experiment 20001906 PARAMETER Experiment Name: At_Drought_Reproduction_P Parameter: Tissue Value: Siliques
  misc_feature: MA Experiment 20001906 PARAMETER Experiment Name: At_Drought_Reproduction_P Parameter: Treatment Value: Drought vs. No Drought
  misc_feature: MA Experiment ID: 20001907 Result: Up-regulated in Transcription
  misc_feature: MA Experiment 20001907 PARAMETER Experiment Name: At_Drought_Reproduction_P Parameter: Age (day) Value: 37
  misc_feature: MA Experiment 20001907 PARAMETER Experiment Name: At_Drought_Reproduction_P Parameter: Organism Value: A. thaliana
  misc_feature: MA Experiment 20001907 PARAMETER Experiment Name: At_Drought_Reproduction_P Parameter: Plant Line Value: WS
  misc_feature: MA Experiment 20001907 PARAMETER Experiment Name: At_Drought_Reproduction_P Parameter: Timepoint (day) Value: 7
  misc_feature: MA Experiment 20001907 PARAMETER Experiment Name: At_Drought_Reproduction_P Parameter: Tissue Value: Siliques
  misc_feature: MA Experiment 20001907 PARAMETER Experiment Name: At_Drought_Reproduction_P Parameter: Treatment Value: Drought vs. No Drought
  misc_feature: MA Experiment ID: 20001908 Result: Up-regulated in Transcription
  misc_feature: MA Experiment 20001908 PARAMETER Experiment Name: At_Drought_Reproduction_P Parameter: Age (day) Value: 40
  misc_feature: MA Experiment 20001908 PARAMETER Experiment Name: At_Drought_Reproduction_P Parameter: Organism Value: A. thaliana
  misc_feature: MA Experiment 20001908 PARAMETER Experiment Name: At_Drought_Reproduction_P Parameter: Plant Line Value: WS
  misc_feature: MA Experiment 20001908 PARAMETER Experiment Name: At_Drought_Reproduction_P Parameter: Timepoint (day) Value: 10
  misc_feature: MA Experiment 20001908 PARAMETER Experiment Name: At_Drought_Reproduction_P Parameter: Tissue Value: Siliques
  misc_feature: MA Experiment 20001908 PARAMETER Experiment Name: At_Drought_Reproduction_P Parameter: Treatment Value: Drought vs. No Drought
  misc_feature: MA Experiment ID: 20001909 Result: Up-regulated in Transcription
  misc_feature: MA Experiment 20001909 PARAMETER Experiment Name: At_Drought_Reproduction_P Parameter: Age (day) Value: 35
  misc_feature: MA Experiment 20001909 PARAMETER Experiment Name: At_Drought_Reproduction_P Parameter: Organism Value: A. thaliana
  misc_feature: MA Experiment 20001909 PARAMETER Experiment Name: At_Drought_Reproduction_P Parameter: Plant Line Value: WS
  misc_feature: MA Experiment 20001909 PARAMETER Experiment Name: At_Drought_Reproduction_P Parameter: Timepoint (day) Value: 5
  misc_feature: MA Experiment 20001909 PARAMETER Experiment Name: At_Drought_Reproduction_P Parameter: Tissue Value: Flowers
  misc_feature: MA Experiment 20001909 PARAMETER Experiment Name: At_Drought_Reproduction_P Parameter: Treatment Value: Drought vs. No Drought
  misc_feature: MA Experiment ID: 20001910 Result: Up-regulated in Transcription
  misc_feature: MA Experiment 20001910 PARAMETER Experiment Name: At_Drought_Reproduction_P Parameter: Age (day) Value: 37
  misc_feature: MA Experiment 20001910 PARAMETER Experiment Name: At_Drought_Reproduction_P Parameter: Organism Value: A. thaliana
  misc_feature: MA Experiment 20001910 PARAMETER Experiment Name: At_Drought_Reproduction_P Parameter: Plant Line Value: WS
  misc_feature: MA Experiment 20001910 PARAMETER Experiment Name: At_Drought_Reproduction_P Parameter: Timepoint (day) Value: 7
  misc_feature: MA Experiment 20001910 PARAMETER Experiment Name: At_Drought_Reproduction_P Parameter: Tissue Value: Flowers
  misc_feature: MA Experiment 20001910 PARAMETER Experiment Name: At_Drought_Reproduction_P Parameter: Treatment Value: Drought vs. No Drought
  misc_feature: MA Experiment ID: 20001911 Result: Up-regulated in Transcription
  misc_feature: MA Experiment 20001911 PARAMETER Experiment Name: At_Drought_Reproduction_P Parameter: Age (day) Value: 40
  misc_feature: MA Experiment 20001911 PARAMETER Experiment Name: At_Drought_Reproduction_P Parameter: Organism Value: A. thaliana
  misc_feature: MA Experiment 20001911 PARAMETER Experiment Name: At_Drought_Reproduction_P Parameter: Plant Line Value: WS
  misc_feature: MA Experiment 20001911 PARAMETER Experiment Name: At_Drought_Reproduction_P Parameter: Timepoint (day) Value: 10
  misc_feature: MA Experiment 20001911 PARAMETER Experiment Name: At_Drought_Reproduction_P Parameter: Tissue Value: Flowers
  misc_feature: MA Experiment 20001911 PARAMETER Experiment Name: At_Drought_Reproduction_P Parameter: Treatment Value: Drought vs. No Drought
agaaagaaagaaaaaaaagaaacaaataattccaaaaccttctctcttaatcaaaatcaagaaacttacaagatctggtgaaaaccatggaagaaggagattttttcaactgctgtttcagcgagattagtagtggcatgaccatgaataagaagaagatgaagaagagcaataaccaaaagaggtttagcgaggaacagatcaagtcacttgagcttatatttgagtctgagacgaggcttgagccgaggaagaaggttcaggtagctagagagctagggctgcaaccaagacaagtggctatatggtttcaaaacaagagggctcgatggaaaactaagcaacttgagaaagagtataacactcttagagccaattacaacaatttggcttcacaatttgaaatcatgaagaaagaaaagcaatctctggtctctgagctgcagagactaaacgaagagatgcaaaggcctaaagaagaaaagcatcatgagtgttgtggtgatcaaggactggctctaagcagcagcacagagtcgcataatggaaagagtgagccagaagggaggttagaccaagggagtgttctatgtaatgatggtgattacaacaacaacattaaaacagagtattttgggttcgaggaagagactgatcatgagctgatgaacattgtggagaaagctgatgatagttgcttgacatcttctgagaattggggaggtttcaattctgattctctcttagaccaatctagcagcaattaccctaactggtgggagttttggtcataaaagcatataagaaaaaaacagaacataagcgaagagaaagagtgtgaatagtttgtaaattatgtgttaagaaaaataaatttagtttagtttaaatcttgtttcgatctatgtatctactatgttcaatactctttgtagctaattagtagcttataatgagactagaaaagttttgaag

SEQ ID NO: 84227 - protein, 235 aa, Arabidopsis thaliana; identical to SEQ ID NO: 22083
  peptide (1)..(235): Ceres Seq. ID no. 12673821
  misc_feature (31)..(84): Pfam Name: Homeobox domain Pfam Description: Homeobox domain
  misc_feature (1)..(235): Homolog of NCBI NO: 15228625 NR Description: homeobox-leucine zipper protein ATHB-12; protein At3g61890.1, supported by cDNA: 32615., supported by cDNA:
  misc_feature (1)..(235): Homolog of NCBI NO: 11357332 NR Description: homeobox-leucine zipper protein ATHB-12
  misc_feature (1)..(177): Homolog of NCBI NO: 629527 NR Description: homeotic protein Athb-7 - Arabidopsis thaliana
  misc_feature (1)..(177): Homolog of NCBI NO: 15226424 NR Description: homeodomain transcription factor (ATHB-7); id: At2g46680.1, supported by cDNA: gi_15027938, supported by
  misc_feature (3)..(131): Homolog of NCBI NO: 5031277 NR Description: homeobox leucine zipper protein [Prunus armeniaca]
  misc_feature (28)..(140): Homolog of NCBI NO: 5006857 NR Description: homeodomain leucine zipper protein [Oryza sativa]
  misc_feature (12)..(221): Homolog of NCBI NO: 37147908 NR Description: HD-ZIP [Capsicum annuum]
  misc_feature (28)..(225): Homolog of NCBI NO: 22651698 NR Description: homeodomain protein Hfi22 [Nicotiana tabacum]
  misc_feature (31)..(235): Homolog of NCBI NO: 18034441 NR Description: homeodomain leucine zipper protein CPHB-5
  misc_feature (31)..(159): Homolog of NCBI NO: 29367373 NR Description: homeodomain leucine zipper protein-like protein

SEQ ID NO: 84228 - protein, 218 aa, Arabidopsis thaliana; identical to SEQ ID NO: 22084
  peptide (1)..(218): Ceres Seq. ID no. 12673822
  misc_feature (14)..(67): Pfam Name: Homeobox domain Pfam Description: Homeobox domain
  misc_feature (1)..(218): Homolog of NCBI NO: 15228625 NR Description: homeobox-leucine zipper protein ATHB-12; protein At3g61890.1, supported by cDNA: 32615., supported by cDNA:
  misc_feature (1)..(218): Homolog of NCBI NO: 11357332 NR Description: homeobox-leucine zipper protein ATHB-12
  misc_feature (1)..(160): Homolog of NCBI NO: 629527 NR Description: homeotic protein Athb-7 - Arabidopsis thaliana
  misc_feature (1)..(160): Homolog of NCBI NO: 15226424 NR Description: homeodomain transcription factor (ATHB-7); id: At2g46680.1, supported by cDNA: gi_15027938, supported by
  misc_feature (1)..(114): Homolog of NCBI NO: 5031277 NR Description: homeobox leucine zipper protein [Prunus armeniaca]
  misc_feature (11)..(123): Homolog of NCBI NO: 5006857 NR Description: homeodomain leucine zipper protein [Oryza sativa]
  misc_feature (1)..(204): Homolog of NCBI NO: 37147908 NR Description: HD-ZIP [Capsicum annuum]
  misc_feature (11)..(208): Homolog of NCBI NO: 22651698 NR Description: homeodomain protein Hfi22 [Nicotiana tabacum]
  misc_feature (14)..(218): Homolog of NCBI NO: 18034441 NR Description: homeodomain leucine zipper protein CPHB-5
  misc_feature (14)..(142): Homolog of NCBI NO: 29367373 NR Description: homeodomain leucine zipper protein-like protein

SEQ ID NO: 84229 - protein, 216 aa, Arabidopsis thaliana; identical to SEQ ID NO: 22085
  peptide (1)..(216): Ceres Seq. ID no. 12673823
  misc_feature (12)..(65): Pfam Name: Homeobox domain Pfam Description: Homeobox domain
  misc_feature (1)..(216): Homolog of NCBI NO: 15228625 NR Description: homeobox-leucine zipper protein ATHB-12; protein At3g61890.1, supported by cDNA: 32615., supported by cDNA:
  misc_feature (1)..(216): Homolog of NCBI NO: 11357332 NR Description: homeobox-leucine zipper protein ATHB-12
  misc_feature (1)..(158): Homolog of NCBI NO: 629527 NR Description: homeotic protein Athb-7 - Arabidopsis thaliana
  misc_feature (1)..(158): Homolog of NCBI NO: 15226424 NR Description: homeodomain transcription factor (ATHB-7); id: At2g46680.1, supported by cDNA: gi_15027938, supported by
  misc_feature (1)..(112): Homolog of NCBI NO: 5031277 NR Description: homeobox leucine zipper protein [Prunus armeniaca]
  misc_feature (9)..(121): Homolog of NCBI NO: 5006857 NR Description: homeodomain leucine zipper protein [Oryza sativa]
  misc_feature (1)..(202): Homolog of NCBI NO: 37147908 NR Description: HD-ZIP [Capsicum annuum]
  misc_feature (9)..(206): Homolog of NCBI NO: 22651698 NR Description: homeodomain protein Hfi22 [Nicotiana tabacum]
  misc_feature (12)..(216): Homolog of NCBI NO: 18034441 NR Description: homeodomain leucine zipper protein CPHB-5
  misc_feature (12)..(140): Homolog of NCBI NO: 29367373 NR Description: homeodomain leucine zipper protein-like protein

SEQ ID NO: 84230 - DNA, 2150 bp, Arabidopsis thaliana
  misc_feature (1)..(2150): Ceres Seq. ID no. 12673831
  misc_feature: MA Experiment ID: 20000166 Result: Up-regulated in Transcription
  misc_feature: MA Experiment 20000166 PARAMETER Experiment Name: At_100uM_ABA_P Parameter: Age (day) Value: 14
  misc_feature: MA Experiment 20000166 PARAMETER Experiment Name: At_100uM_ABA_P Parameter: Organism Value: A. thaliana
  misc_feature: MA Experiment 20000166 PARAMETER Experiment Name: At_100uM_ABA_P Parameter: Plant Line Value: WS
  misc_feature: MA Experiment 20000166 PARAMETER Experiment Name: At_100uM_ABA_P Parameter: Timepoint (hr) Value: 1
  misc_feature: MA Experiment 20000166 PARAMETER Experiment Name: At_100uM_ABA_P Parameter: Tissue Value: Aerial
  misc_feature: MA Experiment 20000166 PARAMETER Experiment Name: At_100uM_ABA_P Parameter: Treatment Value: 100uM ABA vs. No Treatment
  misc_feature: MA Experiment ID: 20000171 Result: Up-regulated in Transcription
  misc_feature: MA Experiment 20000171 PARAMETER Experiment Name: At_42deg_Heat_P Parameter: Age (day) Value: 14
  misc_feature: MA Experiment 20000171 PARAMETER Experiment Name: At_42deg_Heat_P Parameter: Organism Value: A. thaliana
  misc_feature: MA Experiment 20000171 PARAMETER Experiment Name: At_42deg_Heat_P Parameter: Plant Line Value: WS
  misc_feature: MA Experiment 20000171 PARAMETER Experiment Name: At_42deg_Heat_P Parameter: Temperature (deg C) Value: 42 vs. 22
  misc_feature: MA Experiment 20000171 PARAMETER Experiment Name: At_42deg_Heat_P Parameter: Timepoint (hr) Value: 1
  misc_feature: MA Experiment 20000171 PARAMETER Experiment Name: At_42deg_Heat_P Parameter: Tissue Value: Aerial
  misc_feature: MA Experiment ID: 20000173 Result: Up-regulated in Transcription
  misc_feature: MA Experiment 20000173 PARAMETER Experiment Name: At_42deg_Heat_P Parameter: Age (day) Value: 14
  misc_feature: MA Experiment 20000173 PARAMETER Experiment Name: At_42deg_Heat_P Parameter: Organism Value: A. thaliana
  misc_feature: MA Experiment 20000173 PARAMETER Experiment Name: At_42deg_Heat_P Parameter: Plant Line Value: WS
  misc_feature: MA Experiment 20000173 PARAMETER Experiment Name: At_42deg_Heat_P Parameter: Temperature (deg C) Value: 42 vs. 22
  misc_feature: MA Experiment 20000173 PARAMETER Experiment Name: At_42deg_Heat_P Parameter: Timepoint (hr) Value: 6
  misc_feature: MA Experiment 20000173 PARAMETER Experiment Name: At_42deg_Heat_P Parameter: Tissue Value: Aerial
  misc_feature: MA Experiment ID: 20000182 Result: Up-regulated in Transcription
  misc_feature: MA Experiment 20000182 PARAMETER Experiment Name: At_2mM_SA_P Parameter: Age (day) Value: 14
  misc_feature: MA Experiment 20000182 PARAMETER Experiment Name: At_2mM_SA_P Parameter: Organism Value: A. thaliana
  misc_feature: MA Experiment 20000182 PARAMETER Experiment Name: At_2mM_SA_P Parameter: Plant Line Value: WS
  misc_feature: MA Experiment 20000182 PARAMETER Experiment Name: At_2mM_SA_P Parameter: Timepoint (hr) Value: 6
  misc_feature: MA Experiment 20000182 PARAMETER Experiment Name: At_2mM_SA_P Parameter: Tissue Value: Aerial
  misc_feature: MA Experiment 20000182 PARAMETER Experiment Name: At_2mM_SA_P Parameter: Treatment Value: 2mM SA vs. No Treatment
  misc_feature: MA Experiment ID: 20000184 Result: Down-regulated in Transcription
  misc_feature: MA Experiment 20000184 PARAMETER Experiment Name: At_Shoots__P Parameter: Age (day) Value: 7
  misc_feature: MA Experiment 20000184 PARAMETER Experiment Name: At_Shoots__P Parameter: Tissue Value: Shoots vs. Whole Plant
  misc_feature: MA Experiment ID: 20000234 Result: Down-regulated in Transcription
  misc_feature: MA Experiment 20000234 PARAMETER Experiment Name: At_Siliques_P Parameter: Age (day) Value: 21
  misc_feature: MA Experiment 20000234 PARAMETER Experiment Name: At_Siliques_P Parameter: Organism Value: A. thaliana
  misc_feature: MA Experiment 20000234 PARAMETER Experiment Name: At_Siliques_P Parameter: Plant Line Value: WS
  misc_feature: MA Experiment 20000234 PARAMETER Experiment Name: At_Siliques_P Parameter: Tissue Value: Less Than 5mm Siliques vs. Whole Plant
  misc_feature: MA Experiment ID: 20000265 Result: Down-regulated in Transcription
  misc_feature: MA Experiment 20000265 PARAMETER Experiment Name: At_Open_Flower_P Parameter: Age (day) Value: 21
  misc_feature: MA Experiment 20000265 PARAMETER Experiment Name: At_Open_Flower_P Parameter: Plant Line Value: WS
  misc_feature: MA Experiment 20000265 PARAMETER Experiment Name: At_Open_Flower_P Parameter: Tissue Value: Closed Flower vs. Whole Plant
  misc_feature: MA Experiment ID: 20000286 Result: Down-regulated in Transcription
  misc_feature: MA Experiment 20000286 PARAMETER Experiment Name: At_Open_Flower_P Parameter: Age (day) Value: 21
  misc_feature: MA Experiment 20000286 PARAMETER Experiment Name: At_Open_Flower_P Parameter: Plant Line Value: WS
  misc_feature: MA Experiment 20000286 PARAMETER Experiment Name: At_Open_Flower_P Parameter: Tissue Value: Half Open vs. Whole Plant
  misc_feature: MA Experiment ID: 20000436 Result: Up-regulated in Transcription
  misc_feature: MA Experiment 20000436 PARAMETER Experiment Name: At_Drought_P Parameter: Age (day) Value: 7
  misc_feature: MA Experiment 20000436 PARAMETER Experiment Name: At_Drought_P Parameter: Organism Value: A. thaliana
  misc_feature: MA Experiment 20000436 PARAMETER Experiment Name: At_Drought_P Parameter: Plant Line Value: WS
  misc_feature: MA Experiment 20000436 PARAMETER Experiment Name: At_Drought_P Parameter: Timepoint (hr) Value: 12
  misc_feature: MA Experiment 20000436 PARAMETER Experiment Name: At_Drought_P Parameter: Tissue Value: Whole Plant
  misc_feature: MA Experiment 20000436 PARAMETER Experiment Name: At_Drought_P Parameter: Treatment Value: Drought vs. No Drought
  misc_feature: MA Experiment ID: 20000437 Result: Up-regulated in Transcription
  misc_feature: MA Experiment 20000437 PARAMETER Experiment Name: At_Drought_P Parameter: Age (day) Value: 8
  misc_feature: MA Experiment 20000437 PARAMETER Experiment Name: At_Drought_P Parameter: Organism Value: A. thaliana
  misc_feature: MA Experiment 20000437 PARAMETER Experiment Name: At_Drought_P Parameter: Plant Line Value: WS
  misc_feature: MA Experiment 20000437 PARAMETER Experiment Name: At_Drought_P Parameter: Timepoint (hr) Value: 24
  misc_feature: MA Experiment 20000437 PARAMETER Experiment Name: At_Drought_P Parameter: Tissue Value: Whole Plant
  misc_feature: MA Experiment 20000437 PARAMETER Experiment Name: At_Drought_P Parameter: Treatment Value: Drought vs. No Drought
  misc_feature: MA Experiment ID: 20000438 Result: Down-regulated in Transcription
  misc_feature: MA Experiment 20000438 PARAMETER Experiment Name: At_Shoots__P Parameter: Age (day) Value: 14
  misc_feature: MA Experiment 20000438 PARAMETER Experiment Name: At_Shoots__P Parameter: Tissue Value: Shoots vs. Whole Plant
  misc_feature: MA Experiment ID: 20000495 Result: Down-regulated in Transcription
  misc_feature: MA Experiment 20000495 PARAMETER Experiment Name: At_Guard_Cells_P Parameter: Harvest Date Value: 8/2/2002
  misc_feature: MA Experiment 20000495 PARAMETER Experiment Name: At_Guard_Cells_P Parameter: Organism Value: A. thaliana
  misc_feature: MA Experiment 20000495 PARAMETER Experiment Name: At_Guard_Cells_P Parameter: Tissue Value: Guard Cells vs. Leaves
  misc_feature: MA Experiment ID: 20000794 Result: Up-regulated in Transcription
  misc_feature: MA Experiment 20000794 PARAMETER Experiment Name: At_Petals_P Parameter: Age (day) Value: 23-25 days
  misc_feature: MA Experiment 20000794 PARAMETER Experiment Name: At_Petals_P Parameter: Plant Line Value: WS
  misc_feature: MA Experiment 20000794 PARAMETER Experiment Name: At_Petals_P Parameter: Tissue Value: Petals vs. Whole plant
  misc_feature: MA Experiment ID: 20001554 Result: Up-regulated in Transcription
  misc_feature: MA Experiment 20001554 PARAMETER Experiment Name: At_Drought_Soil_Dry_P Parameter: Age (day) Value: 21
  misc_feature: MA Experiment 20001554 PARAMETER Experiment Name: At_Drought_Soil_Dry_P Parameter: Organism Value: A. thaliana
  misc_feature: MA Experiment 20001554 PARAMETER Experiment Name: At_Drought_Soil_Dry_P Parameter: Plant Line Value: WS
  misc_feature: MA Experiment 20001554 PARAMETER Experiment Name: At_Drought_Soil_Dry_P Parameter: Post Timepoint (hr) Value: None
  misc_feature: MA Experiment 20001554 PARAMETER Experiment Name: At_Drought_Soil_Dry_P Parameter: Post-Treatment Value: None
  misc_feature: MA Experiment 20001554 PARAMETER Experiment Name: At_Drought_Soil_Dry_P Parameter: Timepoint (day) Value: 7
  misc_feature: MA Experiment 20001554 PARAMETER Experiment Name: At_Drought_Soil_Dry_P Parameter: Treatment Value: Drought vs. No Drought
  misc_feature: MA Experiment ID: 20001555 Result: Up-regulated in Transcription
  misc_feature: MA Experiment 20001555 PARAMETER Experiment Name: At_Drought_Soil_Dry_P Parameter: Age (day) Value: 24
  misc_feature: MA Experiment 20001555 PARAMETER Experiment Name: At_Drought_Soil_Dry_P Parameter: Organism Value: A. thaliana
  misc_feature: MA Experiment 20001555 PARAMETER Experiment Name: At_Drought_Soil_Dry_P Parameter: Plant Line Value: WS
  misc_feature: MA Experiment 20001555 PARAMETER Experiment Name: At_Drought_Soil_Dry_P Parameter: Post Timepoint (hr) Value: None
  misc_feature: MA Experiment 20001555 PARAMETER Experiment Name: At_Drought_Soil_Dry_P Parameter: Post-Treatment Value: None
  misc_feature: MA Experiment 20001555 PARAMETER Experiment Name: At_Drought_Soil_Dry_P Parameter: Timepoint (day) Value: 10
  misc_feature: MA Experiment 20001555 PARAMETER Experiment Name: At_Drought_Soil_Dry_P Parameter: Treatment Value: Drought vs. No Drought
  misc_feature: MA Experiment ID: 20001904 Result: Up-regulated in Transcription
  misc_feature: MA Experiment 20001904 PARAMETER Experiment Name: At_Drought_Reproduction_P Parameter: Age (day) Value: 37
  misc_feature: MA Experiment 20001904 PARAMETER Experiment Name: At_Drought_Reproduction_P Parameter: Organism Value: A. thaliana
  misc_feature: MA Experiment 20001904 PARAMETER Experiment Name: At_Drought_Reproduction_P Parameter: Plant Line Value: WS
  misc_feature: MA Experiment 20001904 PARAMETER Experiment Name: At_Drought_Reproduction_P Parameter: Timepoint (day) Value: 7
  misc_feature: MA Experiment 20001904 PARAMETER Experiment Name: At_Drought_Reproduction_P Parameter: Tissue Value: Rosettes
  misc_feature: MA Experiment 20001904 PARAMETER Experiment Name: At_Drought_Reproduction_P Parameter: Treatment Value: Drought vs. No Drought
  misc_feature: MA Experiment ID: 20001905 Result: Up-regulated in Transcription
  misc_feature: MA Experiment 20001905 PARAMETER Experiment Name: At_Drought_Reproduction_P Parameter: Age (day) Value: 40
  misc_feature: MA Experiment 20001905 PARAMETER Experiment Name: At_Drought_Reproduction_P Parameter: Organism Value: A. thaliana
  misc_feature: MA Experiment 20001905 PARAMETER Experiment Name: At_Drought_Reproduction_P Parameter: Plant Line Value: WS
  misc_feature: MA Experiment 20001905 PARAMETER Experiment Name: At_Drought_Reproduction_P Parameter: Timepoint (day) Value: 10
  misc_feature: MA Experiment 20001905 PARAMETER Experiment Name: At_Drought_Reproduction_P Parameter: Tissue Value: Rosettes
  misc_feature: MA Experiment 20001905 PARAMETER Experiment Name: At_Drought_Reproduction_P Parameter: Treatment Value: Drought vs. No Drought
  misc_feature: MA Experiment ID: 20001906 Result: Up-regulated in Transcription
  misc_feature: MA Experiment 20001906 PARAMETER Experiment Name: At_Drought_Reproduction_P Parameter: Age (day) Value: 35
  misc_feature: MA Experiment 20001906 PARAMETER Experiment Name: At_Drought_Reproduction_P Parameter: Organism Value: A. thaliana
  misc_feature: MA Experiment 20001906 PARAMETER Experiment Name: At_Drought_Reproduction_P Parameter: Plant Line Value: WS
  misc_feature: MA Experiment 20001906 PARAMETER Experiment Name: At_Drought_Reproduction_P Parameter: Timepoint (day) Value: 5
  misc_feature: MA Experiment 20001906 PARAMETER Experiment Name: At_Drought_Reproduction_P Parameter: Tissue Value: Siliques
  misc_feature: MA Experiment 20001906 PARAMETER Experiment Name: At_Drought_Reproduction_P Parameter: Treatment Value: Drought vs. No Drought
  misc_feature: MA Experiment ID: 20001908 Result: Up-regulated in Transcription
  misc_feature: MA Experiment 20001908 PARAMETER Experiment Name: At_Drought_Reproduction_P Parameter: Age (day) Value: 40
  misc_feature: MA Experiment 20001908 PARAMETER Experiment Name: At_Drought_Reproduction_P Parameter: Organism Value: A. thaliana
  misc_feature: MA Experiment 20001908 PARAMETER Experiment Name: At_Drought_Reproduction_P Parameter: Plant Line Value: WS
  misc_feature: MA Experiment 20001908 PARAMETER Experiment Name: At_Drought_Reproduction_P Parameter: Timepoint (day) Value: 10
  misc_feature: MA Experiment 20001908 PARAMETER Experiment Name: At_Drought_Reproduction_P Parameter: Tissue Value: Siliques
  misc_feature: MA Experiment 20001908 PARAMETER Experiment Name: At_Drought_Reproduction_P Parameter: Treatment Value: Drought vs. No Drought
  misc_feature: MA Experiment ID: 20001911 Result: Up-regulated in Transcription
  misc_feature: MA Experiment 20001911 PARAMETER Experiment Name: At_Drought_Reproduction_P Parameter: Age (day) Value: 40
  misc_feature: MA Experiment 20001911 PARAMETER Experiment Name: At_Drought_Reproduction_P Parameter: Organism Value: A. thaliana
  misc_feature: MA Experiment 20001911 PARAMETER Experiment Name: At_Drought_Reproduction_P Parameter: Plant Line Value: WS
  misc_feature: MA Experiment 20001911 PARAMETER Experiment Name: At_Drought_Reproduction_P Parameter: Timepoint (day) Value: 10
  misc_feature: MA Experiment 20001911 PARAMETER Experiment Name: At_Drought_Reproduction_P Parameter: Tissue Value: Flowers
  misc_feature: MA Experiment 20001911 PARAMETER Experiment Name: At_Drought_Reproduction_P Parameter: Treatment Value: Drought vs. No Drought
aattttcgttgaacacaagtgacgaatttgagagagaaaaaaaaagaaaatcagagataaagaatttgagtttcttggaattaaaggatcgattttgttgaagtgaaattgaaattgattgtgaaaagagaaagagactgatggtagcagaagcagaggttgtgtttcaacagagtttaccggcggttctggagattgagttgtttgacggagtttcctccgccgttaaatctcccgtttcttctccgaaattgggttttactcagtcaacggcgtcggtttccggaagtttaacgacttctcctgtggtaagtcttgtttaaagtttacatttttattttctgggtgagaatttaagaagctgggttctgaaacgtaattagaaattcgactgaattattggttttagtctattaggaatcatcaaataagatgactttattgtaaatattttgcaaacatatccttggatctcttaggcttagaggacctctagttcatgtgtgtttgcgtgtcgtagcaaatatagatgcttgttgtctataactttgccttaatgaagcaactttaaagctgttggagaagccctttgtagttattgtgtgttgttaactgtcttgtcttcactgcttgtgttttatttgttgctatactcaattgagcatccgtgtataccttttatttagcaggctgatatctttccagagggtgattgcgatcctagtgtcttggattatattccgaccatccggtctggaagctttgctgatattgggccaaagagaaacatggaagatgaacacattcgcatagacgatttatcttctcaagttggttccctttttgagttgccgaagcctagtgctttctatgcggtttttgacgggcatggaggaccagaagcagcagcatacgtacgggaaaatgccattaggtttttctttgaagatgagcagtttccacagacatcggaagtgagtagtgtttatgtggaagaagttgagacttcattgagaaatgcgtttcttcaagctgatctagctttggcagaggattgcagtatcagcgattcttgtggtaccaccgctctgactgctcttatttgtggaaggtacgtgtttcattcagttttgtttagttctcaatctatctttagaatcttaagagatctcttgcgcatatacgaagatgtgcacaaaggtaaataaatctattgttaggatcttaagagagctcttacatatactagattgtaagtatataacctgtgacatgagcaatattggctatggttttatacttttggttactctttctgttgttgtctttggggtttaactgtgattttctcatgggatacttatgttcttgtcttttgcagactcttaatggttgcaaatgccggagactgcagagcggttctatgcaggaaaggcagagcgatagacatgtctgaagaccataaaccgattaatctacttgagagaagaagagtggaggaatccggcggtttcatcactaatgacggttacctaaatgaagtcctagctgtaacccgagctctgggcgactgggatttaaaactgccacacggctctcaatctccactgatctcggaaccagaaatcaagcagataactctaactgaagacgatgagtttcttgtgattgggtgcgatgggatttgggatgtcttgacgagccaagaagcggttagcattgttaggcgtggcttaaaccggcacaacgatccaacaagatgtgcgcgagagctagtgatggaggctctggggcggaactcatttgataatttaactgcggtggtggtatgtttcatgacaatggacagaggggacaagccggtggtgccattggagaagagaaggtgttttagtctttcgcctgaagctttctgtagcttgaggaatctgttggatggctgaaactagtgtgttttctggtgaaaaccgatgattatataattgatgatgacgaataatctctcccacggctgcttttgtatttagagattttacgcagctgagagaactcttttgagatatacttgtgtattaagtgtgtttgttgtgtgcacagtatgcgattacagttttgtgtacatacatactgttagttgtctatgaataacg

SEQ ID NO: 84231 - protein, 184 aa, Arabidopsis thaliana
  peptide (1)..(184): Ceres Seq. ID no. 12673832
  misc_feature (1)..(142): Pfam Name: Protein phosphatase 2C Pfam Description: Protein phosphatase 2C
  misc_feature (1)..(184): Homolog of NCBI NO: 30695577 NR Description: protein phosphatase 2C (PP2C), putative
  misc_feature (1)..(184): Homolog of NCBI NO: 15228717 NR Description: protein phosphatase 2C (PP2C); protein id: supported by cDNA: 20050. [Arabidopsis thaliana]
  misc_feature (1)..(184): Homolog of NCBI NO: 25352221 NR Description: phosphoprotein phosphatase (EC 3.1.3.16) 2C
  misc_feature (1)..(183): Homolog of NCBI NO: 34894410 NR Description: putative protein phosphatase [Oryza sativa
  misc_feature (1)..(184): Homolog of NCBI NO: 15221047 NR Description: protein phosphatase-2C, putative; protein id: [Arabidopsis thaliana] >gi|8778520|gb|AAF79528.1|AC023673_16 [Arabidopsis thaliana] >gi|12323084|gb|AAG51521.1|AC051631_1
  misc_feature (1)..(184): Homolog of NCBI NO: 30684431 NR Description: protein phosphatase 2C (PP2C) -related
  misc_feature (1)..(183): Homolog of NCBI NO: 10140768 NR Description: putative protein phosphatase-2C [Oryza sativa]
  misc_feature (1)..(183): Homolog of NCBI NO: 37536524 NR Description: putative protein phosphatase-2C [Oryza sativa
  misc_feature (1)..(184): Homolog of NCBI NO: 15226152 NR Description: protein phosphatase 2C (PP2C); protein id: supported by cDNA: gi_17979441, supported by cDNA: gi_20259092
  misc_feature (1)..(183): Homolog of NCBI NO: 15230495 NR Description: protein phosphatase 2C (PP2C); protein id:
MVANAGDCRAVLCRKGRAIDMSEDHKPINLLERRRVEESGGFITNDGYLNEVLAVTRALGDWDLKLPHGSQSPLISEPEIKQITLTEDDEFLVIGCDGIWDVLTSQEAVSIVRRGLNRHNDPTRCARELVMEALGRNSFDNLTAVVVCFMTMDRGDKPVVPLEKRRCFSLSPEAFCSLRNLLDG

SEQ ID NO: 84232 - protein, 164 aa, Arabidopsis thaliana
  peptide (1)..(164): Ceres Seq. ID no. 12673833
  misc_feature (1)..(122): Pfam Name: Protein phosphatase 2C Pfam Description: Protein phosphatase 2C
  misc_feature (1)..(164): Homolog of NCBI NO: 30695577 NR Description: protein phosphatase 2C (PP2C), putative
  misc_feature (1)..(164): Homolog of NCBI NO: 15228717 NR Description: protein phosphatase 2C (PP2C); protein id: supported by cDNA: 20050. [Arabidopsis thaliana]
  misc_feature (1)..(164): Homolog of NCBI NO: 25352221 NR Description: phosphoprotein phosphatase (EC 3.1.3.16) 2C
  misc_feature (1)..(163): Homolog of NCBI NO: 34894410 NR Description: putative protein phosphatase [Oryza sativa
  misc_feature (1)..(164): Homolog of NCBI NO: 15221047 NR Description: protein phosphatase-2C, putative; protein id: [Arabidopsis thaliana] >gi|8778520|gb|AAF79528.1|AC023673_16 [Arabidopsis thaliana] >gi|12323084|gb|AAG51521.1|AC051631_1
  misc_feature (1)..(164): Homolog of NCBI NO: 30684431 NR Description: protein phosphatase 2C (PP2C) -related
  misc_feature (1)..(163): Homolog of NCBI NO: 10140768 NR Description: putative protein phosphatase-2C [Oryza sativa]
  misc_feature (1)..(163): Homolog of NCBI NO: 37536524 NR Description: putative protein phosphatase-2C [Oryza sativa
  misc_feature (1)..(164): Homolog of NCBI NO: 15226152 NR Description: protein phosphatase 2C (PP2C); protein id: supported by cDNA: gi_17979441, supported by cDNA: gi_20259092
  misc_feature (1)..(163): Homolog of NCBI NO: 15230495 NR Description: protein phosphatase 2C (PP2C); protein id:
MSEDHKPINLLERRRVEESGGFITNDGYLNEVLAVTRALGDWDLKLPHGSQSPLISEPEIKQITLTEDDEFLVIGCDGIWDVLTSQEAVSIVRRGLNRHNDPTRCARELVMEALGRNSFDNLTAVVVCFMTMDRGDKPVVPLEKRRCFSLSPEAFCSLRNLLDG

SEQ ID NO: 84233 - protein, 139 aa, Arabidopsis thaliana
  peptide (1)..(139): Ceres Seq. ID no. 12673834
  misc_feature (1)..(108): Pfam Name: Protein phosphatase 2C Pfam Description: Protein phosphatase 2C
  misc_feature (1)..(108): Homolog of NCBI NO: 30695577 NR Description: protein phosphatase 2C (PP2C), putative
  misc_feature (1)..(108): Homolog of NCBI NO: 15228717 NR Description: protein phosphatase 2C (PP2C); protein id: supported by cDNA: 20050. [Arabidopsis thaliana]
  misc_feature (1)..(108): Homolog of NCBI NO: 25352221 NR Description: phosphoprotein phosphatase (EC 3.1.3.16) 2C
  misc_feature (1)..(108): Homolog of NCBI NO: 34894410 NR Description: putative protein phosphatase [Oryza sativa
  misc_feature (1)..(110): Homolog of NCBI NO: 15221047 NR Description: protein phosphatase-2C, putative; protein id: [Arabidopsis thaliana] >gi|8778520|gb|AAF79528.1|AC023673_16 [Arabidopsis thaliana] >gi|12323084|gb|AAG51521.1|AC051631_1
  misc_feature (1)..(110): Homolog of NCBI NO: 30684431 NR Description: protein phosphatase 2C (PP2C) -related
  misc_feature (1)..(108): Homolog of NCBI NO: 10140768 NR Description: putative protein phosphatase-2C [Oryza sativa]
  misc_feature (1)..(108): Homolog of NCBI NO: 37536524 NR Description: putative protein phosphatase-2C [Oryza sativa
  misc_feature (1)..(108): Homolog of NCBI NO: 15226152 NR Description: protein phosphatase 2C (PP2C); protein id: supported by cDNA: gi_17979441, supported by cDNA: gi_20259092
  misc_feature (1)..(105): Homolog of NCBI NO: 15230495 NR Description: protein phosphatase 2C (PP2C); protein id:
MEDEHIRIDDLSSQVGSLFELPKPSAFYAVFDGHGGPEAAAYVRENAIRFFFEDEQFPQTSEVSSVYVEEVETSLRNAFLQADLALAEDCSISDSCGTTALTALICGRYVFHSVLFSSQSIFRILRDLLRIYEDVHKGK

SEQ ID NO: 84234 - DNA, 1756 bp, Arabidopsis thaliana
  misc_feature (1)..(1756): Ceres Seq. ID no. 12673864
  misc_feature: MA Experiment ID: 20000182 Result: Down-regulated in Transcription
  misc_feature: MA Experiment 20000182 PARAMETER Experiment Name: At_2mM_SA_P Parameter: Age (day) Value: 14
  misc_feature: MA Experiment 20000182 PARAMETER Experiment Name: At_2mM_SA_P Parameter: Organism Value: A. thaliana
  misc_feature: MA Experiment 20000182 PARAMETER Experiment Name: At_2mM_SA_P Parameter: Plant Line Value: WS
  misc_feature: MA Experiment 20000182 PARAMETER Experiment Name: At_2mM_SA_P Parameter: Timepoint (hr) Value: 6
  misc_feature: MA Experiment 20000182 PARAMETER Experiment Name: At_2mM_SA_P Parameter: Tissue Value: Aerial
  misc_feature: MA Experiment 20000182 PARAMETER Experiment Name: At_2mM_SA_P Parameter: Treatment Value: 2mM SA vs. No Treatment
  misc_feature: MA Experiment ID: 20000437 Result: Up-regulated in Transcription
  misc_feature: MA Experiment 20000437 PARAMETER Experiment Name: At_Drought_P Parameter: Age (day) Value: 8
  misc_feature: MA Experiment 20000437 PARAMETER Experiment Name: At_Drought_P Parameter: Organism Value: A. thaliana
  misc_feature: MA Experiment 20000437 PARAMETER Experiment Name: At_Drought_P Parameter: Plant Line Value: WS
  misc_feature: MA Experiment 20000437 PARAMETER Experiment Name: At_Drought_P Parameter: Timepoint (hr) Value: 24
  misc_feature: MA Experiment 20000437 PARAMETER Experiment Name: At_Drought_P Parameter: Tissue Value: Whole Plant
  misc_feature: MA Experiment 20000437 PARAMETER Experiment Name: At_Drought_P Parameter: Treatment Value: Drought vs. No Drought
  misc_feature: MA Experiment ID: 20000439 Result: Up-regulated in Transcription
  misc_feature: MA Experiment 20000439 PARAMETER Experiment Name: At_Roots__P Parameter: Age (day) Value: 14 vs. 21
  misc_feature: MA Experiment 20000439 PARAMETER Experiment Name: At_Roots__P Parameter: Organism Value: A. thaliana
  misc_feature: MA Experiment 20000439 PARAMETER Experiment Name: At_Roots__P Parameter: Tissue Value: Roots vs. Whole Plant
  misc_feature: MA Experiment ID: 20000451 Result: Down-regulated in Transcription
  misc_feature: MA Experiment 20000451 PARAMETER Experiment Name: At_CS6879_Shoots-Roots_P Parameter: Age (day) Value: 14
  misc_feature: MA Experiment 20000451 PARAMETER Experiment Name: At_CS6879_Shoots-Roots_P Parameter: Organism Value: A. thaliana
  misc_feature: MA Experiment 20000451 PARAMETER Experiment Name: At_CS6879_Shoots-Roots_P Parameter: Plant Line Value: CS6879 vs. WS
  misc_feature: MA Experiment 20000451 PARAMETER Experiment Name: At_CS6879_Shoots-Roots_P Parameter: Tissue Value: Roots
  misc_feature: MA Experiment ID: 20000495 Result: Up-regulated in Transcription
  misc_feature: MA Experiment 20000495 PARAMETER Experiment Name: At_Guard_Cells_P Parameter: Harvest Date Value: 8/2/2002
  misc_feature: MA Experiment 20000495 PARAMETER Experiment Name: At_Guard_Cells_P Parameter: Organism Value: A. thaliana
  misc_feature: MA Experiment 20000495 PARAMETER Experiment Name: At_Guard_Cells_P Parameter: Tissue Value: Guard Cells vs. Leaves
  misc_feature: MA Experiment ID: 20001557 Result: Down-regulated in Transcription
  misc_feature: MA Experiment 20001557 PARAMETER Experiment Name: At_Drought_Soil_Dry_P Parameter: Age (day) Value: 27
  misc_feature: MA Experiment 20001557 PARAMETER Experiment Name: At_Drought_Soil_Dry_P Parameter: Organism Value: A. thaliana
  misc_feature: MA Experiment 20001557 PARAMETER Experiment Name: At_Drought_Soil_Dry_P Parameter: Plant Line Value: WS
  misc_feature: MA Experiment 20001557 PARAMETER Experiment Name: At_Drought_Soil_Dry_P Parameter: Post Timepoint (hr) Value: 3
  misc_feature: MA Experiment 20001557 PARAMETER Experiment Name: At_Drought_Soil_Dry_P Parameter: Post-Treatment Value: Re-Water vs. No Drought
  misc_feature: MA Experiment 20001557 PARAMETER Experiment Name: At_Drought_Soil_Dry_P Parameter: Timepoint (day) Value: 13
  misc_feature: MA Experiment 20001557 PARAMETER Experiment Name: At_Drought_Soil_Dry_P Parameter: Treatment Value: Drought vs. No Drought
gtggttaccgtttccgcgacaagctacattgatgccttcactagaaacgattttccaaatgatttcctcttcggagccgccacttctgcttaccaatgggaaggagcttttgatgaagacggaaaatctcctagcgtctgggatacaacctcccactgtgatagtggaagtaataatggagatatagcatgtgatgggtatcacaaatacaaggaagatgttatgttgatggcagaaatgggcttagaatcattcagattctctatctcctggtcaagacttatacctaaccctttttgtctgtgtcatgtttcagatggaagaggacgcattaacccaaaaggtctattgttttacaagaatctcatcaaagagctacgaagccatggaattgaaccacaggttacactttaccattatgatcttcctcagtctctggaagatgagtatggaggatggatcaaccgcaaaatcatgtaaaaggacaattaaagattctgatataaaaaatatggctagaaaataaagaatatttgttatattgcagagaagacttcactgcttttgcagatgtatgcttcagagagtttggggaggatgtgaagttatggactaaaatcaacgaagctactttattcgccattggttcttatggcgacggaatgaggtatggacattgtcctcctatgaattactctaccgcaaatgtttgtacggaaacatatattgcaggccataacatgttgctagctcactcctctgcttcaaatttgtataaactgaagtacaagactaagcaaagaggatccgtaggccttagtatatatgcttatgggctatctccttatacggactccaaggacgatgaaaccgcaactgaaagagctgaagctttcctctttggctggatgttaaagcctttggtagttggggattatccggatataatgaagagaaccttggggtcgagattaccggttttctcagaagaagagtcaaaacaagtgaaaggatcatctgactttgtaggagttgtacactacaacacattctatgtcacaaaccgacccgcaccttctctcgttaccagcattaacaaactcttctttgcagacattggcgcatatctgatcggtaagcctagtttcttttcattcgatcgaactcttttagttgatatataactcttcttcattggacagccgctgggaatgcttcattattcgagtttgatgctgttccatggggtctggaaggtattcttcagcatataaagcagagctataacaatcctccaatctacattcttgaaaatggtaaaccgatgaaacatggttcaacgctacaagacacaccaagagctgaattcattcaagcttacattggtgctgtgcacaacgccatcacgaatggatcggacacgagaggttactttgtatggtcgatgattgatttgtatgagttaataggtagatatatgaccagctatggaatgtactatgtgaatttcagtgatcctggtcgcaagaggtctccaaagctctctgcttcttggtacactggtttcctcaatggtactattgatgttgcttctcaagatactattcagttgcagagaaaatgctcaggctcttcgtccttgtaatctatttaactaaatcatcctagttttgtttggttttcatttcatctatcgtatgaaaaaaaactcagtggtttgataagatttggatatgaataatgaaactgtcttgtg

SEQ ID NO: 84235 - protein, 173 aa, Arabidopsis thaliana
  peptide (1)..(173): Ceres Seq. ID no. 12673865
  misc_feature (1)..(166): Homolog of NCBI NO: 15228847 NR Description: glycosyl hydrolase family 1; protein id:
  misc_feature (1)..(168): Homolog of NCBI NO: 18417073 NR Description: glycosyl hydrolase family 1; protein id: supported by cDNA: gi_15982821 [Arabidopsis thaliana] AT4g27830/T27E11_70 [Arabidopsis thaliana]
  misc_feature (1)..(168): Homolog of NCBI NO: 7435452 NR Description: beta-glucosidase homolog T27E11.70 - Arabidopsis
  misc_feature (1)..(168): Homolog of NCBI NO: 30687750 NR Description: glycosyl hydrolase family 1 [Arabidopsis thaliana]
  misc_feature (1)..(153): Homolog of NCBI NO: 7435451 NR Description: beta-glucosidase homolog T27E11.60 - Arabidopsis
  misc_feature (52)..(155): Homolog of NCBI NO: 11264268 NR Description: beta-glucosidase-like protein - Arabidopsis
  misc_feature (1)..(153): Homolog of NCBI NO: 22328869 NR Description: glycosyl hydrolase family 1; protein id:
  misc_feature (1)..(173): Homolog of NCBI NO: 22330338 NR Description: glycosyl hydrolase family 1; protein id:
  misc_feature (1)..(140): Homolog of NCBI NO: 25289447 NR Description: hypothetical protein T2K10.15 [imported] - thaliana >gi|4249391|gb|AAD14488.1|AAD14488 Similar to gi|3249076
  misc_feature (1)..(127): Homolog of NCBI NO: 11264219 NR Description: glucosidase like protein - Arabidopsis thaliana glucosidase like protein [Arabidopsis thaliana]
MRYGHCPPMNYSTANVCTETYIAGHNMLLAHSSASNLYKLKYKTKQRGSVGLSIYAYGLSPYTDSKDDETATERAEAFLFGWMLKPLVVGDYPDIMKRTLGSRLPVFSEEESKQVKGSSDFVGVVHYNTFYVTNRPAPSLVTSINKLFFADIGAYLIGKPSFFSFDRTLLVDI

SEQ ID NO: 84236 - protein, 165 aa, Arabidopsis thaliana
  peptide (1)..(165): Ceres Seq. ID no. 12673866
  misc_feature (1)..(158): Homolog of NCBI NO: 15228847 NR Description: glycosyl hydrolase family 1; protein id:
  misc_feature (1)..(160): Homolog of NCBI NO: 18417073 NR Description: glycosyl hydrolase family 1; protein id: supported by cDNA: gi_15982821 [Arabidopsis thaliana] AT4g27830/T27E11_70 [Arabidopsis thaliana]
  misc_feature (1)..(160): Homolog of NCBI NO: 7435452 NR Description: beta-glucosidase homolog T27E11.70 - Arabidopsis
  misc_feature (1)..(160): Homolog of NCBI NO: 30687750 NR Description: glycosyl hydrolase family 1 [Arabidopsis thaliana]
  misc_feature (1)..(145): Homolog of NCBI NO: 7435451 NR Description: beta-glucosidase homolog T27E11.60 - Arabidopsis
  misc_feature (44)..(147): Homolog of NCBI NO: 11264268 NR Description: beta-glucosidase-like protein - Arabidopsis
  misc_feature (1)..(145): Homolog of NCBI NO: 22328869 NR Description: glycosyl hydrolase family 1; protein id:
  misc_feature (1)..(165): Homolog of NCBI NO: 22330338 NR Description: glycosyl hydrolase family 1; protein id:
  misc_feature (1)..(132): Homolog of NCBI NO: 25289447 NR Description: hypothetical protein T2K10.15 [imported] - thaliana >gi|4249391|gb|AAD14488.1|AAD14488 Similar to gi|3249076
  misc_feature (1)..(119): Homolog of NCBI NO: 11264219 NR Description: glucosidase like protein - Arabidopsis thaliana glucosidase like protein [Arabidopsis thaliana]
MNYSTANVCTETYIAGHNMLLAHSSASNLYKLKYKTKQRGSVGLSIYAYGLSPYTDSKDDETATERAEAFLFGWMLKPLVVGDYPDIMKRTLGSRLPVFSEEESKQVKGSSDFVGVVHYNTFYVTNRPAPSLVTSINKLFFADIGAYLIGKPSFFSFDRTLLVDI

SEQ ID NO: 84237 - protein, 159 aa, Arabidopsis thaliana
  peptide (1)..(159): Ceres Seq. ID no. 12673867
  misc_feature (1)..(159): Homolog of NCBI NO: 15228847 NR Description: glycosyl hydrolase family 1; protein id:
  misc_feature (1)..(159): Homolog of NCBI NO: 18417073 NR Description: glycosyl hydrolase family 1; protein id: supported by cDNA: gi_15982821 [Arabidopsis thaliana] AT4g27830/T27E11_70 [Arabidopsis thaliana]
  misc_feature (1)..(159): Homolog of NCBI NO: 7435452 NR Description: beta-glucosidase homolog T27E11.70 - Arabidopsis
  misc_feature (1)..(159): Homolog of NCBI NO: 30687750 NR Description: glycosyl hydrolase family 1 [Arabidopsis thaliana]
  misc_feature (1)..(159): Homolog of NCBI NO: 7435451 NR Description: beta-glucosidase homolog T27E11.60 - Arabidopsis
  misc_feature (1)..(159): Homolog of NCBI NO: 11264268 NR Description: beta-glucosidase-like protein - Arabidopsis
  misc_feature (15)..(159): Homolog of NCBI NO: 22328869 NR Description: glycosyl hydrolase family 1; protein id:
  misc_feature (11)..(159): Homolog of NCBI NO: 22330338 NR Description: glycosyl hydrolase family 1; protein id:
  misc_feature (11)..(159): Homolog of NCBI NO: 25289447 NR Description: hypothetical protein T2K10.15 [imported] - thaliana >gi|4249391|gb|AAD14488.1|AAD14488 Similar to gi|3249076
  misc_feature (15)..(159): Homolog of NCBI NO: 11264219 NR Description: glucosidase like protein - Arabidopsis thaliana glucosidase like protein [Arabidopsis thaliana]
VVTVSATSYIDAFTRNDFPNDFLFGAATSAYQWEGAFDEDGKSPSVWDTTSHCDSGSNNGDIACDGYHKYKEDVMLMAEMGLESFRFSISWSRLIPNPFCLCHVSDGRGRINPKGLLFYKNLIKELRSHGIEPQVTLYHYDLPQSLEDEYGGWINRKIM

SEQ ID NO: 84238 - DNA, 1002 bp, Arabidopsis thaliana
  misc_feature (1)..(1002): Ceres Seq. ID no. 12673868
  misc_feature: MA Experiment ID: 108433 Result: Up-regulated in Transcription
  misc_feature: MA Experiment 108433 PARAMETER Experiment Name: At_rhl_Mutant2_cDNA_P Parameter: Age (day) Value: 7
  misc_feature: MA Experiment 108433 PARAMETER Experiment Name: At_rhl_Mutant2_cDNA_P Parameter: Organism Value: A. thaliana
  misc_feature: MA Experiment 108433 PARAMETER Experiment Name: At_rhl_Mutant2_cDNA_P Parameter: Plant Line Value: rhl Mutant vs. wt landsburg
  misc_feature: MA Experiment 108433 PARAMETER Experiment Name: At_rhl_Mutant2_cDNA_P Parameter: Tissue Value: Roots
  misc_feature: MA Experiment ID: 108464 Result: Down-regulated in Transcription
  misc_feature: MA Experiment 108464 PARAMETER Experiment Name: At_Germinating_Seeds_cDNA_P Parameter: Age (day) Value: 4 vs. 0
  misc_feature: MA Experiment 108464 PARAMETER Experiment Name: At_Germinating_Seeds_cDNA_P Parameter: Tissue Value: Germinating Seeds
  misc_feature: MA Experiment ID: 108574 Result: Down-regulated in Transcription
  misc_feature: MA Experiment 108574 PARAMETER Experiment Name: At_Wounding__cDNA_P Parameter: Timepoint (hr) Value: 1
  misc_feature: MA Experiment 108574 PARAMETER Experiment Name: At_Wounding__cDNA_P Parameter: Tissue Value: Aerial
  misc_feature: MA Experiment 108574 PARAMETER Experiment Name: At_Wounding__cDNA_P Parameter: Treatment Value: Wounding vs. No Wounding
  misc_feature: MA Experiment ID: 108577 Result: Down-regulated in Transcription
  misc_feature: MA Experiment 108577 PARAMETER Experiment Name: At_42deg_Heat_cDNA_P Parameter: Temperature (deg C) Value: 42 vs. 22
  misc_feature: MA Experiment 108577 PARAMETER Experiment Name: At_42deg_Heat_cDNA_P Parameter: Timepoint (hr) Value: 6
  misc_feature: MA Experiment 108577 PARAMETER Experiment Name: At_42deg_Heat_cDNA_P Parameter: Tissue Value: Aerial
  misc_feature: MA Experiment ID: 108579 Result: Down-regulated in Transcription
  misc_feature: MA Experiment 108579 PARAMETER Experiment Name: At_4deg_Cold_cDNA_P Parameter: Temperature (deg C) Value: 4 vs. 22
  misc_feature: MA Experiment 108579 PARAMETER Experiment Name: At_4deg_Cold_cDNA_P Parameter: Timepoint (hr) Value: 6
  misc_feature: MA Experiment 108579 PARAMETER Experiment Name: At_4deg_Cold_cDNA_P Parameter: Tissue Value: Aerial
  misc_feature: MA Experiment ID: 108595 Result: Down-regulated in Transcription
  misc_feature: MA Experiment 108595 PARAMETER Experiment Name: At_Ler-pi_Ovule_cDNA_P Parameter: Plant Line Value: null
  misc_feature: MA Experiment ID: 20000224 Result: Down-regulated in Transcription
  misc_feature: MA Experiment ID: 20000306 Result: Up-regulated in Transcription
  misc_feature: MA Experiment 20000306 PARAMETER Experiment Name: At_Germinating_Seeds_Sub_P Parameter: Age (hr) Value: 6 vs. 0
  misc_feature: MA Experiment 20000306 PARAMETER Experiment Name: At_Germinating_Seeds_Sub_P Parameter: Organism Value: A. thaliana
  misc_feature: MA Experiment 20000306 PARAMETER Experiment Name: At_Germinating_Seeds_Sub_P Parameter: Plant Line Value: WS
  misc_feature: MA Experiment 20000306 PARAMETER Experiment Name: At_Germinating_Seeds_Sub_P Parameter: Tissue Value: Germinating Seeds
  misc_feature: MA Experiment ID: 20000314 Result: Up-regulated in Transcription
  misc_feature: MA Experiment 20000314 PARAMETER Experiment Name: At_14day_Shoots-Roots_Sub_P Parameter: Age (day) Value: 14
  misc_feature: MA Experiment 20000314 PARAMETER Experiment Name: At_14day_Shoots-Roots_Sub_P Parameter: Organism Value: A. thaliana
  misc_feature: MA Experiment 20000314 PARAMETER Experiment Name: At_14day_Shoots-Roots_Sub_P Parameter: Plant Line Value: WS
  misc_feature: MA Experiment 20000314 PARAMETER Experiment Name: At_14day_Shoots-Roots_Sub_P Parameter: Tissue Value: Roots vs. Whole Plant
  misc_feature: MA Experiment ID: 20000329 Result: Down-regulated in Transcription
  misc_feature: MA Experiment 20000329 PARAMETER Experiment Name: At_4deg_Cold_Sub_P Parameter: Age (day) Value: 14
  misc_feature: MA Experiment 20000329 PARAMETER Experiment Name: At_4deg_Cold_Sub_P Parameter: Organism Value: A. thaliana
  misc_feature: MA Experiment 20000329 PARAMETER Experiment Name: At_4deg_Cold_Sub_P Parameter: Plant Line Value: WS
  misc_feature: MA Experiment 20000329 PARAMETER Experiment Name: At_4deg_Cold_Sub_P Parameter: Temperature (deg C) Value: 4 vs. 22
  misc_feature: MA Experiment 20000329 PARAMETER Experiment Name: At_4deg_Cold_Sub_P Parameter: Timepoint (hr) Value: 6
  misc_feature: MA Experiment 20000329 PARAMETER Experiment Name: At_4deg_Cold_Sub_P Parameter: Tissue Value: Aerial
  misc_feature: MA Experiment ID: 20000332 Result: Down-regulated in Transcription
  misc_feature: MA Experiment 20000332 PARAMETER Experiment Name: At_4deg_Cold_Sub_P Parameter: Age (day) Value: 14
  misc_feature: MA Experiment 20000332 PARAMETER Experiment Name: At_4deg_Cold_Sub_P Parameter: Organism Value: A. thaliana
  misc_feature: MA Experiment 20000332 PARAMETER Experiment Name: At_4deg_Cold_Sub_P Parameter: Plant Line Value: WS
  misc_feature: MA Experiment 20000332 PARAMETER Experiment Name: At_4deg_Cold_Sub_P Parameter: Temperature (deg C) Value: 4 vs. 22
  misc_feature: MA Experiment 20000332 PARAMETER Experiment Name: At_4deg_Cold_Sub_P Parameter: Timepoint (hr) Value: 2
  misc_feature: MA Experiment 20000332 PARAMETER Experiment Name: At_4deg_Cold_Sub_P Parameter: Tissue Value: Aerial
ctacaaatatatataacaacagccttcaatcttccatatctatctctctccctctgctcggcgagaataatcacttaatcagacatcagaagcagcatgatgaagttcaagttccagtacgaggaggaatacatcaaaaactcgagagacgttgagttgttcgcttgcagatggcttccttcttcttctccccgagctctagtcttcctctgccatggttatggaatggagtgcagtagcttcatgagagaatgcggaatacggctggcatcagcgggatatgcagtgtttgggatggactacgaggggcatggtcggtccaagggtgctcgttgctatataaaaaaattcagtaatatagtaaatgactgctttgactattacacatccatctctgcacaagaagaatacaaagagaaaggtagatttttgtatggagaatcaatgggaggtgcagttgctttgttgcttcacaagaaagatccttctttttggaacggggctcttctcgttgctcccatgtgtaagatatcagagaaggtgaaaccacacccagtagtcataaatctactaacgagagttgaagatattataccaaaatggaagatagttcctacaaaagatgttatcgatgctgccttcaaggatccggtcaagcgcgaagagataaggaacaacaagctgatatatcaagacaagccaagacttaaaaccgcacttgaaatgcttagaacgagcatggaccttgaagacactctccacgagatcacattgcctttctttgtccttcacggtgaagcagacattgtgactgatccagagataagcaaagccttgttcgagaaggcaagcacacgcgacaaaaccattaaactttacccaggaatgtggcatggattaacttctggtgagcctgatgctaacgttgacctcgtttttgctgacattgtcaattggcttgatgctcgtaccggcgactccgcttctctgacagtcactccc

SEQ ID NO: 84239 - protein, 302 aa, Arabidopsis thaliana
  peptide (1)..(302): Ceres Seq. ID no. 12673869
  misc_feature (62)..(282): Pfam Name: alpha/beta hydrolase fold Pfam Description: alpha/beta hydrolase fold
  misc_feature (1)..(301): Homolog of NCBI NO: 30695682 NR Description: esterase/lipase/thioesterase family [Arabidopsis
  misc_feature (1)..(301): Homolog of NCBI NO: 18407407 NR Description: putative phospholipase; protein id: At2g47630.1, by cDNA: 33373., supported by cDNA: gi_16323213 [Arabidopsis >gi|16323214|gb|AAL15341.1| At2g47630/F17A22.2 [Arabidopsis
  misc_feature (44)..(301): Homolog of NCBI NO: 21592863 NR Description: putative phospholipase [Arabidopsis thaliana]
  misc_feature (52)..(301): Homolog of NCBI NO: 7487574 NR Description: probable phospholipase [imported] - Arabidopsis
  misc_feature (9)..(292): Homolog of NCBI NO: 34894592 NR Description: phospholipase-like protein [Oryza sativa
  misc_feature (117)..(301): Homolog of NCBI NO: 11357678 NR Description: hypothetical protein F26K9.290 - Arabidopsis (fragment) >gi|7362766|emb|CAB83136.1| putative protein
  misc_feature (7)..(296): Homolog of NCBI NO: 7487948 NR Description: lysophospholipase homolog F12L6.8 - Arabidopsis >gi|3355471|gb|AAC27833.1| putative phospholipase [Arabidopsis >gi|13877687|gb|AAK43921.1|AF370602_1 putative phospholipase
  misc_feature (7)..(296): Homolog of NCBI NO: 30687883 NR Description: esterase/lipase/thioesterase family [Arabidopsis >gi|19423964|gb|AAL87258.1| putative phospholipase [Arabidopsis >gi|21689759|gb|AAM67523.1| putative phospholipase [Arabidopsis
  misc_feature (12)..(292): Homolog of NCBI NO: 7487947 NR Description: lysophospholipase homolog F12L6.7 - Arabidopsis
  misc_feature (9)..(291): Homolog of NCBI NO: 15223941 NR Description: lysophospholipase isolog, putative; protein id: supported by cDNA: 105948. [Arabidopsis thaliana]
MMKFKFQYEEEYIKNSRDVELFACRWLPSSSPRALVFLCHGYGMECSSFMRECGIRLASAGYAVFGMDYEGHGRSKGARCYIKKFSNIVNDCFDYYTSISAQEEYKEKGRFLYGESMGGAVALLLHKKDPSFWNGALLVAPMCKISEKVKPHPVVINLLTRVEDIIPKWKIVPTKDVIDAAFKDPVKREEIRNNKLIYQDKPRLKTALEMLRTSMDLEDTLHEITLPFFVLHGEADIVTDPEISKALFEKASTRDKTIKLYPGMWHGLTSGEPDANVDLVFADIVNWLDARTGDSASLTVTP

SEQ ID NO: 84240 - protein, 301 aa, Arabidopsis thaliana
  peptide (1)..(301): Ceres Seq. ID no. 12673870
  misc_feature (61)..(281): Pfam Name: alpha/beta hydrolase fold Pfam Description: alpha/beta hydrolase fold
  misc_feature (1)..(300): Homolog of NCBI NO: 30695682 NR Description: esterase/lipase/thioesterase family [Arabidopsis
  misc_feature (1)..(300): Homolog of NCBI NO: 18407407 NR Description: putative phospholipase; protein id: At2g47630.1, by cDNA: 33373., supported by cDNA: gi_16323213 [Arabidopsis >gi|16323214|gb|AAL15341.1| At2g47630/F17A22.2 [Arabidopsis
  misc_feature (43)..(300): Homolog of NCBI NO: 21592863 NR Description: putative phospholipase [Arabidopsis thaliana]
  misc_feature (51)..(300): Homolog of NCBI NO: 7487574 NR Description: probable phospholipase [imported] - Arabidopsis
  misc_feature (8)..(291): Homolog of NCBI NO: 34894592 NR Description: phospholipase-like protein [Oryza sativa
  misc_feature (116)..(300): Homolog of NCBI NO: 11357678 NR Description: hypothetical protein F26K9.290 - Arabidopsis (fragment) >gi|7362766|emb|CAB83136.1| putative protein
  misc_feature (6)..(295): Homolog of NCBI NO: 7487948 NR Description: lysophospholipase homolog F12L6.8 - Arabidopsis >gi|3355471|gb|AAC27833.1| putative phospholipase [Arabidopsis >gi|13877687|gb|AAK43921.1|AF370602_1 putative phospholipase
  misc_feature (6)..(295): Homolog of NCBI NO: 30687883 NR Description: esterase/lipase/thioesterase family [Arabidopsis >gi|19423964|gb|AAL87258.1| putative phospholipase [Arabidopsis >gi|21689759|gb|AAM67523.1| putative phospholipase [Arabidopsis
  misc_feature (11)..(291): Homolog of NCBI NO: 7487947 NR Description: lysophospholipase homolog F12L6.7 - Arabidopsis
  misc_feature (8)..(290): Homolog of NCBI NO: 15223941 NR Description: lysophospholipase isolog, putative; protein id: supported by cDNA: 105948. [Arabidopsis thaliana]
MKFKFQYEEEYIKNSRDVELFACRWLPSSSPRALVFLCHGYGMECSSFMRECGIRLASAGYAVFGMDYEGHGRSKGARCYIKKFSNIVNDCFDYYTSISAQEEYKEKGRFLYGESMGGAVALLLHKKDPSFWNGALLVAPMCKISEKVKPHPVVINLLTRVEDIIPKWKIVPTKDVIDAAFKDPVKREEIRNNKLIYQDKPRLKTALEMLRTSMDLEDTLHEITLPFFVLHGEADIVTDPEISKALFEKASTRDKTIKLYPGMWHGLTSGEPDANVDLVFADIVNWLDARTGDSASLTVTP

SEQ ID NO: 84241 - protein, 259 aa, Arabidopsis thaliana
  peptide (1)..(259): Ceres Seq. ID no. 12673871
  misc_feature (19)..(239): Pfam Name: alpha/beta hydrolase fold Pfam Description: alpha/beta hydrolase fold
  misc_feature (1)..(258): Homolog of NCBI NO: 30695682 NR Description: esterase/lipase/thioesterase family [Arabidopsis
  misc_feature (1)..(258): Homolog of NCBI NO: 18407407 NR Description: putative phospholipase; protein id: At2g47630.1, by cDNA: 33373., supported by cDNA: gi_16323213 [Arabidopsis >gi|16323214|gb|AAL15341.1| At2g47630/F17A22.2 [Arabidopsis
  misc_feature (1)..(258): Homolog of NCBI NO: 21592863 NR Description: putative phospholipase [Arabidopsis thaliana]
  misc_feature (9)..(258): Homolog of NCBI NO: 7487574 NR Description: probable phospholipase [imported] - Arabidopsis
  misc_feature (1)..(249): Homolog of NCBI NO: 34894592 NR Description: phospholipase-like protein [Oryza sativa
  misc_feature (74)..(258): Homolog of NCBI NO: 11357678 NR Description: hypothetical protein F26K9.290 - Arabidopsis (fragment) >gi|7362766|emb|CAB83136.1| putative protein
  misc_feature (1)..(253): Homolog of NCBI NO: 7487948 NR Description: lysophospholipase homolog F12L6.8 - Arabidopsis >gi|3355471|gb|AAC27833.1| putative phospholipase [Arabidopsis >gi|13877687|gb|AAK43921.1|AF370602_1 putative phospholipase
  misc_feature (1)..(253): Homolog of NCBI NO: 30687883 NR Description: esterase/lipase/thioesterase family [Arabidopsis >gi|19423964|gb|AAL87258.1| putative phospholipase [Arabidopsis >gi|21689759|gb|AAM67523.1| putative phospholipase [Arabidopsis
  misc_feature (1)..(249): Homolog of NCBI NO: 7487947 NR Description: lysophospholipase homolog F12L6.7 - Arabidopsis
  misc_feature (1)..(248): Homolog of NCBI NO: 15223941 NR Description: lysophospholipase isolog, putative; protein id: supported by cDNA: 105948. [Arabidopsis thaliana]
MECSSFMRECGIRLASAGYAVFGMDYEGHGRSKGARCYIKKFSNIVNDCFDYYTSISAQEEYKEKGRFLYGESMGGAVALLLHKKDPSFWNGALLVAPMCKISEKVKPHPVVINLLTRVEDIIPKWKIVPTKDVIDAAFKDPVKREEIRNNKLIYQDKPRLKTALEMLRTSMDLEDTLHEITLPFFVLHGEADIVTDPEISKALFEKASTRDKTIKLYPGMWHGLTSGEPDANVDLVFADIVNWLDARTGDSASLTVTP

SEQ ID NO: 84242 - DNA, 1222 bp, Arabidopsis thaliana
  misc_feature (1)..(1222): Ceres Seq. ID no. 12673934
  misc_feature: MA Experiment ID: 108434 Result: Down-regulated in Transcription
  misc_feature: MA Experiment 108434 PARAMETER Experiment Name: At_Root_Tips_cDNA_P Parameter: Tissue Value: Root Tips
  misc_feature: MA Experiment ID: 108461 Result: Up-regulated in Transcription
  misc_feature: MA Experiment 108461 PARAMETER Experiment Name: At_Germinating_Seeds_cDNA_P Parameter: Age (day) Value: 1 vs. 0
  misc_feature: MA Experiment 108461 PARAMETER Experiment Name: At_Germinating_Seeds_cDNA_P Parameter: Tissue Value: Germinating Seeds
  misc_feature: MA Experiment ID: 108462 Result: Up-regulated in Transcription
  misc_feature: MA Experiment 108462 PARAMETER Experiment Name: At_Germinating_Seeds_cDNA_P Parameter: Age (day) Value: 2 vs. 0
  misc_feature: MA Experiment 108462 PARAMETER Experiment Name: At_Germinating_Seeds_cDNA_P Parameter: Tissue Value: Germinating Seeds
  misc_feature: MA Experiment ID: 108561 Result: Up-regulated in Transcription
  misc_feature: MA Experiment 108561 PARAMETER Experiment Name: At_100uM_ABA_cDNA_P Parameter: Timepoint (hr) Value: 6
  misc_feature: MA Experiment 108561 PARAMETER Experiment Name: At_100uM_ABA_cDNA_P Parameter: Tissue Value: Aerial
  misc_feature: MA Experiment 108561 PARAMETER Experiment Name: At_100uM_ABA_cDNA_P Parameter: Treatment Value: 100uM ABA vs. No Treatment
  misc_feature: MA Experiment ID: 108573 Result: Up-regulated in Transcription
  misc_feature: MA Experiment 108573 PARAMETER Experiment Name: At_Drought_cDNA_P Parameter: Timepoint (hr) Value: 6
  misc_feature: MA Experiment 108573 PARAMETER Experiment Name: At_Drought_cDNA_P Parameter: Tissue Value: Aerial
  misc_feature: MA Experiment 108573 PARAMETER Experiment Name: At_Drought_cDNA_P Parameter: Treatment Value: Drought vs. No Drought
  misc_feature: MA Experiment ID: 108595 Result: Up-regulated in Transcription
  misc_feature: MA Experiment 108595 PARAMETER Experiment Name: At_Ler-pi_Ovule_cDNA_P Parameter: Plant Line Value: null
  misc_feature: MA Experiment ID: 108607 Result: Up-regulated in Transcription
  misc_feature: MA Experiment 108607 PARAMETER Experiment Name: At_100uM_ABA_cDNA_P Parameter: Timepoint (hr) Value: 4
  misc_feature: MA Experiment 108607 PARAMETER Experiment Name: At_100uM_ABA_cDNA_P Parameter: Tissue Value: Aerial
  misc_feature: MA Experiment 108607 PARAMETER Experiment Name: At_100uM_ABA_cDNA_P Parameter: Treatment Value: 100uM ABA vs. No Treatment
  misc_feature: MA Experiment ID: 20000069 Result: Up-regulated in Transcription
  misc_feature: MA Experiment 20000069 PARAMETER Experiment Name: At_100uM_ABA_Mutants_cDNA_P Parameter: Plant Line Value: CS23
  misc_feature: MA Experiment 20000069 PARAMETER Experiment Name: At_100uM_ABA_Mutants_cDNA_P Parameter: Timepoint (hr) Value: 6
  misc_feature: MA Experiment 20000069 PARAMETER Experiment Name: At_100uM_ABA_Mutants_cDNA_P Parameter: Tissue Value: Aerial
  misc_feature: MA Experiment 20000069 PARAMETER Experiment Name: At_100uM_ABA_Mutants_cDNA_P Parameter: Treatment Value: 100uM ABA vs. No Treatment
  misc_feature: MA Experiment ID: 20000070 Result: Up-regulated in Transcription
  misc_feature: MA Experiment 20000070 PARAMETER Experiment Name: At_100uM_ABA_Mutants_cDNA_P Parameter: Plant Line Value: CS24
  misc_feature: MA Experiment 20000070 PARAMETER Experiment Name: At_100uM_ABA_Mutants_cDNA_P Parameter: Timepoint (hr) Value: 6
  misc_feature: MA Experiment 20000070 PARAMETER Experiment Name: At_100uM_ABA_Mutants_cDNA_P Parameter: Tissue Value: Aerial
  misc_feature: MA Experiment 20000070 PARAMETER Experiment Name: At_100uM_ABA_Mutants_cDNA_P Parameter: Treatment Value: 100uM ABA vs. No Treatment
  misc_feature: MA Experiment ID: 20000071 Result: Up-regulated in Transcription
  misc_feature: MA Experiment 20000071 PARAMETER Experiment Name: At_100uM_ABA_Mutants_cDNA_P Parameter: Plant Line Value: CS8104
  misc_feature: MA Experiment 20000071 PARAMETER Experiment Name: At_100uM_ABA_Mutants_cDNA_P Parameter: Timepoint (hr) Value: 6
  misc_feature: MA Experiment 20000071 PARAMETER Experiment Name: At_100uM_ABA_Mutants_cDNA_P Parameter: Tissue Value: Aerial
  misc_feature: MA Experiment 20000071 PARAMETER Experiment Name: At_100uM_ABA_Mutants_cDNA_P Parameter: Treatment Value: 100uM ABA vs. No Treatment
  misc_feature: MA Experiment ID: 20000072 Result: Up-regulated in Transcription
  misc_feature: MA Experiment 20000072 PARAMETER Experiment Name: At_100uM_ABA_Mutants_cDNA_P Parameter: Plant Line Value: CS8105
  misc_feature: MA Experiment 20000072 PARAMETER Experiment Name: At_100uM_ABA_Mutants_cDNA_P Parameter: Timepoint (hr) Value: 6
  misc_feature: MA Experiment 20000072 PARAMETER Experiment Name: At_100uM_ABA_Mutants_cDNA_P Parameter: Tissue Value: Aerial
  misc_feature: MA Experiment 20000072 PARAMETER Experiment Name: At_100uM_ABA_Mutants_cDNA_P Parameter: Treatment Value: 100uM ABA vs. No Treatment
  misc_feature: MA Experiment ID: 20000088 Result: Up-regulated in Transcription
  misc_feature: MA Experiment 20000088 PARAMETER Experiment Name: At_100uM_ABA_Mutants_cDNA_P Parameter: Plant Line Value: Landsberg
  misc_feature: MA Experiment 20000088 PARAMETER Experiment Name: At_100uM_ABA_Mutants_cDNA_P Parameter: Timepoint (hr) Value: 6
  misc_feature: MA Experiment 20000088 PARAMETER Experiment Name: At_100uM_ABA_Mutants_cDNA_P Parameter: Tissue Value: Aerial
  misc_feature: MA Experiment 20000088 PARAMETER Experiment Name: At_100uM_ABA_Mutants_cDNA_P Parameter: Treatment Value: 100uM ABA vs. No Treatment
  misc_feature: MA Experiment ID: 20000111 Result: Down-regulated in Transcription
  misc_feature: MA Experiment 20000111 PARAMETER Experiment Name: At_42deg_Heat_cDNA_P Parameter: Temperature (deg C) Value: 42 vs. 22
  misc_feature: MA Experiment 20000111 PARAMETER Experiment Name: At_42deg_Heat_cDNA_P Parameter: Timepoint (hr) Value: 6
  misc_feature: MA Experiment 20000111 PARAMETER Experiment Name: At_42deg_Heat_cDNA_P Parameter: Tissue Value: Aerial
  misc_feature: MA Experiment ID: 20000117 Result: Up-regulated in Transcription
  misc_feature: MA Experiment 20000117 PARAMETER Experiment Name: At_100uM_ABA_Mutants_cDNA_P Parameter: Plant Line Value: Columbia
  misc_feature: MA Experiment 20000117 PARAMETER Experiment Name: At_100uM_ABA_Mutants_cDNA_P Parameter: Timepoint (hr) Value: 6
  misc_feature: MA Experiment 20000117 PARAMETER Experiment Name: At_100uM_ABA_Mutants_cDNA_P Parameter: Tissue Value: Aerial
  misc_feature: MA Experiment 20000117 PARAMETER Experiment Name: At_100uM_ABA_Mutants_cDNA_P Parameter: Treatment Value: 100uM ABA vs. No Treatment
atttgaacatggcatatcttataaagaaaaaaattctcgttatgagattcattaaacttttctatttattttcaataatatcctacaatttttttgttgattaaccaagttaagttttaaaagctaaatgtttctaaacaaaaggacaaaatttatactattgcgagacaaaaaagttggcgctaacatttaatcacatgatcagtttcattatcctgtagtgtataatacaactaagcgtgtttgtgtgtatgtttcaaacaaatgattagaaatggcatgcgtgggagggaaggattggtatttctacagccaaagagaccgaaaatacgcgacggggctgagaactaaccgagcaacggccaccggatattggaaagccaccggcaaagacagaaccattctaagaaagggtaagctagttgggatgaggaagacattggttttctatcaaggtcgagctcctcgaggccgtaaaaccgattgggtcatgcacgaattccgtctccaaggatctcatcatcctcccaatcattctctgagctctccaaaggaagactgggtcttgtgtagggtattccataagaatacggaaggagttatatgtagagacaacatgggaagctgttttgatgagacagcctctgcatcgcttcctccactgatggatccttacatcaactttgaccaagaaccctcttcttatctcagtgatgatcatcactacatcatcaatgagcacgtaccctgcttctccaatttgtcacagaaccaaaccttaaactcgaacctaaccaactcagtctctgaactcaagattccatgcaagaaccctaaccccttgtttactggtggttcagcctcagccacgctcacaggcctcgactcattctgttcttcagatcagatggttctcagagctctactcagtcagctcactaagattgatggaagcctcgggcctaaagaatcacagagttatggagaaggtagctcggagagcctcctgaccgacatcggtattccaagcactgtttggaattgctgatgatcgagtgtaacgagagttactattgctatattcctatccatgattggaacaattcttcggggggaaataacgtgtgcttgtctgattgtacaaacatttcctcactcttgtacccacggtagattcatgtaaaataccacttatgacgctagacatacatatatttcatcg

SEQ ID NO: 84243 - protein, 257 aa, Arabidopsis thaliana; identical to SEQ ID NO: 24899
  peptide (1)..(257): Ceres Seq. ID no. 12673935
  misc_feature (1)..(79): Pfam Name: No apical meristem (NAM) protein Pfam Description: No apical meristem (NAM) protein
  misc_feature (1)..(257): Homolog of NCBI NO: 15222818 NR Description: NAC1; protein id: At1g56010.1, supported by cDNA: supported by cDNA: gi_6649235 [Arabidopsis thaliana] NAC1 [Arabidopsis thaliana] >gi|8778319|gb|AAF79328.1|AC002304_21
  misc_feature (1)..(257): Homolog of NCBI NO: 30696045 NR Description: NAC1 / No apical meristem (NAM) protein family thaliana] >gi|29028858|gb|AAO64808.1| At1g56010 [Arabidopsis
  misc_feature (14)..(257): Homolog of NCBI NO: 25404083 NR Description: hypothetical protein T6H22.19 [imported] - thaliana >gi|6056383|gb|AAF02847.1|AC009894_18 Similar to NAM
  misc_feature (1)..(256): Homolog of NCBI NO: 15148912 NR Description: NAC domain protein NAC1 [Phaseolus vulgaris]
  misc_feature (1)..(178): Homolog of NCBI NO: 15795128 NR Description: NAM (no apical meristem) protein-like
  misc_feature (1)..(163): Homolog of NCBI NO: 38636961 NR Description: putative NAC domain protein NAC1 [Oryza sativa
  misc_feature (2)..(178): Homolog of NCBI NO: 21105757 NR Description: nam-like protein 14 [Petunia x hybrida]
  misc_feature (2)..(218): Homolog of NCBI NO: 30682048 NR Description: NAM (no apical meristem)-related protein
  misc_feature (2)..(218): Homolog of NCBI NO: 30682054 NR Description: NAM (no apical meristem)-related protein
  misc_feature (1)..(248): Homolog of NCBI NO: 15240252 NR Description: NAM, no apical meristem, - like protein; protein At5g61430.1, supported by cDNA: 12970., supported by cDNA:

SEQ ID NO: 84244 - protein, 206 aa, Arabidopsis thaliana; identical to SEQ ID NO: 24900
  peptide (1)..(206): Ceres Seq. ID no. 12673936
  misc_feature (1)..(206): Homolog of NCBI NO: 15222818 NR Description: NAC1; protein id: At1g56010.1, supported by cDNA: supported by cDNA: gi_6649235 [Arabidopsis thaliana] NAC1 [Arabidopsis thaliana] >gi|8778319|gb|AAF79328.1|AC002304_21
  misc_feature (1)..(206): Homolog of NCBI NO: 30696045 NR Description: NAC1 / No apical meristem (NAM) protein family thaliana] >gi|29028858|gb|AAO64808.1| At1g56010 [Arabidopsis
  misc_feature (1)..(206): Homolog of NCBI NO: 25404083 NR Description: hypothetical protein T6H22.19 [imported] - thaliana >gi|6056383|gb|AAF02847.1|AC009894_18 Similar to NAM
  misc_feature (1)..(205): Homolog of NCBI NO: 15148912 NR Description: NAC domain protein NAC1 [Phaseolus vulgaris]
  misc_feature (1)..(127): Homolog of NCBI NO: 15795128 NR Description: NAM (no apical meristem) protein-like
  misc_feature (1)..(112): Homolog of NCBI NO: 38636961 NR Description: putative NAC domain protein NAC1 [Oryza sativa
  misc_feature (1)..(127): Homolog of NCBI NO: 21105757 NR Description: nam-like protein 14 [Petunia x hybrida]
  misc_feature (1)..(167): Homolog of NCBI NO: 30682048 NR Description: NAM (no apical meristem)-related protein
  misc_feature (1)..(167): Homolog of NCBI NO: 30682054 NR Description: NAM (no apical meristem)-related protein
  misc_feature (1)..(197): Homolog of NCBI NO: 15240252 NR Description: NAM, no apical meristem, - like protein; protein At5g61430.1, supported by cDNA: 12970., supported by cDNA:

SEQ ID NO: 84245 - protein, 185 aa, Arabidopsis thaliana; identical to SEQ ID NO: 24901
  peptide (1)..(185): Ceres Seq. ID no. 12673937
  misc_feature (1)..(185): Homolog of NCBI NO: 15222818 NR Description: NAC1; protein id: At1g56010.1, supported by cDNA: supported by cDNA: gi_6649235 [Arabidopsis thaliana] NAC1 [Arabidopsis thaliana] >gi|8778319|gb|AAF79328.1|AC002304_21
  misc_feature (1)..(185): Homolog of NCBI NO: 30696045 NR Description: NAC1 / No apical meristem (NAM) protein family thaliana] >gi|29028858|gb|AAO64808.1| At1g56010 [Arabidopsis
  misc_feature (1)..(185): Homolog of NCBI NO: 25404083 NR Description: hypothetical protein T6H22.19 [imported] - thaliana >gi|6056383|gb|AAF02847.1|AC009894_18 Similar to NAM
  misc_feature (1)..(184): Homolog of NCBI NO: 15148912 NR Description: NAC domain protein NAC1 [Phaseolus vulgaris]
  misc_feature (1)..(106): Homolog of NCBI NO: 15795128 NR Description: NAM (no apical meristem) protein-like
  misc_feature (1)..(91): Homolog of NCBI NO: 38636961 NR Description: putative NAC domain protein NAC1 [Oryza sativa
  misc_feature (1)..(106): Homolog of NCBI NO: 21105757 NR Description: nam-like protein 14 [Petunia x hybrida]
  misc_feature (1)..(146): Homolog of NCBI NO: 30682048 NR Description: NAM (no apical meristem)-related protein
  misc_feature (1)..(146): Homolog of NCBI NO: 30682054 NR Description: NAM (no apical meristem)-related protein
  misc_feature (1)..(176): Homolog of NCBI NO: 15240252 NR Description: NAM, no apical meristem, - like protein; protein At5g61430.1, supported by cDNA: 12970., supported by cDNA:

SEQ ID NO: 84246 - DNA, 1149 bp, Arabidopsis thaliana
  misc_feature (1)..(1149): Ceres Seq. ID no. 12673965
  misc_feature: MA Experiment ID: 108464 Result: Up-regulated in Transcription
  misc_feature: MA Experiment 108464 PARAMETER Experiment Name: At_Germinating_Seeds_cDNA_P Parameter: Age (day) Value: 4 vs. 0
  misc_feature: MA Experiment 108464 PARAMETER Experiment Name: At_Germinating_Seeds_cDNA_P Parameter: Tissue Value: Germinating Seeds
  misc_feature: MA Experiment ID: 108573 Result: Up-regulated in Transcription
  misc_feature: MA Experiment 108573 PARAMETER Experiment Name: At_Drought_cDNA_P Parameter: Timepoint (hr) Value: 6
  misc_feature: MA Experiment 108573 PARAMETER Experiment Name: At_Drought_cDNA_P Parameter: Tissue Value: Aerial
  misc_feature: MA Experiment 108573 PARAMETER Experiment Name: At_Drought_cDNA_P Parameter: Treatment Value: Drought vs. No Drought
  misc_feature: MA Experiment ID: 20000087 Result: Up-regulated in Transcription
  misc_feature: MA Experiment 20000087 PARAMETER Experiment Name: At_100uM_ABA_Mutants_cDNA_P Parameter: Plant Line Value: WS
  misc_feature: MA Experiment 20000087 PARAMETER Experiment Name: At_100uM_ABA_Mutants_cDNA_P Parameter: Timepoint (hr) Value: 6
  misc_feature: MA Experiment 20000087 PARAMETER Experiment Name: At_100uM_ABA_Mutants_cDNA_P Parameter: Tissue Value: Aerial
  misc_feature: MA Experiment 20000087 PARAMETER Experiment Name: At_100uM_ABA_Mutants_cDNA_P Parameter: Treatment Value: 100uM ABA vs. No Treatment
  misc_feature: MA Experiment ID: 20000112 Result: Up-regulated in Transcription
  misc_feature: MA Experiment 20000112 PARAMETER Experiment Name: At_42deg_Heat_cDNA_P Parameter: Temperature (deg C) Value: 42 vs. 22
  misc_feature: MA Experiment 20000112 PARAMETER Experiment Name: At_42deg_Heat_cDNA_P Parameter: Timepoint (hr) Value: 2
  misc_feature: MA Experiment 20000112 PARAMETER Experiment Name: At_42deg_Heat_cDNA_P Parameter: Tissue Value: Aerial
  misc_feature: MA Experiment ID: 20000113 Result: Up-regulated in Transcription
  misc_feature: MA Experiment 20000113 PARAMETER Experiment Name: At_42deg_Heat_cDNA_P Parameter: Temperature (deg C) Value: 42 vs. 22
  misc_feature: MA Experiment 20000113 PARAMETER Experiment Name: At_42deg_Heat_cDNA_P Parameter: Timepoint (hr) Value: 8
  misc_feature: MA Experiment 20000113 PARAMETER Experiment Name: At_42deg_Heat_cDNA_P Parameter: Tissue Value: Aerial
  misc_feature: MA Experiment ID: 20000234 Result: Down-regulated in Transcription
  misc_feature: MA Experiment 20000234 PARAMETER Experiment Name: At_Siliques_P Parameter: Age (day) Value: 21
  misc_feature: MA Experiment 20000234 PARAMETER Experiment Name: At_Siliques_P Parameter: Organism Value: A. thaliana
  misc_feature: MA Experiment 20000234 PARAMETER Experiment Name: At_Siliques_P Parameter: Plant Line Value: WS
  misc_feature: MA Experiment 20000234 PARAMETER Experiment Name: At_Siliques_P Parameter: Tissue Value: Less Than 5mm Siliques vs. Whole Plant
  misc_feature: MA Experiment ID: 20000264 Result: Down-regulated in Transcription
  misc_feature: MA Experiment 20000264 PARAMETER Experiment Name: At_Open_Flower_P Parameter: Age (day) Value: 21
  misc_feature: MA Experiment 20000264 PARAMETER Experiment Name: At_Open_Flower_P Parameter: Plant Line Value: WS
  misc_feature: MA Experiment 20000264 PARAMETER Experiment Name: At_Open_Flower_P Parameter: Tissue Value: Open Flower vs. Whole Plant
  misc_feature: MA Experiment ID: 20000265 Result: Down-regulated in Transcription
  misc_feature: MA Experiment 20000265 PARAMETER Experiment Name: At_Open_Flower_P Parameter: Age (day) Value: 21
  misc_feature: MA Experiment 20000265 PARAMETER Experiment Name: At_Open_Flower_P Parameter: Plant Line Value: WS
  misc_feature: MA Experiment 20000265 PARAMETER Experiment Name: At_Open_Flower_P Parameter: Tissue Value: Closed Flower vs. Whole Plant
  misc_feature: MA Experiment ID: 20000286 Result: Down-regulated in Transcription
  misc_feature: MA Experiment 20000286 PARAMETER Experiment Name: At_Open_Flower_P Parameter: Age (day) Value: 21
  misc_feature: MA Experiment 20000286 PARAMETER Experiment Name: At_Open_Flower_P Parameter: Plant Line Value: WS
  misc_feature: MA Experiment 20000286 PARAMETER Experiment Name: At_Open_Flower_P Parameter: Tissue Value: Half Open vs. Whole Plant
  misc_feature: MA Experiment ID: 20000495 Result: Up-regulated in Transcription
  misc_feature: MA Experiment 20000495 PARAMETER Experiment Name: At_Guard_Cells_P Parameter: Harvest Date Value: 8/2/2002
  misc_feature: MA Experiment 20000495 PARAMETER Experiment Name: At_Guard_Cells_P Parameter: Organism Value: A. thaliana
  misc_feature: MA Experiment 20000495 PARAMETER Experiment Name: At_Guard_Cells_P Parameter: Tissue Value: Guard Cells vs. Leaves
  misc_feature: MA Experiment ID: 20001557 Result: Down-regulated in Transcription
  misc_feature: MA Experiment 20001557 PARAMETER Experiment Name: At_Drought_Soil_Dry_P Parameter: Age (day) Value: 27
  misc_feature: MA Experiment 20001557 PARAMETER Experiment Name: At_Drought_Soil_Dry_P Parameter: Organism Value: A. thaliana
  misc_feature: MA Experiment 20001557 PARAMETER Experiment Name: At_Drought_Soil_Dry_P Parameter: Plant Line Value: WS
  misc_feature: MA Experiment 20001557 PARAMETER Experiment Name: At_Drought_Soil_Dry_P Parameter: Post Timepoint (hr) Value: 3
  misc_feature: MA Experiment 20001557 PARAMETER Experiment Name: At_Drought_Soil_Dry_P Parameter: Post-Treatment Value: Re-Water vs. No Drought
  misc_feature: MA Experiment 20001557 PARAMETER Experiment Name: At_Drought_Soil_Dry_P Parameter: Timepoint (day) Value: 13
  misc_feature: MA Experiment 20001557 PARAMETER Experiment Name: At_Drought_Soil_Dry_P Parameter: Treatment Value: Drought vs. No Drought
  misc_feature: MA Experiment ID: 20001558 Result: Down-regulated in Transcription
  misc_feature: MA Experiment 20001558 PARAMETER Experiment Name: At_Drought_Soil_Dry_P Parameter: Age (day) Value: 27
  misc_feature: MA Experiment 20001558 PARAMETER Experiment Name: At_Drought_Soil_Dry_P Parameter: Organism Value: A. thaliana
  misc_feature: MA Experiment 20001558 PARAMETER Experiment Name: At_Drought_Soil_Dry_P Parameter: Plant Line Value: WS
  misc_feature: MA Experiment 20001558 PARAMETER Experiment Name: At_Drought_Soil_Dry_P Parameter: Post Timepoint (hr) Value: 6
  misc_feature: MA Experiment 20001558 PARAMETER Experiment Name: At_Drought_Soil_Dry_P Parameter: Post-Treatment Value: Re-Water vs. No Drought
  misc_feature: MA Experiment 20001558 PARAMETER Experiment Name: At_Drought_Soil_Dry_P Parameter: Timepoint (day) Value: 13
  misc_feature: MA Experiment 20001558 PARAMETER Experiment Name: At_Drought_Soil_Dry_P Parameter: Treatment Value: Drought vs. No Drought
  misc_feature: MA Experiment ID: 20001559 Result: Up-regulated in Transcription
  misc_feature: MA Experiment 20001559 PARAMETER Experiment Name: At_Drought_Soil_Dry_P Parameter: Age (day) Value: 28
  misc_feature: MA Experiment 20001559 PARAMETER Experiment Name: At_Drought_Soil_Dry_P Parameter: Organism Value: A. thaliana
  misc_feature: MA Experiment 20001559 PARAMETER Experiment Name: At_Drought_Soil_Dry_P Parameter: Plant Line Value: WS
  misc_feature: MA Experiment 20001559 PARAMETER Experiment Name: At_Drought_Soil_Dry_P Parameter: Post Timepoint (hr) Value: 29
  misc_feature: MA Experiment 20001559 PARAMETER Experiment Name: At_Drought_Soil_Dry_P Parameter: Post-Treatment Value: Re-Water vs. No Drought
  misc_feature: MA Experiment 20001559 PARAMETER Experiment Name: At_Drought_Soil_Dry_P Parameter: Timepoint (day) Value: 14
  misc_feature: MA Experiment 20001559 PARAMETER Experiment Name: At_Drought_Soil_Dry_P Parameter: Treatment Value: Drought vs. No Drought
  misc_feature: MA Experiment ID: 20001560 Result: Down-regulated in Transcription
  misc_feature: MA Experiment 20001560 PARAMETER Experiment Name: At_Drought_Soil_Dry_P Parameter: Age (day) Value: 28
  misc_feature: MA Experiment 20001560 PARAMETER Experiment Name: At_Drought_Soil_Dry_P Parameter: Organism Value: A. thaliana
  misc_feature: MA Experiment 20001560 PARAMETER Experiment Name: At_Drought_Soil_Dry_P Parameter: Plant Line Value: WS
  misc_feature: MA Experiment 20001560 PARAMETER Experiment Name: At_Drought_Soil_Dry_P Parameter: Post Timepoint (hr) Value: None
  misc_feature: MA Experiment 20001560 PARAMETER Experiment Name: At_Drought_Soil_Dry_P Parameter: Post-Treatment Value: None
  misc_feature: MA Experiment 20001560 PARAMETER Experiment Name: At_Drought_Soil_Dry_P Parameter: Timepoint (day) Value: 14
  misc_feature: MA Experiment 20001560 PARAMETER Experiment Name: At_Drought_Soil_Dry_P Parameter: Treatment Value: Drought vs. No Drought
  misc_feature: MA Experiment ID: 20001911 Result: Up-regulated in Transcription
  misc_feature: MA Experiment 20001911 PARAMETER Experiment Name: At_Drought_Reproduction_P Parameter: Age (day) Value: 40
  misc_feature: MA Experiment 20001911 PARAMETER Experiment Name: At_Drought_Reproduction_P Parameter: Organism Value: A. thaliana
  misc_feature: MA Experiment 20001911 PARAMETER Experiment Name: At_Drought_Reproduction_P Parameter: Plant Line Value: WS
  misc_feature: MA Experiment 20001911 PARAMETER Experiment Name: At_Drought_Reproduction_P Parameter: Timepoint (day) Value: 10
  misc_feature: MA Experiment 20001911 PARAMETER Experiment Name: At_Drought_Reproduction_P Parameter: Tissue Value: Flowers
  misc_feature: MA Experiment 20001911 PARAMETER Experiment Name: At_Drought_Reproduction_P Parameter: Treatment Value: Drought vs. No Drought
ctctctcctcctaccaagaaatcatcgtcttcttcttcatctattcaggatcgatccggcttgagatttattacaaattcgtccttctatttgctccaaaagttcgacaatttcgtaggggcaaagatggacgctgattccaagagatttctagctacgcttcgatcccgatctgaaatgttaatgggctttgaagaaatagatggagatgatgatttccaggaggagtttgcttgcccgttctgtgcagaatcgtatgatatcatcgggttgtgctgtcacatagatgatgaacatactttagagtcgaagaacgcggtatgccctgtttgttctcttaaagtgggagttgatatcgtagcacacaaacgcttcaccatgggagtttatttaagttgcagcgaaagagaaagtcacgaaaaagcggtaccaattcgacactttcacttcttcggaaagaactaagagaaggagatctacaaaggttgttaggatttacttctcgtaatggttctgttgcgtcaagtgtaactcctgatcctctcctgtcgtcatttatctcacctacacgatcacagagttctcctgcgccacgccaaaccaaaaacgtatccgaggataaacagatagagcgcaagagacaagtgttcatctcaccggtctcgttaaaagatcgggaagagaggaggcacaaatcagagtttgttcagaggctcttgtcatcagccattttcgatgaagtctaatgcacatacaaagattgagaacatggaggaactaattcgaatcagacttgagagaatctggtttcgagaaaaacaatggttgggatgagaagaagacggagaagagcgagatgcagctatgttatcaatatctatatctatctatgtattgtgtctgtttggtgctactaaatacattgcgtagaaatgtgttttcttaagtttattaagcaattgaaaagtaagatataggaagaagaataagtcctcttgtctgtagcataaaccctattggtgttcttgtgttgtgtgtcttatgaaatgaaaaatgttcactcttgtaagctagtaaaagagtgataaaagagtggttgagaaaccacgtacgaagtcatctgtttaagaataattcaacaatattgtt

SEQ ID NO: 84247 - protein, 154 aa, Arabidopsis thaliana
  peptide (1)..(154): Ceres Seq. ID no. 12673966
  misc_feature (43)..(142): Pfam Name: Drought induced 19 protein (Di19) Pfam Description: Drought induced 19 protein (Di19)
  misc_feature (43)..(142): Homolog of NCBI NO: 15028023 NR Description: unknown protein [Arabidopsis thaliana]
  misc_feature (43)..(142): Homolog of NCBI NO: 1076316 NR Description: drought-induced protein Di19 - Arabidopsis
  misc_feature (43)..(128): Homolog of NCBI NO: 30696095 NR Description: drought-induced protein -related [Arabidopsis
  misc_feature (43)..(154): Homolog of NCBI NO: 30696097 NR Description: drought-induced protein -related [Arabidopsis
  misc_feature (42)..(140): Homolog of NCBI NO: 25992529 NR Description: fiber protein Fb2 [Gossypium barbadense]
  misc_feature (42)..(122): Homolog of NCBI NO: 28393233 NR Description: unknown protein [Arabidopsis thaliana]
  misc_feature (42)..(122): Homolog of NCBI NO: 15240426 NR Description: drought-induced protein - like; protein id:
  misc_feature (55)..(122): Homolog of NCBI NO: 18377875 NR Description: AT3g06760/F3E22_10 [Arabidopsis thaliana]
  misc_feature (62)..(122): Homolog of NCBI NO: 7485240 NR Description: hypothetical protein A_IG002P16.10 - Arabidopsis >gi|2191171|gb|AAB61057.1| similar to A. thaliana DI19 mRNA
  misc_feature (55)..(125): Homolog of NCBI NO: 15230782 NR Description: unknown protein; protein id: At3g06760.1 thaliana] >gi|7549637|gb|AAF63822.1| unknown protein [Arabidopsis
LSPPTKKSSSSSSSIQDRSGLRFITNSSFYLLQKFDNFVGAKMDADSKRFLATLRSRSEMLMGFEEIDGDDDFQEEFACPFCAESYDIIGLCCHIDDEHTLESKNAVCPVCSLKVGVDIVAHKRFTMGVYLSCSERESHEKAVPIRHFHFFGKN

SEQ ID NO: 84248 - protein, 112 aa, Arabidopsis thaliana
  peptide (1)..(112): Ceres Seq. ID no. 12673967
  misc_feature (1)..(100): Pfam Name: Drought induced 19 protein (Di19) Pfam Description: Drought induced 19 protein (Di19)
  misc_feature (1)..(100): Homolog of NCBI NO: 15028023 NR Description: unknown protein [Arabidopsis thaliana]
  misc_feature (1)..(100): Homolog of NCBI NO: 1076316 NR Description: drought-induced protein Di19 - Arabidopsis
  misc_feature (1)..(86): Homolog of NCBI NO: 30696095 NR Description: drought-induced protein -related [Arabidopsis
  misc_feature (1)..(112): Homolog of NCBI NO: 30696097 NR Description: drought-induced protein -related [Arabidopsis
  misc_feature (1)..(98): Homolog of NCBI NO: 25992529 NR Description: fiber protein Fb2 [Gossypium barbadense]
  misc_feature (1)..(80): Homolog of NCBI NO: 28393233 NR Description: unknown protein [Arabidopsis thaliana]
  misc_feature (1)..(80): Homolog of NCBI NO: 15240426 NR Description: drought-induced protein - like; protein id:
  misc_feature (13)..(80): Homolog of NCBI NO: 18377875 NR Description: AT3g06760/F3E22_10 [Arabidopsis thaliana]
  misc_feature (20)..(80): Homolog of NCBI NO: 7485240 NR Description: hypothetical protein A_IG002P16.10 - Arabidopsis >gi|2191171|gb|AAB61057.1| similar to A. thaliana DI19 mRNA
  misc_feature (13)..(83): Homolog of NCBI NO: 15230782 NR Description: unknown protein; protein id: At3g06760.1 thaliana] >gi|7549637|gb|AAF63822.1| unknown protein [Arabidopsis
MDADSKRFLATLRSRSEMLMGFEEIDGDDDFQEEFACPFCAESYDIIGLCCHIDDEHTLESKNAVCPVCSLKVGVDIVAHKRFTMGVYLSCSERESHEKAVPIRHFHFFGKN

SEQ ID NO: 84249 - protein, 95 aa, Arabidopsis thaliana
  peptide (1)..(95): Ceres Seq. ID no. 12673968
  misc_feature (1)..(83): Pfam Name: Drought induced 19 protein (Di19) Pfam Description: Drought induced 19 protein (Di19)
  misc_feature (1)..(83): Homolog of NCBI NO: 15028023 NR Description: unknown protein [Arabidopsis thaliana]
  misc_feature (1)..(83): Homolog of NCBI NO: 1076316 NR Description: drought-induced protein Di19 - Arabidopsis
  misc_feature (1)..(69): Homolog of NCBI NO: 30696095 NR Description: drought-induced protein -related [Arabidopsis
  misc_feature (1)..(95): Homolog of NCBI NO: 30696097 NR Description: drought-induced protein -related [Arabidopsis
  misc_feature (1)..(81): Homolog of NCBI NO: 25992529 NR Description: fiber protein Fb2 [Gossypium barbadense]
  misc_feature (1)..(63): Homolog of NCBI NO: 28393233 NR Description: unknown protein [Arabidopsis thaliana]
  misc_feature (1)..(63): Homolog of NCBI NO: 15240426 NR Description: drought-induced protein - like; protein id:
  misc_feature (1)..(63): Homolog of NCBI NO: 18377875 NR Description: AT3g06760/F3E22_10 [Arabidopsis thaliana]
  misc_feature (3)..(63): Homolog of NCBI NO: 7485240 NR Description: hypothetical protein A_IG002P16.10 - Arabidopsis >gi|2191171|gb|AAB61057.1| similar to A. thaliana DI19 mRNA
  misc_feature (1)..(66): Homolog of NCBI NO: 15230782 NR Description: unknown protein; protein id: At3g06760.1 thaliana] >gi|7549637|gb|AAF63822.1| unknown protein [Arabidopsis
MLMGFEEIDGDDDFQEEFACPFCAESYDIIGLCCHIDDEHTLESKNAVCPVCSLKVGVDIVAHKRFTMGVYLSCSERESHEKAVPIRHFHFFGKN

SEQ ID NO: 84250 - DNA, 812 bp, Arabidopsis thaliana
  misc_feature (1)..(812): Ceres Seq. ID no. 12673969
  misc_feature: MA Experiment ID: 108434 Result: Down-regulated in Transcription
  misc_feature: MA Experiment 108434 PARAMETER Experiment Name: At_Root_Tips_cDNA_P Parameter: Tissue Value: Root Tips
  misc_feature: MA Experiment ID: 108435 Result: Down-regulated in Transcription
  misc_feature: MA Experiment 108435 PARAMETER Experiment Name: At_stm_Mutants_cDNA_P Parameter: Plant Line Value: wt Landsburg vs stm
  misc_feature: MA Experiment 108435 PARAMETER Experiment Name: At_stm_Mutants_cDNA_P Parameter: Tissue Value: Shoot Apical Meristem Region
  misc_feature: MA Experiment ID: 108462 Result: Down-regulated in Transcription
  misc_feature: MA Experiment 108462 PARAMETER Experiment Name: At_Germinating_Seeds_cDNA_P Parameter: Age (day) Value: 2 vs. 0
  misc_feature: MA Experiment 108462 PARAMETER Experiment Name: At_Germinating_Seeds_cDNA_P Parameter: Tissue Value: Germinating Seeds
  misc_feature: MA Experiment ID: 108463 Result: Down-regulated in Transcription
  misc_feature: MA Experiment 108463 PARAMETER Experiment Name: At_Germinating_Seeds_cDNA_P Parameter: Age (day) Value: 3 vs. 0
  misc_feature: MA Experiment 108463 PARAMETER Experiment Name: At_Germinating_Seeds_cDNA_P Parameter: Tissue Value: Germinating Seeds
  misc_feature: MA Experiment ID: 108464 Result: Down-regulated in Transcription
  misc_feature: MA Experiment 108464 PARAMETER Experiment Name: At_Germinating_Seeds_cDNA_P Parameter: Age (day) Value: 4 vs. 0
  misc_feature: MA Experiment 108464 PARAMETER Experiment Name: At_Germinating_Seeds_cDNA_P Parameter: Tissue Value: Germinating Seeds
  misc_feature: MA Experiment ID: 108488 Result: Down-regulated in Transcription
  misc_feature: MA Experiment ID: 108576 Result: Up-regulated in Transcription
  misc_feature: MA Experiment 108576 PARAMETER Experiment Name: At_42deg_Heat_cDNA_P Parameter: Temperature (deg C) Value: 42 vs. 22
  misc_feature: MA Experiment 108576 PARAMETER Experiment Name: At_42deg_Heat_cDNA_P Parameter: Timepoint (hr) Value: 1
  misc_feature: MA Experiment 108576 PARAMETER Experiment Name: At_42deg_Heat_cDNA_P Parameter: Tissue Value: Aerial
  misc_feature: MA Experiment ID: 108579 Result: Up-regulated in Transcription
  misc_feature: MA Experiment 108579 PARAMETER Experiment Name: At_4deg_Cold_cDNA_P Parameter: Temperature (deg C) Value: 4 vs. 22
  misc_feature: MA Experiment 108579 PARAMETER Experiment Name: At_4deg_Cold_cDNA_P Parameter: Timepoint (hr) Value: 6
  misc_feature: MA Experiment 108579 PARAMETER Experiment Name: At_4deg_Cold_cDNA_P Parameter: Tissue Value: Aerial
  misc_feature: MA Experiment ID: 20000069 Result: Up-regulated in Transcription
  misc_feature: MA Experiment 20000069 PARAMETER Experiment Name: At_100uM_ABA_Mutants_cDNA_P Parameter: Plant Line Value: CS23
  misc_feature: MA Experiment 20000069 PARAMETER Experiment Name: At_100uM_ABA_Mutants_cDNA_P Parameter: Timepoint (hr) Value: 6
  misc_feature: MA Experiment 20000069 PARAMETER Experiment Name: At_100uM_ABA_Mutants_cDNA_P Parameter: Tissue Value: Aerial
  misc_feature: MA Experiment 20000069 PARAMETER Experiment Name: At_100uM_ABA_Mutants_cDNA_P Parameter: Treatment Value: 100uM ABA vs. No Treatment
  misc_feature: MA Experiment ID: 20000070 Result: Up-regulated in Transcription
  misc_feature: MA Experiment 20000070 PARAMETER Experiment Name: At_100uM_ABA_Mutants_cDNA_P Parameter: Plant Line Value: CS24
  misc_feature: MA Experiment 20000070 PARAMETER Experiment Name: At_100uM_ABA_Mutants_cDNA_P Parameter: Timepoint (hr) Value: 6
  misc_feature: MA Experiment 20000070 PARAMETER Experiment Name: At_100uM_ABA_Mutants_cDNA_P Parameter: Tissue Value: Aerial
  misc_feature: MA Experiment 20000070 PARAMETER Experiment Name: At_100uM_ABA_Mutants_cDNA_P Parameter: Treatment Value: 100uM ABA vs. No Treatment
  misc_feature: MA Experiment ID: 20000086 Result: Up-regulated in Transcription
  misc_feature: MA Experiment 20000086 PARAMETER Experiment Name: At_100uM_ABA_Mutants_cDNA_P Parameter: Plant Line Value: CS22
  misc_feature: MA Experiment 20000086 PARAMETER Experiment Name: At_100uM_ABA_Mutants_cDNA_P Parameter: Timepoint (hr) Value: 6
  misc_feature: MA Experiment 20000086 PARAMETER Experiment Name: At_100uM_ABA_Mutants_cDNA_P Parameter: Tissue Value: Aerial
  misc_feature: MA Experiment 20000086 PARAMETER Experiment Name: At_100uM_ABA_Mutants_cDNA_P Parameter: Treatment Value: 100uM ABA vs. No Treatment
  misc_feature: MA Experiment ID: 20000087 Result: Up-regulated in Transcription
  misc_feature: MA Experiment 20000087 PARAMETER Experiment Name: At_100uM_ABA_Mutants_cDNA_P Parameter: Plant Line Value: WS
  misc_feature: MA Experiment 20000087 PARAMETER Experiment Name: At_100uM_ABA_Mutants_cDNA_P Parameter: Timepoint (hr) Value: 6
  misc_feature: MA Experiment 20000087 PARAMETER Experiment Name: At_100uM_ABA_Mutants_cDNA_P Parameter: Tissue Value: Aerial
  misc_feature: MA Experiment 20000087 PARAMETER Experiment Name: At_100uM_ABA_Mutants_cDNA_P Parameter: Treatment Value: 100uM ABA vs. No Treatment
  misc_feature: MA Experiment ID: 20000088 Result: Up-regulated in Transcription
  misc_feature: MA Experiment 20000088 PARAMETER Experiment Name: At_100uM_ABA_Mutants_cDNA_P Parameter: Plant Line Value: Landsberg
  misc_feature: MA Experiment 20000088 PARAMETER Experiment Name: At_100uM_ABA_Mutants_cDNA_P Parameter: Timepoint (hr) Value: 6
  misc_feature: MA Experiment 20000088 PARAMETER Experiment Name: At_100uM_ABA_Mutants_cDNA_P Parameter: Tissue Value: Aerial
  misc_feature: MA Experiment 20000088 PARAMETER Experiment Name: At_100uM_ABA_Mutants_cDNA_P Parameter: Treatment Value: 100uM ABA vs. No Treatment
  misc_feature: MA Experiment ID: 20000090 Result: Up-regulated in Transcription
  misc_feature: MA Experiment ID: 20000093 Result: Up-regulated in Transcription
  misc_feature: MA Experiment 20000093 PARAMETER Experiment Name: At_42deg_Heat_cDNA_P Parameter: Temperature (deg C) Value: 42 vs. 22
  misc_feature: MA Experiment 20000093 PARAMETER Experiment Name: At_42deg_Heat_cDNA_P Parameter: Timepoint (hr) Value: 0.5
  misc_feature: MA Experiment 20000093 PARAMETER Experiment Name: At_42deg_Heat_cDNA_P Parameter: Tissue Value: Aerial
  misc_feature: MA Experiment ID: 20000112 Result: Up-regulated in Transcription
  misc_feature: MA Experiment 20000112 PARAMETER Experiment Name: At_42deg_Heat_cDNA_P Parameter: Temperature (deg C) Value: 42 vs. 22
  misc_feature: MA Experiment 20000112 PARAMETER Experiment Name: At_42deg_Heat_cDNA_P Parameter: Timepoint (hr) Value: 2
  misc_feature: MA Experiment 20000112 PARAMETER Experiment Name: At_42deg_Heat_cDNA_P Parameter: Tissue Value: Aerial
  misc_feature: MA Experiment ID: 20000113 Result: Up-regulated in Transcription
  misc_feature: MA Experiment 20000113 PARAMETER Experiment Name: At_42deg_Heat_cDNA_P Parameter: Temperature (deg C) Value: 42 vs. 22
  misc_feature: MA Experiment 20000113 PARAMETER Experiment Name: At_42deg_Heat_cDNA_P Parameter: Timepoint (hr) Value: 8
  misc_feature: MA Experiment 20000113 PARAMETER Experiment Name: At_42deg_Heat_cDNA_P Parameter: Tissue Value: Aerial
  misc_feature: MA Experiment ID: 20000117 Result: Up-regulated in Transcription
  misc_feature: MA Experiment 20000117 PARAMETER Experiment Name: At_100uM_ABA_Mutants_cDNA_P Parameter: Plant Line Value: Columbia
  misc_feature: MA Experiment 20000117 PARAMETER Experiment Name: At_100uM_ABA_Mutants_cDNA_P Parameter: Timepoint (hr) Value: 6
  misc_feature: MA Experiment 20000117 PARAMETER Experiment Name: At_100uM_ABA_Mutants_cDNA_P Parameter: Tissue Value: Aerial
  misc_feature: MA Experiment 20000117 PARAMETER Experiment Name: At_100uM_ABA_Mutants_cDNA_P Parameter: Treatment Value: 100uM ABA vs. No Treatment
  misc_feature: MA Experiment ID: 20000171 Result: Up-regulated in Transcription
  misc_feature: MA Experiment 20000171 PARAMETER Experiment Name: At_42deg_Heat_P Parameter: Age (day) Value: 14
  misc_feature: MA Experiment 20000171 PARAMETER Experiment Name: At_42deg_Heat_P Parameter: Organism Value: A. thaliana
  misc_feature: MA Experiment 20000171 PARAMETER Experiment Name: At_42deg_Heat_P Parameter: Plant Line Value: WS
  misc_feature: MA Experiment 20000171 PARAMETER Experiment Name: At_42deg_Heat_P Parameter: Temperature (deg C) Value: 42 vs. 22
  misc_feature: MA Experiment 20000171 PARAMETER Experiment Name: At_42deg_Heat_P Parameter: Timepoint (hr) Value: 1
  misc_feature: MA Experiment 20000171 PARAMETER Experiment Name: At_42deg_Heat_P Parameter: Tissue Value: Aerial
  misc_feature: MA Experiment ID: 20000184 Result: Down-regulated in Transcription
  misc_feature: MA Experiment 20000184 PARAMETER Experiment Name: At_Shoots__P Parameter: Age (day) Value: 7
  misc_feature: MA Experiment 20000184 PARAMETER Experiment Name: At_Shoots__P Parameter: Tissue Value: Shoots vs. Whole Plant
  misc_feature: MA Experiment ID: 20000185 Result: Down-regulated in Transcription
  misc_feature: MA Experiment 20000185 PARAMETER Experiment Name: At_Roots__P Parameter: Age (day) Value: 7 vs. 21
  misc_feature: MA Experiment 20000185 PARAMETER Experiment Name: At_Roots__P Parameter: Organism Value: A. thaliana
  misc_feature: MA Experiment 20000185 PARAMETER Experiment Name: At_Roots__P Parameter: Tissue Value: Roots vs. Whole Plant
  misc_feature: MA Experiment ID: 20000234 Result: Down-regulated in Transcription
  misc_feature: MA Experiment 20000234 PARAMETER Experiment Name: At_Siliques_P Parameter: Age (day) Value: 21
  misc_feature: MA Experiment 20000234 PARAMETER Experiment Name: At_Siliques_P Parameter: Organism Value: A. thaliana
  misc_feature: MA Experiment 20000234 PARAMETER Experiment Name: At_Siliques_P Parameter: Plant Line Value: WS
  misc_feature: MA Experiment 20000234 PARAMETER Experiment Name: At_Siliques_P Parameter: Tissue Value: Less Than 5mm Siliques vs. Whole Plant
  misc_feature: MA Experiment ID: 20000437 Result: Up-regulated in Transcription
  misc_feature: MA Experiment 20000437 PARAMETER Experiment Name: At_Drought_P Parameter: Age (day) Value: 8
  misc_feature: MA Experiment 20000437 PARAMETER Experiment Name: At_Drought_P Parameter: Organism Value: A. thaliana
  misc_feature: MA Experiment 20000437 PARAMETER Experiment Name: At_Drought_P Parameter: Plant Line Value: WS
  misc_feature: MA Experiment 20000437 PARAMETER Experiment Name: At_Drought_P Parameter: Timepoint (hr) Value: 24
  misc_feature: MA Experiment 20000437 PARAMETER Experiment Name: At_Drought_P Parameter: Tissue Value: Whole Plant
  misc_feature: MA Experiment 20000437 PARAMETER Experiment Name: At_Drought_P Parameter: Treatment Value: Drought vs. No Drought
  misc_feature: MA Experiment ID: 20000438 Result: Down-regulated in Transcription
  misc_feature: MA Experiment 20000438 PARAMETER Experiment Name: At_Shoots__P Parameter: Age (day) Value: 14
  misc_feature: MA Experiment 20000438 PARAMETER Experiment Name: At_Shoots__P Parameter: Tissue Value: Shoots vs. Whole Plant
  misc_feature: MA Experiment ID: 20000439 Result: Down-regulated in Transcription
  misc_feature: MA Experiment 20000439 PARAMETER Experiment Name: At_Roots__P Parameter: Age (day) Value: 14 vs. 21
  misc_feature: MA Experiment 20000439 PARAMETER Experiment Name: At_Roots__P Parameter: Organism Value: A. thaliana
  misc_feature: MA Experiment 20000439 PARAMETER Experiment Name: At_Roots__P Parameter: Tissue Value: Roots vs. Whole Plant
  misc_feature: MA Experiment ID: 20000495 Result: Down-regulated in Transcription
  misc_feature: MA Experiment 20000495 PARAMETER Experiment Name: At_Guard_Cells_P Parameter: Harvest Date Value: 8/2/2002
  misc_feature: MA Experiment 20000495 PARAMETER Experiment Name: At_Guard_Cells_P Parameter: Organism Value: A. thaliana
  misc_feature: MA Experiment 20000495 PARAMETER Experiment Name: At_Guard_Cells_P Parameter: Tissue Value: Guard Cells vs. Leaves
  misc_feature: MA Experiment ID: 20001247 Result: Down-regulated in Transcription
  misc_feature: MA Experiment 20001247 PARAMETER Experiment Name: At_Far-red-induction_P Parameter: Age (day) Value: 7
  misc_feature: MA Experiment 20001247 PARAMETER Experiment Name: At_Far-red-induction_P Parameter: Light Value: Far-red vs. White
  misc_feature: MA Experiment 20001247 PARAMETER Experiment Name: At_Far-red-induction_P Parameter: Organism Value: A. thaliana
  misc_feature: MA Experiment 20001247 PARAMETER Experiment Name: At_Far-red-induction_P Parameter: Plant Line Value: Columbia
  misc_feature: MA Experiment 20001247 PARAMETER Experiment Name: At_Far-red-induction_P Parameter: Timepoint (hr) Value: 1
  misc_feature: MA Experiment 20001247 PARAMETER Experiment Name: At_Far-red-induction_P Parameter: Tissue Value: Whole Plant
  misc_feature: MA Experiment ID: 20001248 Result: Up-regulated in Transcription
  misc_feature: MA Experiment 20001248 PARAMETER Experiment Name: At_Far-red-induction_P Parameter: Age (day) Value: 7
  misc_feature: MA Experiment 20001248 PARAMETER Experiment Name: At_Far-red-induction_P Parameter: Light Value: Far-red vs. White
  misc_feature: MA Experiment 20001248 PARAMETER Experiment Name: At_Far-red-induction_P Parameter: Organism Value: A. thaliana
  misc_feature: MA Experiment 20001248 PARAMETER Experiment Name: At_Far-red-induction_P Parameter: Plant Line Value: Columbia
  misc_feature: MA Experiment 20001248 PARAMETER Experiment Name: At_Far-red-induction_P Parameter: Timepoint (hr) Value: 4
  misc_feature: MA Experiment 20001248 PARAMETER Experiment Name: At_Far-red-induction_P Parameter: Tissue Value: Whole Plant
  misc_feature: MA Experiment ID: 20001451 Result: Down-regulated in Transcription
  misc_feature: MA Experiment 20001451 PARAMETER Experiment Name: At_Far-red-induction_P Parameter: Age (day) Value: 7
  misc_feature: MA Experiment 20001451 PARAMETER Experiment Name: At_Far-red-induction_P Parameter: Light Value: Far-red vs. White
  misc_feature: MA Experiment 20001451 PARAMETER Experiment Name: At_Far-red-induction_P Parameter: Organism Value: A. thaliana
  misc_feature: MA Experiment 20001451 PARAMETER Experiment Name: At_Far-red-induction_P Parameter: Plant Line Value: Columbia
  misc_feature: MA Experiment 20001451 PARAMETER Experiment Name: At_Far-red-induction_P Parameter: Timepoint (hr) Value: 24
  misc_feature: MA Experiment 20001451 PARAMETER Experiment Name: At_Far-red-induction_P Parameter: Tissue Value: Whole Plant
  misc_feature: MA Experiment ID: 20001459 Result: Down-regulated in Transcription
  misc_feature: MA Experiment 20001459 PARAMETER Experiment Name: At_50mM_NH4NO3_L-to-H_P Parameter: Age (day) Value: Undefined
  misc_feature: MA Experiment 20001459 PARAMETER Experiment Name: At_50mM_NH4NO3_L-to-H_P Parameter: Organism Value: Undefined
  misc_feature: MA Experiment 20001459 PARAMETER Experiment Name: At_50mM_NH4NO3_L-to-H_P Parameter: Plant Line Value: Undefined
  misc_feature: MA Experiment 20001459 PARAMETER Experiment Name: At_50mM_NH4NO3_L-to-H_P Parameter: Timepoint (hr) Value: 4
  misc_feature: MA Experiment 20001459 PARAMETER Experiment Name: At_50mM_NH4NO3_L-to-H_P Parameter: Tissue Value: Siliques
  misc_feature: MA Experiment 20001459 PARAMETER Experiment Name: At_50mM_NH4NO3_L-to-H_P Parameter: Treatment Value: 50mM NH4NO3 vs. 100mM Manitol
  misc_feature: MA Experiment ID: 20001558 Result: Down-regulated in Transcription
  misc_feature: MA Experiment 20001558 PARAMETER Experiment Name: At_Drought_Soil_Dry_P Parameter: Age (day) Value: 27
  misc_feature: MA Experiment 20001558 PARAMETER Experiment Name: At_Drought_Soil_Dry_P Parameter: Organism Value: A. thaliana
  misc_feature: MA Experiment 20001558 PARAMETER Experiment Name: At_Drought_Soil_Dry_P Parameter: Plant Line Value: WS
  misc_feature: MA Experiment 20001558 PARAMETER Experiment Name: At_Drought_Soil_Dry_P Parameter: Post Timepoint (hr) Value: 6
  misc_feature: MA Experiment 20001558 PARAMETER Experiment Name: At_Drought_Soil_Dry_P Parameter: Post-Treatment Value: Re-Water vs. No Drought
  misc_feature: MA Experiment 20001558 PARAMETER Experiment Name: At_Drought_Soil_Dry_P Parameter: Timepoint (day) Value: 13
  misc_feature: MA Experiment 20001558 PARAMETER Experiment Name: At_Drought_Soil_Dry_P Parameter: Treatment Value: Drought vs. No Drought
aaaaccattccctctctcaactctctgaatatttttcttcttacgatttacaaatttccgatgctgtgacattaacgtctgagaacagagaaacacttcaaatctttgaattcgtagtgcgacggagacggaggagccatcagtttcgaaaatggcgtgcgaaggtggaggatctaacgtcagatctagctactacaccattctcgggattcgtaaagatgcctctgtttccgatatccgcactgcttatcgtaagctagctatgaaatggcatccggatagatatgctcgaaatcctggagtcgccggagaagctaaacgtcggtttcaacaaatccaggaagcctattctgttttgaatgatgagaataagaggtcaatgtacgatgttggactatatgatcctcatgaagatgatgacgatgacttctgtgatttcatgcaagagatgatctcaatgatgaacaatgtcaaagacgcgggagagagcttggaagacttgcaacgaatgttcacggatatggttggtggagatggcgtgagctatgactgtaacaataatccaaagggcaacaaaagaccacgtgtcaatatctcgaggagtagtgctgcgatgcgttaaggcttacttcttttgtgtatgagtgtcgtgttgtatcaaaatttcaattccatgttcaattgtctagaccataaaataaattatctgtgaaaaccaactagaactaggtagaatctttggaatcccacatgccccaatcactaatgtatctctcatgatttggttgattttaaagattcgaaaattattc

SEQ ID NO: 84251 - protein, 156 aa, Arabidopsis thaliana; identical to SEQ ID NO: 36014
  peptide (1)..(156): Ceres Seq. ID no. 12673970
  misc_feature (13)..(82): Pfam Name: DnaJ domain Pfam Description: DnaJ domain
  misc_feature (1)..(156): Homolog of NCBI NO: 18405757 NR Description: DnaJ protein, putative; protein id: At1g56300.1, by cDNA: 25796. [Arabidopsis thaliana]
  misc_feature (1)..(156): Homolog of NCBI NO: 21554587 NR Description: DnaJ protein, putative [Arabidopsis thaliana]

SEQ ID NO: 84252 - protein, 119 aa, Arabidopsis thaliana; identical to SEQ ID NO: 36015
  peptide (1)..(119): Ceres Seq. ID no. 12673971
  misc_feature (1)..(119): Homolog of NCBI NO: 18405757 NR Description: DnaJ protein, putative; protein id: At1g56300.1, by cDNA: 25796. [Arabidopsis thaliana]
  misc_feature (1)..(119): Homolog of NCBI NO: 21554587 NR Description: DnaJ protein, putative [Arabidopsis thaliana]

SEQ ID NO: 84253 - protein, 85 aa, Arabidopsis thaliana
  peptide (1)..(85): Ceres Seq. ID no. 12673972
NHSLSQLSEYFSSYDLQISDAVTLTSENRETLQIFEFVVRRRRRSHQFRKWRAKVEDLTSDLATTPFSGFVKMPLFPISALLIVS

SEQ ID NO: 84254 - DNA, 1070 bp, Arabidopsis thaliana
  misc_feature (1)..(1070): Ceres Seq. ID no. 12673988
  misc_feature: MA Experiment ID: 108462 Result: Up-regulated in Transcription
  misc_feature: MA Experiment 108462 PARAMETER Experiment Name: At_Germinating_Seeds_cDNA_P Parameter: Age (day) Value: 2 vs. 0
  misc_feature: MA Experiment 108462 PARAMETER Experiment Name: At_Germinating_Seeds_cDNA_P Parameter: Tissue Value: Germinating Seeds
  misc_feature: MA Experiment ID: 108463 Result: Up-regulated in Transcription
  misc_feature: MA Experiment 108463 PARAMETER Experiment Name: At_Germinating_Seeds_cDNA_P Parameter: Age (day) Value: 3 vs. 0
  misc_feature: MA Experiment 108463 PARAMETER Experiment Name: At_Germinating_Seeds_cDNA_P Parameter: Tissue Value: Germinating Seeds
  misc_feature: MA Experiment ID: 108464 Result: Up-regulated in Transcription
  misc_feature: MA Experiment 108464 PARAMETER Experiment Name: At_Germinating_Seeds_cDNA_P Parameter: Age (day) Value: 4 vs. 0
  misc_feature: MA Experiment 108464 PARAMETER Experiment Name: At_Germinating_Seeds_cDNA_P Parameter: Tissue Value: Germinating Seeds
  misc_feature: MA Experiment ID: 108469 Result: Up-regulated in Transcription
  misc_feature: MA Experiment ID: 108594 Result: Down-regulated in Transcription
  misc_feature: MA Experiment 108594 PARAMETER Experiment Name: At_Ler-rhl_Root_cDNA_P Parameter: Plant Line Value: null
  misc_feature: MA Experiment ID: 108595 Result: Up-regulated in Transcription
  misc_feature: MA Experiment 108595 PARAMETER Experiment Name: At_Ler-pi_Ovule_cDNA_P Parameter: Plant Line Value: null
  misc_feature: MA Experiment ID: 108667 Result: Up-regulated in Transcription
  misc_feature: MA Experiment 108667 PARAMETER Experiment Name: At_2mM_SA_cDNA_P Parameter: Plant Line Value: WS
  misc_feature: MA Experiment 108667 PARAMETER Experiment Name: At_2mM_SA_cDNA_P Parameter: Timepoint (hr) Value: 1
  misc_feature: MA Experiment 108667 PARAMETER Experiment Name: At_2mM_SA_cDNA_P Parameter: Treatment Value: 2mM SA vs. No Treatment
  misc_feature: MA Experiment ID: 108668 Result: Up-regulated in Transcription
  misc_feature: MA Experiment 108668 PARAMETER Experiment Name: At_2mM_SA_cDNA_P Parameter: Plant Line Value: WS
  misc_feature: MA Experiment 108668 PARAMETER Experiment Name: At_2mM_SA_cDNA_P Parameter: Timepoint (hr) Value: 6
  misc_feature: MA Experiment 108668 PARAMETER Experiment Name: At_2mM_SA_cDNA_P Parameter: Treatment Value: 2mM SA vs. No Treatment
  misc_feature: MA Experiment ID: 20000182 Result: Up-regulated in Transcription
  misc_feature: MA Experiment 20000182 PARAMETER Experiment Name: At_2mM_SA_P Parameter: Age (day) Value: 14
  misc_feature: MA Experiment 20000182 PARAMETER Experiment Name: At_2mM_SA_P Parameter: Organism Value: A. thaliana
  misc_feature: MA Experiment 20000182 PARAMETER Experiment Name: At_2mM_SA_P Parameter: Plant Line Value: WS
  misc_feature: MA Experiment 20000182 PARAMETER Experiment Name: At_2mM_SA_P Parameter: Timepoint (hr) Value: 6
  misc_feature: MA Experiment 20000182 PARAMETER Experiment Name: At_2mM_SA_P Parameter: Tissue Value: Aerial
  misc_feature: MA Experiment 20000182 PARAMETER Experiment Name: At_2mM_SA_P Parameter: Treatment Value: 2mM SA vs. No Treatment
  misc_feature: MA Experiment ID: 20000185 Result: Up-regulated in Transcription
  misc_feature: MA Experiment 20000185 PARAMETER Experiment Name: At_Roots__P Parameter: Age (day) Value: 7 vs. 21
  misc_feature: MA Experiment 20000185 PARAMETER Experiment Name: At_Roots__P Parameter: Organism Value: A. thaliana
  misc_feature: MA Experiment 20000185 PARAMETER Experiment Name: At_Roots__P Parameter: Tissue Value: Roots vs. Whole Plant
  misc_feature: MA Experiment ID: 20000439 Result: Up-regulated in Transcription
  misc_feature: MA Experiment 20000439 PARAMETER Experiment Name: At_Roots__P Parameter: Age (day) Value: 14 vs. 21
  misc_feature: MA Experiment 20000439 PARAMETER Experiment Name: At_Roots__P Parameter: Organism Value: A. thaliana
  misc_feature: MA Experiment 20000439 PARAMETER Experiment Name: At_Roots__P Parameter: Tissue Value: Roots vs. Whole Plant
gttcttttccacagcattgcaacatgaagagacattcttgttgttacaaacaaaagctgagaaaaggtctttggtctcctgaagaagatgagaaacttctcaattacattaccaaacatggccatggttgctggagttctgtccctaaactcgcgtctcgagagatgtggaaagagctgtagactcagatggatcaattacttaagacctgatttaaagagaggagctttctcttcagaggaacagaatctcattgtcgagcttcatgctgttcttggaaacagatggtcgcaaattgctgcgaggcttcccgggagaaccgacaacgagataaagaacttgtggaattcgtgcattaagaagaagctgatgaagaaaggcattgaccctattacacataaacccctctccgaggttggtaaagaaacaaacagaagcgacaataacaattccacaagtttttcctcagaaactaatcaagacttgtttgtcaagaaaacgtctgattttgccgagtattctgcgtttcagaaagaagaatccaactctgtttcactcagaaattcgctctcttccatgatcccaacgcaattcaacatcgacgatggttctgtctcaaatgcgggttttgatacacaagtatgcgtgaaaccctcgattattcttcttcctcctccaaacaacacttcaagcactgtctctggacaggatcatgtaaacgtgtcagagcctaattgggaatcaaacagtggaaccacaagccacctcaacaatcccggtatggaagaaatgaaatggtccgaggagtacctaaacgaatcgttattctctacccaagtttacgtgaaatcagagacggatttcaactccaacattgcctttccttggagccaaagccaagcttgtgacgtattccccaaggatcttcagagaatggccttctcttttggtggtcagaccctttagtttctttttcttatcagatttagacatattgatacgtgtaatgaatggatcaaatgttctatttggccatacgttaaaaaaataaaaaagcacaatcctttcct

SEQ ID NO: 84255 - protein, 292 aa, Arabidopsis thaliana
  peptide (1)..(292): Ceres Seq. ID no. 12673989
  misc_feature (45)..(90): Pfam Name: Myb-like DNA-binding domain Pfam Description: Myb-like DNA-binding domain
  misc_feature (1)..(292): Homolog of NCBI NO: 15223612 NR Description: myb family transcription factor; protein id: supported by cDNA: 250386. [Arabidopsis thaliana]
  misc_feature (53)..(292): Homolog of NCBI NO: 3941464 NR Description: putative transcription factor [Arabidopsis
  misc_feature (24)..(269): Homolog of NCBI NO: 22329445 NR Description: myb family transcription factor; protein id: supported by cDNA: gi_20465974 [Arabidopsis thaliana] putative transcription factor [Arabidopsis thaliana]
  misc_feature (24)..(269): Homolog of NCBI NO: 25294104 NR Description: hypothetical protein [imported] - Arabidopsis >gi|3482929|gb|AAC33214.1| Putative transcription factor
  misc_feature (24)..(130): Homolog of NCBI NO: 34902542 NR Description: putative transcription factor (myb) [Oryza sativa
  misc_feature (24)..(129): Homolog of NCBI NO: 7438352 NR Description: transcription factor MYB4 homolog T15B16.7 -
  misc_feature (24)..(129): Homolog of NCBI NO: 15234262 NR Description: myb family transcription factor; protein id: supported by cDNA: gi_15375280, supported by cDNA: gi_15450989
  misc_feature (24)..(107): Homolog of NCBI NO: 7446174 NR Description: transcription factor MYB4 - Arabidopsis thaliana
  misc_feature (24)..(109): Homolog of NCBI NO: 28628949 NR Description: MYB2 [Dendrobium sp. XMW-2002-2]
  misc_feature (24)..(88): Homolog of NCBI NO: 9954739 NR Description: Putative myb transcription factor - partial
MRNFSITLPNMAMVAGVLSLNSRLERCGKSCRLRWINYLRPDLKRGAFSSEEQNLIVELHAVLGNRWSQIAARLPGRTDNEIKNLWNSCIKKKLMKKGIDPITHKPLSEVGKETNRSDNNNSTSFSSETNQDLFVKKTSDFAEYSAFQKEESNSVSLRNSLSSMIPTQFNIDDGSVSNAGFDTQVCVKPSIILLPPPNNTSSTVSGQDHVNVSEPNWESNSGTTSHLNNPGMEEMKWSEEYLNESLFSTQVYVKSETDFNSNIAFPWSQSQACDVFPKDLQRMAFSFGGQTL

SEQ ID NO: 84256 - protein, 282 aa, Arabidopsis thaliana
  peptide (1)..(282): Ceres Seq. ID no. 12673990
  misc_feature (35)..(80): Pfam Name: Myb-like DNA-binding domain Pfam Description: Myb-like DNA-binding domain
  misc_feature (1)..(282): Homolog of NCBI NO: 15223612 NR Description: myb family transcription factor; protein id: supported by cDNA: 250386. [Arabidopsis thaliana]
  misc_feature (43)..(282): Homolog of NCBI NO: 3941464 NR Description: putative transcription factor [Arabidopsis
  misc_feature (14)..(259): Homolog of NCBI NO: 22329445 NR Description: myb family transcription factor; protein id: supported by cDNA: gi_20465974 [Arabidopsis thaliana] putative transcription factor [Arabidopsis thaliana]
  misc_feature (14)..(259): Homolog of NCBI NO: 25294104 NR Description: hypothetical protein [imported] - Arabidopsis >gi|3482929|gb|AAC33214.1| Putative transcription factor
  misc_feature (14)..(120): Homolog of NCBI NO: 34902542 NR Description: putative transcription factor (myb) [Oryza sativa
  misc_feature (14)..(119): Homolog of NCBI NO: 7438352 NR Description: transcription factor MYB4 homolog T15B16.7 -
  misc_feature (14)..(119): Homolog of NCBI NO: 15234262 NR Description: myb family transcription factor; protein id: supported by cDNA: gi_15375280, supported by cDNA: gi_15450989
  misc_feature (14)..(97): Homolog of NCBI NO: 7446174 NR Description: transcription factor MYB4 - Arabidopsis thaliana
  misc_feature (14)..(99): Homolog of NCBI NO: 28628949 NR Description: MYB2 [Dendrobium sp. XMW-2002-2]
  misc_feature (14)..(78): Homolog of NCBI NO: 9954739 NR Description: Putative myb transcription factor - partial
MAMVAGVLSLNSRLERCGKSCRLRWINYLRPDLKRGAFSSEEQNLIVELHAVLGNRWSQIAARLPGRTDNEIKNLWNSCIKKKLMKKGIDPITHKPLSEVGKETNRSDNNNSTSFSSETNQDLFVKKTSDFAEYSAFQKEESNSVSLRNSLSSMIPTQFNIDDGSVSNAGFDTQVCVKPSIILLPPPNNTSSTVSGQDHVNVSEPNWESNSGTTSHLNNPGMEEMKWSEEYLNESLFSTQVYVKSETDFNSNIAFPWSQSQACDVFPKDLQRMAFSFGGQTL

SEQ ID NO: 84257 - protein, 280 aa, Arabidopsis thaliana
  peptide (1)..(280): Ceres Seq. ID no. 12673991
  misc_feature (33)..(78): Pfam Name: Myb-like DNA-binding domain Pfam Description: Myb-like DNA-binding domain
  misc_feature (1)..(280): Homolog of NCBI NO: 15223612 NR Description: myb family transcription factor; protein id: supported by cDNA: 250386. [Arabidopsis thaliana]
  misc_feature (41)..(280): Homolog of NCBI NO: 3941464 NR Description: putative transcription factor [Arabidopsis
  misc_feature (12)..(257): Homolog of NCBI NO: 22329445 NR Description: myb family transcription factor; protein id: supported by cDNA: gi_20465974 [Arabidopsis thaliana] putative transcription factor [Arabidopsis thaliana]
  misc_feature (12)..(257): Homolog of NCBI NO: 25294104 NR Description: hypothetical protein [imported] - Arabidopsis >gi|3482929|gb|AAC33214.1| Putative transcription factor
  misc_feature (12)..(118): Homolog of NCBI NO: 34902542 NR Description: putative transcription factor (myb) [Oryza sativa
  misc_feature (12)..(117): Homolog of NCBI NO: 7438352 NR Description: transcription factor MYB4 homolog T15B16.7 -
  misc_feature (12)..(117): Homolog of NCBI NO: 15234262 NR Description: myb family transcription factor; protein id: supported by cDNA: gi_15375280, supported by cDNA: gi_15450989
  misc_feature (12)..(95): Homolog of NCBI NO: 7446174 NR Description: transcription factor MYB4 - Arabidopsis thaliana
  misc_feature (12)..(97): Homolog of NCBI NO: 28628949 NR Description: MYB2 [Dendrobium sp. XMW-2002-2]
  misc_feature (12)..(76): Homolog of NCBI NO: 9954739 NR Description: Putative myb transcription factor - partial
MVAGVLSLNSRLERCGKSCRLRWINYLRPDLKRGAFSSEEQNLIVELHAVLGNRWSQIAARLPGRTDNEIKNLWNSCIKKKLMKKGIDPITHKPLSEVGKETNRSDNNNSTSFSSETNQDLFVKKTSDFAEYSAFQKEESNSVSLRNSLSSMIPTQFNIDDGSVSNAGFDTQVCVKPSIILLPPPNNTSSTVSGQDHVNVSEPNWESNSGTTSHLNNPGMEEMKWSEEYLNESLFSTQVYVKSETDFNSNIAFPWSQSQACDVFPKDLQRMAFSFGGQTL

SEQ ID NO: 84258 - DNA, 526 bp, Arabidopsis thaliana
  misc_feature (1)..(526): Ceres Seq. ID no. 12673992
  misc_feature: MA Experiment ID: 108434 Result: Up-regulated in Transcription
  misc_feature: MA Experiment 108434 PARAMETER Experiment Name: At_Root_Tips_cDNA_P Parameter: Tissue Value: Root Tips
  misc_feature: MA Experiment ID: 108462 Result: Down-regulated in Transcription
  misc_feature: MA Experiment 108462 PARAMETER Experiment Name: At_Germinating_Seeds_cDNA_P Parameter: Age (day) Value: 2 vs. 0
  misc_feature: MA Experiment 108462 PARAMETER Experiment Name: At_Germinating_Seeds_cDNA_P Parameter: Tissue Value: Germinating Seeds
  misc_feature: MA Experiment ID: 108463 Result: Down-regulated in Transcription
  misc_feature: MA Experiment 108463 PARAMETER Experiment Name: At_Germinating_Seeds_cDNA_P Parameter: Age (day) Value: 3 vs. 0
  misc_feature: MA Experiment 108463 PARAMETER Experiment Name: At_Germinating_Seeds_cDNA_P Parameter: Tissue Value: Germinating Seeds
  misc_feature: MA Experiment ID: 108464 Result: Down-regulated in Transcription
  misc_feature: MA Experiment 108464 PARAMETER Experiment Name: At_Germinating_Seeds_cDNA_P Parameter: Age (day) Value: 4 vs. 0
  misc_feature: MA Experiment 108464 PARAMETER Experiment Name: At_Germinating_Seeds_cDNA_P Parameter: Tissue Value: Germinating Seeds
  misc_feature: MA Experiment ID: 108573 Result: Down-regulated in Transcription
  misc_feature: MA Experiment 108573 PARAMETER Experiment Name: At_Drought_cDNA_P Parameter: Timepoint (hr) Value: 6
  misc_feature: MA Experiment 108573 PARAMETER Experiment Name: At_Drought_cDNA_P Parameter: Tissue Value: Aerial
  misc_feature: MA Experiment 108573 PARAMETER Experiment Name: At_Drought_cDNA_P Parameter: Treatment Value: Drought vs. No Drought
  misc_feature: MA Experiment ID: 20001807 Result: Up-regulated in Transcription
  misc_feature: MA Experiment 20001807 PARAMETER Experiment Name: At_50mM_NH4NO3_L-to-H_Sub_P Parameter: Timepoint (hr) Value: 6
  misc_feature: MA Experiment 20001807 PARAMETER Experiment Name: At_50mM_NH4NO3_L-to-H_Sub_P Parameter: Tissue Value: Leaf
  misc_feature: MA Experiment 20001807 PARAMETER Experiment Name: At_50mM_NH4NO3_L-to-H_Sub_P Parameter: Treatment Value: 50mM NH4NO3 vs 100mM Mannitol
atgccggcgggacacggagtgagggcgagaacaagagatctgttcgcgagaccattcaggaagaagggttatattccactctccacttacctcagaaccttcaaggtcggcgattacgtcgatgtcaaggttaatggagctatccacaagggtatgcctcataagttctaccatggtcgtactggtcgcatctggaatgtcactaagcgtgccgttggtgttgaagtcaacaaacagattgggaacagaatcataaggaagaggatacatgtgcgtgtggagcatgtgcaacagtcaaggtgtgctgaggagtttaaactcagaaagaagcagaacgatgtgcttaaggctgatgctaaagccagaggagagactatcagcaccaagagacagcctaaaggtcctaaaccgggtttcatggtcgaaggtatgacattggagactgtcactcccattccttacgatgttgtcaacgatctcaagggtggttattgagttttttccattttattatcattctctactc

SEQ ID NO: 84259 - protein, 164 aa, Arabidopsis thaliana; identical to SEQ ID NO: 20517
  peptide (1)..(164): Ceres Seq. ID no. 12673993
  misc_feature (2)..(100): Pfam Name: Ribosomal protein L21e Pfam Description: Ribosomal protein L21e
  misc_feature (1)..(164): Homolog of NCBI NO: 18406015 NR Description: 60S ribosomal protein L21, putative; protein id: supported by cDNA: 28545., supported by cDNA: gi_15292812, by cDNA: gi_20258868 [Arabidopsis thaliana]
  misc_feature (1)..(164): Homolog of NCBI NO: 18391042 NR Description: putative 60S ribosomal protein L21; protein id: supported by cDNA: gi_13877928, supported by cDNA: gi_16323461 thaliana] >gi|18391054|ref|NP_563849.1| putative 60S come from
  misc_feature (1)..(164): Homolog of NCBI NO: 37535194 NR Description: 60S ribosomal protein L21 [Oryza sativa (japonica group)] >gi|13489167|gb|AAK27801.1| 60S ribosomal protein L21
  misc_feature (1)..(164): Homolog of NCBI NO: 11276828 NR Description: ribosomal protein L21 [imported] - rice
  misc_feature (1)..(155): Homolog of NCBI NO: 6094029 NR Description: 60S RIBOSOMAL PROTEIN L21
  misc_feature (1)..(157): Homolog of NCBI NO: 15213768 NR Description: ribosomal protein L21 [Spodoptera frugiperda]
  misc_feature (1)..(155): Homolog of NCBI NO: 6319668 NR Description: Homology to rat L21; Rpl21ap [Saccharomyces
  misc_feature (1)..(157): Homolog of NCBI NO: 20129705 NR Description: CG12775-PA [Drosophila melanogaster]
  misc_feature (1)..(155): Homolog of NCBI NO: 6325178 NR Description: Homology to rat L21; Rpl21bp [Saccharomyces
  misc_feature (1)..(157): Homolog of NCBI NO: 38048363 NR Description: similar to Drosophila melanogaster CG12775

SEQ ID NO: 84260 - protein, 113 aa, Arabidopsis thaliana; identical to SEQ ID NO: 20518
  peptide (1)..(113): Ceres Seq. ID no. 12673994
  misc_feature (1)..(113): Homolog of NCBI NO: 18406015 NR Description: 60S ribosomal protein L21, putative; protein id: supported by cDNA: 28545., supported by cDNA: gi_15292812, by cDNA: gi_20258868 [Arabidopsis thaliana]
  misc_feature (1)..(113): Homolog of NCBI NO: 18391042 NR Description: putative 60S ribosomal protein L21; protein id: supported by cDNA: gi_13877928, supported by cDNA: gi_16323461 thaliana] >gi|18391054|ref|NP_563849.1| putative 60S come from
  misc_feature (1)..(113): Homolog of NCBI NO: 37535194 NR Description: 60S ribosomal protein L21 [Oryza sativa (japonica group)] >gi|13489167|gb|AAK27801.1| 60S ribosomal protein L21
  misc_feature (1)..(113): Homolog of NCBI NO: 11276828 NR Description: ribosomal protein L21 [imported] - rice
  misc_feature (1)..(104): Homolog of NCBI NO: 6094029 NR Description: 60S RIBOSOMAL PROTEIN L21
  misc_feature (1)..(106): Homolog of NCBI NO: 15213768 NR Description: ribosomal protein L21 [Spodoptera frugiperda]
  misc_feature (1)..(104): Homolog of NCBI NO: 6319668 NR Description: Homology to rat L21; Rpl21ap [Saccharomyces
  misc_feature (1)..(106): Homolog of NCBI NO: 20129705 NR Description: CG12775-PA [Drosophila melanogaster]
  misc_feature (1)..(104): Homolog of NCBI NO: 6325178 NR Description: Homology to rat L21; Rpl21bp [Saccharomyces
  misc_feature (1)..(106): Homolog of NCBI NO: 38048363 NR Description: similar to Drosophila melanogaster CG12775

SEQ ID NO: 84261 - DNA, 1071 bp, Arabidopsis thaliana
  misc_feature (1)..(1071): Ceres Seq. ID no. 12674025
  misc_feature: MA Experiment ID: 20000185 Result: Up-regulated in Transcription
  misc_feature: MA Experiment 20000185 PARAMETER Experiment Name: At_Roots__P Parameter: Age (day) Value: 7 vs. 21
  misc_feature: MA Experiment 20000185 PARAMETER Experiment Name: At_Roots__P Parameter: Organism Value: A. thaliana
  misc_feature: MA Experiment 20000185 PARAMETER Experiment Name: At_Roots__P Parameter: Tissue Value: Roots vs. Whole Plant
  misc_feature: MA Experiment ID: 20000227 Result: Up-regulated in Transcription
  misc_feature: MA Experiment 20000227 PARAMETER Experiment Name: At_Root-Tips-vs-Tops_P Parameter: Tissue Value: Root Tips vs. Root Tops
  misc_feature: MA Experiment ID: 20000437 Result: Down-regulated in Transcription
  misc_feature: MA Experiment 20000437 PARAMETER Experiment Name: At_Drought_P Parameter: Age (day) Value: 8
  misc_feature: MA Experiment 20000437 PARAMETER Experiment Name: At_Drought_P Parameter: Organism Value: A. thaliana
  misc_feature: MA Experiment 20000437 PARAMETER Experiment Name: At_Drought_P Parameter: Plant Line Value: WS
  misc_feature: MA Experiment 20000437 PARAMETER Experiment Name: At_Drought_P Parameter: Timepoint (hr) Value: 24
  misc_feature: MA Experiment 20000437 PARAMETER Experiment Name: At_Drought_P Parameter: Tissue Value: Whole Plant
  misc_feature: MA Experiment 20000437 PARAMETER Experiment Name: At_Drought_P Parameter: Treatment Value: Drought vs. No Drought
  misc_feature: MA Experiment ID: 20000794 Result: Down-regulated in Transcription
  misc_feature: MA Experiment 20000794 PARAMETER Experiment Name: At_Petals_P Parameter: Age (day) Value: 23-25 days
  misc_feature: MA Experiment 20000794 PARAMETER Experiment Name: At_Petals_P Parameter: Plant Line Value: WS
  misc_feature: MA Experiment 20000794 PARAMETER Experiment Name: At_Petals_P Parameter: Tissue Value: Petals vs. Whole plant
  misc_feature: MA Experiment ID: 20001451 Result: Down-regulated in Transcription
  misc_feature: MA Experiment 20001451 PARAMETER Experiment Name: At_Far-red-induction_P Parameter: Age (day) Value: 7
  misc_feature: MA Experiment 20001451 PARAMETER Experiment Name: At_Far-red-induction_P Parameter: Light Value: Far-red vs. White
  misc_feature: MA Experiment 20001451 PARAMETER Experiment Name: At_Far-red-induction_P Parameter: Organism Value: A. thaliana
  misc_feature: MA Experiment 20001451 PARAMETER Experiment Name: At_Far-red-induction_P Parameter: Plant Line Value: Columbia
  misc_feature: MA Experiment 20001451 PARAMETER Experiment Name: At_Far-red-induction_P Parameter: Timepoint (hr) Value: 24
  misc_feature: MA Experiment 20001451 PARAMETER Experiment Name: At_Far-red-induction_P Parameter: Tissue Value: Whole Plant
  misc_feature: MA Experiment ID: 20001557 Result: Up-regulated in Transcription
  misc_feature: MA Experiment 20001557 PARAMETER Experiment Name: At_Drought_Soil_Dry_P Parameter: Age (day) Value: 27
  misc_feature: MA Experiment 20001557 PARAMETER Experiment Name: At_Drought_Soil_Dry_P Parameter: Organism Value: A. thaliana
  misc_feature: MA Experiment 20001557 PARAMETER Experiment Name: At_Drought_Soil_Dry_P Parameter: Plant Line Value: WS
  misc_feature: MA Experiment 20001557 PARAMETER Experiment Name: At_Drought_Soil_Dry_P Parameter: Post Timepoint (hr) Value: 3
  misc_feature: MA Experiment 20001557 PARAMETER Experiment Name: At_Drought_Soil_Dry_P Parameter: Post-Treatment Value: Re-Water vs. No Drought
  misc_feature: MA Experiment 20001557 PARAMETER Experiment Name: At_Drought_Soil_Dry_P Parameter: Timepoint (day) Value: 13
  misc_feature: MA Experiment 20001557 PARAMETER Experiment Name: At_Drought_Soil_Dry_P Parameter: Treatment Value: Drought vs. No Drought
  misc_feature: MA Experiment ID: 20001558 Result: Up-regulated in Transcription
  misc_feature: MA Experiment 20001558 PARAMETER Experiment Name: At_Drought_Soil_Dry_P Parameter: Age (day) Value: 27
  misc_feature: MA Experiment 20001558 PARAMETER Experiment Name: At_Drought_Soil_Dry_P Parameter: Organism Value: A. thaliana
  misc_feature: MA Experiment 20001558 PARAMETER Experiment Name: At_Drought_Soil_Dry_P Parameter: Plant Line Value: WS
  misc_feature: MA Experiment 20001558 PARAMETER Experiment Name: At_Drought_Soil_Dry_P Parameter: Post Timepoint (hr) Value: 6
  misc_feature: MA Experiment 20001558 PARAMETER Experiment Name: At_Drought_Soil_Dry_P Parameter: Post-Treatment Value: Re-Water vs. No Drought
  misc_feature: MA Experiment 20001558 PARAMETER Experiment Name: At_Drought_Soil_Dry_P Parameter: Timepoint (day) Value: 13
  misc_feature: MA Experiment 20001558 PARAMETER Experiment Name: At_Drought_Soil_Dry_P Parameter: Treatment Value: Drought vs. No Drought
  misc_feature: MA Experiment ID: 20001560 Result: Up-regulated in Transcription
  misc_feature: MA Experiment 20001560 PARAMETER Experiment Name: At_Drought_Soil_Dry_P Parameter: Age (day) Value: 28
  misc_feature: MA Experiment 20001560 PARAMETER Experiment Name: At_Drought_Soil_Dry_P Parameter: Organism Value: A. thaliana
  misc_feature: MA Experiment 20001560 PARAMETER Experiment Name: At_Drought_Soil_Dry_P Parameter: Plant Line Value: WS
  misc_feature: MA Experiment 20001560 PARAMETER Experiment Name: At_Drought_Soil_Dry_P Parameter: Post Timepoint (hr) Value: None
  misc_feature: MA Experiment 20001560 PARAMETER Experiment Name: At_Drought_Soil_Dry_P Parameter: Post-Treatment Value: None
  misc_feature: MA Experiment 20001560 PARAMETER Experiment Name: At_Drought_Soil_Dry_P Parameter: Timepoint (day) Value: 14
  misc_feature: MA Experiment 20001560 PARAMETER Experiment Name: At_Drought_Soil_Dry_P Parameter: Treatment Value: Drought vs. No Drought
  misc_feature: MA Experiment ID: 20001757 Result: Up-regulated in Transcription
  misc_feature: MA Experiment 20001757 PARAMETER Experiment Name: At_50mM_NH4NO3_L-to-H_P Parameter: Timepoint (hr) Value: 6
  misc_feature: MA Experiment 20001757 PARAMETER Experiment Name: At_50mM_NH4NO3_L-to-H_P Parameter: Tissue Value: Leaf
  misc_feature: MA Experiment 20001757 PARAMETER Experiment Name: At_50mM_NH4NO3_L-to-H_P Parameter: Treatment Value: 50mM NH4NO3 vs 100mM Mannitol
agggtttttctctgaggaagaagcgtttcatttctctgaatttcatcgaaaatggcggaaagaggaggagaaggcggcgcagagcgtggcggtgaccgtggtgacttcggacgtggattcggcggtggacgtggaggtggccgtggccgtgatcgtggtccaagaggccgtggaagacgtggaggccgtgcctcggaagaaacgaaatgggttccagtgaccaaactaggtcgtctagtggctgacaataaaataacgaagctagagcagatctatctccattctctcccagtaaaggagtaccaaatcatagatcatcttgttggtcctacgttgaaagacgaggttatgaagatcatgcctgttcagaaacaaaccagagctggtcaaaggactagattcaaggcctttgttgttgttggtgatggtaatggtcatgttggtttgggtgtcaagtgttctaaggaagttgctactgccattagaggagctattattcttgctaagctctctgttgttccggtgaggagaggttactgggggaataagattgggaagccacacactgtgccttgtaaggttactgggaagtgtggctctgttactgtgagaatggttcctgctccgagaggttctggtattgttgctgctagggttcctaagaaggttcttcagttcgctggtattgatgatgtctttacttcttccagaggatctactaaaactcttggaaactttgtcaaggcgacgtttgactgcttacagaagacatatgggttccttacaccagagttctggaaagagactagattctccagatcgccctaccaagagcacactgatttcttgtcgactaaggctgtttctgcaaccaaggttatcacggagggtgaagaccaagcttaagaccttcatgagataagttttggttgttcttaatactaattcctactttgaaaaagagtatttttttttcttgattatctatgagttttgttattggtggtttcgttactgttttggattttgttagatgtttgccttaatgcaaatttcaatgaaatagctttt

SEQ ID NO: 84262 - protein, 284 aa, Arabidopsis thaliana; identical to SEQ ID NO: 38082
  peptide (1)..(284): Ceres Seq. ID no. 12674026
  misc_feature (177)..(250): Pfam Name: Ribosomal protein S5, C-terminal domain Pfam Description: Ribosomal protein S5, C-terminal domain
  misc_feature (1)..(284): Homolog of NCBI NO: 15217951 NR Description: ribosomal protein S2, putative; protein id: [Arabidopsis thaliana] >gi|11276533|pir||T50673 ribosomal protein
  misc_feature (1)..(284): Homolog of NCBI NO: 21618011 NR Description: ribosomal protein S2, putative [Arabidopsis
  misc_feature (1)..(284): Homolog of NCBI NO: 18406325 NR Description: ribosomal protein S2, putative; protein id: supported by cDNA: gi_18086425 [Arabidopsis thaliana] ribosomal protein S2, putative; protein id: At1g59359.1
  misc_feature (1)..(284): Homolog of NCBI NO: 21539457 NR Description: ribosomal protein S2, putative [Arabidopsis
  misc_feature (3)..(284): Homolog of NCBI NO: 25294520 NR Description: hypothetical protein RF12 [imported] - thaliana (fragment) >gi|6566279|dbj|BAA88264.1| similar to
  misc_feature (1)..(284): Homolog of NCBI NO: 15227443 NR Description: 40S ribosomal protein S2; protein id: supported by cDNA: 17415., supported by cDNA: gi_15081714 thaliana] >gi|3915847|sp|P49688|RS2_ARATH 40S ribosomal protein
  misc_feature (1)..(284): Homolog of NCBI NO: 21553851 NR Description: 40S ribosomal protein S2 [Arabidopsis thaliana]
  misc_feature (1)..(279): Homolog of NCBI NO: 15230312 NR Description: 40S ribosomal protein S2 homolog; protein id: supported by cDNA: 101250. [Arabidopsis thaliana]
  misc_feature (1)..(231): Homolog of NCBI NO: 8979936 NR Description: Identical to gene XW6 from Arabidopsis thaliana and contains a Ribosomal protein S5 PF|00333 domain. ESTs
  misc_feature (1)..(267): Homolog of NCBI NO: 34393314 NR Description: putative 40S ribosomal protein S2 [Oryza sativa

SEQ ID NO: 84263 - protein, 185 aa, Arabidopsis thaliana; identical to SEQ ID NO: 38083
  peptide (1)..(185): Ceres Seq. ID no. 12674027
  misc_feature (78)..(151): Pfam Name: Ribosomal protein S5, C-terminal domain Pfam Description: Ribosomal protein S5, C-terminal domain
  misc_feature (1)..(185): Homolog of NCBI NO: 15217951 NR Description: ribosomal protein S2, putative; protein id: [Arabidopsis thaliana] >gi|11276533|pir||T50673 ribosomal protein
  misc_feature (1)..(185): Homolog of NCBI NO: 21618011 NR Description: ribosomal protein S2, putative [Arabidopsis
  misc_feature (1)..(185): Homolog of NCBI NO: 18406325 NR Description: ribosomal protein S2, putative; protein id: supported by cDNA: gi_18086425 [Arabidopsis thaliana] ribosomal protein S2, putative; protein id: At1g59359.1
  misc_feature (1)..(185): Homolog of NCBI NO: 21539457 NR Description: ribosomal protein S2, putative [Arabidopsis
  misc_feature (1)..(185): Homolog of NCBI NO: 25294520 NR Description: hypothetical protein RF12 [imported] - thaliana (fragment) >gi|6566279|dbj|BAA88264.1| similar to
  misc_feature (1)..(185): Homolog of NCBI NO: 15227443 NR Description: 40S ribosomal protein S2; protein id: supported by cDNA: 17415., supported by cDNA: gi_15081714 thaliana] >gi|3915847|sp|P49688|RS2_ARATH 40S ribosomal protein
  misc_feature (1)..(185): Homolog of NCBI NO: 21553851 NR Description: 40S ribosomal protein S2 [Arabidopsis thaliana]
  misc_feature (1)..(180): Homolog of NCBI NO: 15230312 NR Description: 40S ribosomal protein S2 homolog; protein id: supported by cDNA: 101250. [Arabidopsis thaliana]
  misc_feature (1)..(132): Homolog of NCBI NO: 8979936 NR Description: Identical to gene XW6 from Arabidopsis thaliana and contains a Ribosomal protein S5 PF|00333 domain. ESTs
  misc_feature (1)..(168): Homolog of NCBI NO: 34393314 NR Description: putative 40S ribosomal protein S2 [Oryza sativa

SEQ ID NO: 84264 - protein, 182 aa, Arabidopsis thaliana; identical to SEQ ID NO: 38084
  peptide (1)..(182): Ceres Seq. ID no. 12674028
  misc_feature (75)..(148): Pfam Name: Ribosomal protein S5, C-terminal domain Pfam Description: Ribosomal protein S5, C-terminal domain
  misc_feature (1)..(182): Homolog of NCBI NO: 15217951 NR Description: ribosomal protein S2, putative; protein id: [Arabidopsis thaliana] >gi|11276533|pir||T50673 ribosomal protein
  misc_feature (1)..(182): Homolog of NCBI NO: 21618011 NR Description: ribosomal protein S2, putative [Arabidopsis
  misc_feature (1)..(182): Homolog of NCBI NO: 18406325 NR Description: ribosomal protein S2, putative; protein id: supported by cDNA: gi_18086425 [Arabidopsis thaliana] ribosomal protein S2, putative; protein id: At1g59359.1
  misc_feature (1)..(182): Homolog of NCBI NO: 21539457 NR Description: ribosomal protein S2, putative [Arabidopsis
  misc_feature (1)..(182): Homolog of NCBI NO: 25294520 NR Description: hypothetical protein RF12 [imported] - thaliana (fragment) >gi|6566279|dbj|BAA88264.1| similar to
  misc_feature (1)..(182): Homolog of NCBI NO: 15227443 NR Description: 40S ribosomal protein S2; protein id: supported by cDNA: 17415., supported by cDNA: gi_15081714 thaliana] >gi|3915847|sp|P49688|RS2_ARATH 40S ribosomal protein
  misc_feature (1)..(182): Homolog of NCBI NO: 21553851 NR Description: 40S ribosomal protein S2 [Arabidopsis thaliana]
  misc_feature (1)..(177): Homolog of NCBI NO: 15230312 NR Description: 40S ribosomal protein S2 homolog; protein id: supported by cDNA: 101250. [Arabidopsis thaliana]
  misc_feature (1)..(129): Homolog of NCBI NO: 8979936 NR Description: Identical to gene XW6 from Arabidopsis thaliana and contains a Ribosomal protein S5 PF|00333 domain. ESTs
  misc_feature (1)..(165): Homolog of NCBI NO: 34393314 NR Description: putative 40S ribosomal protein S2 [Oryza sativa

SEQ ID NO: 84265 - DNA, 1312 bp, Arabidopsis thaliana
  misc_feature (1)..(1312): Ceres Seq. ID no. 12674047
  misc_feature: MA Experiment ID: 108595 Result: Down-regulated in Transcription
  misc_feature: MA Experiment 108595 PARAMETER Experiment Name: At_Ler-pi_Ovule_cDNA_P Parameter: Plant Line Value: null
  misc_feature: MA Experiment ID: 20000179 Result: Up-regulated in Transcription
  misc_feature: MA Experiment 20000179 PARAMETER Experiment Name: At_Germinating_Seeds_P Parameter: Age (hr) Value: 6 vs. 0
  misc_feature: MA Experiment 20000179 PARAMETER Experiment Name: At_Germinating_Seeds_P Parameter: Tissue Value: Germinating Seeds
  misc_feature: MA Experiment ID: 20000265 Result: Up-regulated in Transcription
  misc_feature: MA Experiment 20000265 PARAMETER Experiment Name: At_Open_Flower_P Parameter: Age (day) Value: 21
  misc_feature: MA Experiment 20000265 PARAMETER Experiment Name: At_Open_Flower_P Parameter: Plant Line Value: WS
  misc_feature: MA Experiment 20000265 PARAMETER Experiment Name: At_Open_Flower_P Parameter: Tissue Value: Closed Flower vs. Whole Plant
  misc_feature: MA Experiment ID: 20000495 Result: Up-regulated in Transcription
  misc_feature: MA Experiment 20000495 PARAMETER Experiment Name: At_Guard_Cells_P Parameter: Harvest Date Value: 8/2/2002
  misc_feature: MA Experiment 20000495 PARAMETER Experiment Name: At_Guard_Cells_P Parameter: Organism Value: A. thaliana
  misc_feature: MA Experiment 20000495 PARAMETER Experiment Name: At_Guard_Cells_P Parameter: Tissue Value: Guard Cells vs. Leaves
gagagaaacaatgggagacgctgcgatccgtaccgtcgtcgaagccattcactcatctccgacgcaggccgtcgtctatctttgcggcggtgcctctctggctttaggttggttgatgtcggttcctggagcgtcgaacacgcttctcgagtccgtggttccttattcgagagtatctatggttcaattactcggcagggttccgagccaacactgtagccaagcattggccaaggagatggccttgttagcctacaatcgggcgcttaagctctctaaaccaggatatccggttctcggtgtcgggtttacgggatcattggtaacttctcgtcctaagcgtggagatcacaggttctttttgtctatgagagcatccgaccggattttggaatcttcagtcactctaactaagaacttacggagccgagaagaagaagataaggtgtcaagctgtgcactgatccaggctatggccaaggcatgccaagtttctgggacacttgactctggcttgaccgagtctgaggtgccttatgagtctgaaacccactttactgaagaacaagaactagagcagcttataaatgggcacttgtgctgtaagatttatccattttctggggaagcacacgggtctgatgaagacagaaagattatactacctggctcttttaacccattacatgaaggtcatctcaagctgttagaagttgctatgagtgtttgtgggggcggctacccatgttttgaaatatccgcaataaatgccgacaaaccaccgcttacaattgcacagattaaagatcgtgtcaagcaatttgaagtagttggaaagacgataatagtttcaaatcagccatacttctacaagaaagctgaactcttcccaggaagcagttttgtaattggcgctgacactgcagcgaggcttgtcaatccaaagtactatgaaggaagcatcaaaaggatgttggagatacttggtgattgcaaacggacaggttgcactttccttgttggtggccgcaatgtagatggtgtatttaaggttcttgaagatgttgatattccagaggaaataatcgacatgtttatttcaattccagcagatatattccggatggatatatcctctacagagataagaaaaaaacaagggggtggtacgaactaatgacttctcaacccgcttgaaagtcttggctcgcaagacaatttatttagtgcagttactttttgatttgatatgtattgtgttgcattctgttcttattatggaatccggatcaatggtatgagcatttgcaca

SEQ ID NO: 84266 - protein, 391 aa, Arabidopsis thaliana
  peptide (1)..(391): Ceres Seq. ID no. 12674048
  misc_feature (4)..(391): Homolog of NCBI NO: 30677893 NR Description: expressed protein [Arabidopsis thaliana]
  misc_feature (4)..(391): Homolog of NCBI NO: 26451899 NR Description: unknown protein [Arabidopsis thaliana]
  misc_feature (4)..(391): Homolog of NCBI NO: 30677890 NR Description: expressed protein [Arabidopsis thaliana]
  misc_feature (4)..(391): Homolog of NCBI NO: 21537099 NR Description: unknown [Arabidopsis thaliana]
  misc_feature (4)..(388): Homolog of NCBI NO: 15232221 NR Description: unknown protein; protein id: At3g27610.1
  misc_feature (4)..(388): Homolog of NCBI NO: 9294466 NR Description: gb|AAD14522.1~gene_id:MGF10.2~similar to unknown
  misc_feature (154)..(274): Homolog of NCBI NO: 34911372 NR Description: P0034C09.17 [Oryza sativa (japonica
  misc_feature (9)..(99): Homolog of NCBI NO: 34911372 NR Description: P0034C09.17 [Oryza sativa (japonica
  misc_feature (314)..(387): Homolog of NCBI NO: 34911372 NR Description: P0034C09.17 [Oryza sativa (japonica
  misc_feature (4)..(156): Homolog of NCBI NO: 25371182 NR Description: hypothetical protein At2g01220 [imported] - thaliana >gi|4262229|gb|AAD14522.1| unknown protein [Arabidopsis
RETMGDAAIRTVVEAIHSSPTQAVVYLCGGASLALGWLMSVPGASNTLLESVVPYSRVSMVQLLGRVPSQHCSQALAKEMALLAYNRALKLSKPGYPVLGVGFTGSLVTSRPKRGDHRFFLSMRASDRILESSVTLTKNLRSREEEDKVSSCALIQAMAKACQVSGTLDSGLTESEVPYESETHFTEEQELEQLINGHLCCKIYPFSGEAHGSDEDRKIILPGSFNPLHEGHLKLLEVAMSVCGGGYPCFEISAINADKPPLTIAQIKDRVKQFEVVGKTIIVSNQPYFYKKAELFPGSSFVIGADTAARLVNPKYYEGSIKRMLEILGDCKRTGCTFLVGGRNVDGVFKVLEDVDIPEEIIDMFISIPADIFRMDISSTEIRKKQGGGTN

SEQ ID NO: 84267 - protein, 388 aa, Arabidopsis thaliana; identical to SEQ ID NO: 39949
  peptide (1)..(388): Ceres Seq. ID no. 12674049
  misc_feature (1)..(388): Homolog of NCBI NO: 30677893 NR Description: expressed protein [Arabidopsis thaliana]
  misc_feature (1)..(388): Homolog of NCBI NO: 26451899 NR Description: unknown protein [Arabidopsis thaliana]
  misc_feature (1)..(388): Homolog of NCBI NO: 30677890 NR Description: expressed protein [Arabidopsis thaliana]
  misc_feature (1)..(388): Homolog of NCBI NO: 21537099 NR Description: unknown [Arabidopsis thaliana]
  misc_feature (1)..(385): Homolog of NCBI NO: 15232221 NR Description: unknown protein; protein id: At3g27610.1
  misc_feature (1)..(385): Homolog of NCBI NO: 9294466 NR Description: gb|AAD14522.1~gene_id:MGF10.2~similar to unknown
  misc_feature (151)..(271): Homolog of NCBI NO: 34911372 NR Description: P0034C09.17 [Oryza sativa (japonica
  misc_feature (6)..(96): Homolog of NCBI NO: 34911372 NR Description: P0034C09.17 [Oryza sativa (japonica
  misc_feature (311)..(384): Homolog of NCBI NO: 34911372 NR Description: P0034C09.17 [Oryza sativa (japonica
  misc_feature (1)..(153): Homolog of NCBI NO: 25371182 NR Description: hypothetical protein At2g01220 [imported] - thaliana >gi|4262229|gb|AAD14522.1| unknown protein [Arabidopsis

SEQ ID NO: 84268 - protein, 353 aa, Arabidopsis thaliana; identical to SEQ ID NO: 39950
  peptide (1)..(353): Ceres Seq. ID no. 12674050
  misc_feature (1)..(353): Homolog of NCBI NO: 30677893 NR Description: expressed protein [Arabidopsis thaliana]
  misc_feature (1)..(353): Homolog of NCBI NO: 26451899 NR Description: unknown protein [Arabidopsis thaliana]
  misc_feature (1)..(353): Homolog of NCBI NO: 30677890 NR Description: expressed protein [Arabidopsis thaliana]
  misc_feature (1)..(353): Homolog of NCBI NO: 21537099 NR Description: unknown [Arabidopsis thaliana]
  misc_feature (1)..(350): Homolog of NCBI NO: 15232221 NR Description: unknown protein; protein id: At3g27610.1
  misc_feature (1)..(350): Homolog of NCBI NO: 9294466 NR Description: gb|AAD14522.1~gene_id:MGF10.2~similar to unknown
  misc_feature (116)..(236): Homolog of NCBI NO: 34911372 NR Description: P0034C09.17 [Oryza sativa (japonica
  misc_feature (1)..(61): Homolog of NCBI NO: 34911372 NR Description: P0034C09.17 [Oryza sativa (japonica
  misc_feature (276)..(349): Homolog of NCBI NO: 34911372 NR Description: P0034C09.17 [Oryza sativa (japonica
  misc_feature (1)..(118): Homolog of NCBI NO: 25371182 NR Description: hypothetical protein At2g01220 [imported] - thaliana >gi|4262229|gb|AAD14522.1| unknown protein [Arabidopsis

SEQ ID NO: 84269 - DNA, 828 bp, Arabidopsis thaliana
  misc_feature (1)..(828): Ceres Seq. ID no. 12674057
  misc_feature: MA Experiment ID: 20000227 Result: Down-regulated in Transcription
  misc_feature: MA Experiment 20000227 PARAMETER Experiment Name: At_Root-Tips-vs-Tops_P Parameter: Tissue Value: Root Tips vs. Root Tops
atgataaaactactatttacgtacatatgcacatacacatataaactatatgctctatatcatatggattacgcatgcgtgtgtatgtataaatataaaggcatcgtcacgcttcaagtttgtctcttttatattaaactgagagttttcctctcaaactttaccttttcttcttcgatcctagctcttaagaaccctaataattcattgatcaaaataatggcgattttgccggaaaactcttcaaacttggatcttactatctccgttccaggcttctcttcatcccctctctccgatgaaggaagtggcggaggaagagaccagctaaggctagacatgaatcggttaccgtcgtctgaagacggagacgatgaagaattcagtcacgatgatggctctgctcctccgcgaaagaaactccgtctaaccagagaacagtcacgtcttcttgaagatagtttcagacagaatcatacccttaatcccaaacaaaaggaagtacttgccaagcatttgatgctacggccaagacaaattgaagtttggtttcaaaaccgtagagcaaggagcaaattgaagcaaaccgagatggaatgcgagtatctcaaaaggtggtttggttcattaacggaagaaaaccacaggctccatagagaagtagaagagcttagagccatgaaggttggcccaacaacggtgaactctgcctcgagccttactatgtgtcctcgctgcgagcgagttacccctgccgcgagcccttcgagggcggtggtgccggttccggctaagaaaacgtttccgccgcaagagcgtgatcgttga

SEQ ID NO: 84270 - protein, 275 aa, Arabidopsis thaliana
  peptide (1)..(275): Ceres Seq. ID no. 12674058
  misc_feature (137)..(193): Pfam Name: Homeobox domain Pfam Description: Homeobox domain
  misc_feature (1)..(275): Homolog of NCBI NO: 30677923 NR Description: homeodomain-leucine zipper protein ATHB-17
  misc_feature (114)..(275): Homolog of NCBI NO: 25386214 NR Description: probable homeodomain transcription factor - Arabidopsis thaliana >gi|3785973|gb|AAC67320.1| putative
  misc_feature (82)..(264): Homolog of NCBI NO: 5006851 NR Description: homeodomain leucine zipper protein [Oryza sativa]
  misc_feature (82)..(264): Homolog of NCBI NO: 34911664 NR Description: putative homeodomain-leucine zipper [Oryza sativa
  misc_feature (74)..(259): Homolog of NCBI NO: 30698765 NR Description: homeodomain-leucine zipper protein, putative thaliana] >gi|26451347|dbj|BAC42774.1| unknown protein thaliana] >gi|28973379|gb|AAO64014.1| putative homeodomain
  misc_feature (57)..(256): Homolog of NCBI NO: 12230908 NR Description: Homeobox-leucine zipper protein HAT14 (HD-ZIP leucine zipper protein~gene_id:MPH15.6 [Arabidopsis thaliana]
  misc_feature (57)..(256): Homolog of NCBI NO: 22326632 NR Description: homeobox-leucine zipper protein HAT14 (HD-Zip
  misc_feature (57)..(256): Homolog of NCBI NO: 29028870 NR Description: At5g06710 [Arabidopsis thaliana]
  misc_feature (119)..(256): Homolog of NCBI NO: 25386203 NR Description: homeobox protein HAT14 [imported] - Arabidopsis
  misc_feature (88)..(263): Homolog of NCBI NO: 18034437 NR Description: homeodomain leucine zipper protein CPHB-3
MIKLLFTYICTYTYKLYALYHMDYACVCMYKYKGIVTLQVCLFYIKLRVFLSNFTFSSSILALKNPNNSLIKIMAILPENSSNLDLTISVPGFSSSPLSDEGSGGGRDQLRLDMNRLPSSEDGDDEEFSHDDGSAPPRKKLRLTREQSRLLEDSFRQNHTLNPKQKEVLAKHLMLRPRQIEVWFQNRRARSKLKQTEMECEYLKRWFGSLTEENHRLHREVEELRAMKVGPTTVNSASSLTMCPRCERVTPAASPSRAVVPVPAKKTFPPQERDR

SEQ ID NO: 84271 - protein, 254 aa, Arabidopsis thaliana
  peptide (1)..(254): Ceres Seq. ID no. 12674059
  misc_feature (116)..(172): Pfam Name: Homeobox domain Pfam Description: Homeobox domain
  misc_feature (1)..(254): Homolog of NCBI NO: 30677923 NR Description: homeodomain-leucine zipper protein ATHB-17
  misc_feature (93)..(254): Homolog of NCBI NO: 25386214 NR Description: probable homeodomain transcription factor - Arabidopsis thaliana >gi|3785973|gb|AAC67320.1| putative
  misc_feature (61)..(243): Homolog of NCBI NO: 5006851 NR Description: homeodomain leucine zipper protein [Oryza sativa]
  misc_feature (61)..(243): Homolog of NCBI NO: 34911664 NR Description: putative homeodomain-leucine zipper [Oryza sativa
  misc_feature (53)..(238): Homolog of NCBI NO: 30698765 NR Description: homeodomain-leucine zipper protein, putative thaliana] >gi|26451347|dbj|BAC42774.1| unknown protein thaliana] >gi|28973379|gb|AAO64014.1| putative homeodomain
  misc_feature (36)..(235): Homolog of NCBI NO: 12230908 NR Description: Homeobox-leucine zipper protein HAT14 (HD-ZIP leucine zipper protein~gene_id:MPH15.6 [Arabidopsis thaliana]
  misc_feature (36)..(235): Homolog of NCBI NO: 22326632 NR Description: homeobox-leucine zipper protein HAT14 (HD-Zip
  misc_feature (36)..(235): Homolog of NCBI NO: 29028870 NR Description: At5g06710 [Arabidopsis thaliana]
  misc_feature (98)..(235): Homolog of NCBI NO: 25386203 NR Description: homeobox protein HAT14 [imported] - Arabidopsis
  misc_feature (67)..(242): Homolog of NCBI NO: 18034437 NR Description: homeodomain leucine zipper protein CPHB-3
MDYACVCMYKYKGIVTLQVCLFYIKLRVFLSNFTFSSSILALKNPNNSLIKIMAILPENSSNLDLTISVPGFSSSPLSDEGSGGGRDQLRLDMNRLPSSEDGDDEEFSHDDGSAPPRKKLRLTREQSRLLEDSFRQNHTLNPKQKEVLAKHLMLRPRQIEVWFQNRRARSKLKQTEMECEYLKRWFGSLTEENHRLHREVEELRAMKVGPTTVNSASSLTMCPRCERVTPAASPSRAVVPVPAKKTFPPQERDR

SEQ ID NO: 84272 - protein, 247 aa, Arabidopsis thaliana
  peptide (1)..(247): Ceres Seq. ID no. 12674060
  misc_feature (109)..(165): Pfam Name: Homeobox domain Pfam Description: Homeobox domain
  misc_feature (1)..(247): Homolog of NCBI NO: 30677923 NR Description: homeodomain-leucine zipper protein ATHB-17
  misc_feature (86)..(247): Homolog of NCBI NO: 25386214 NR Description: probable homeodomain transcription factor - Arabidopsis thaliana >gi|3785973|gb|AAC67320.1| putative
  misc_feature (54)..(236): Homolog of NCBI NO: 5006851 NR Description: homeodomain leucine zipper protein [Oryza sativa]
  misc_feature (54)..(236): Homolog of NCBI NO: 34911664 NR Description: putative homeodomain-leucine zipper [Oryza sativa
  misc_feature (46)..(231): Homolog of NCBI NO: 30698765 NR Description: homeodomain-leucine zipper protein, putative thaliana] >gi|26451347|dbj|BAC42774.1| unknown protein thaliana] >gi|28973379|gb|AAO64014.1| putative homeodomain
  misc_feature (29)..(228): Homolog of NCBI NO: 12230908 NR Description: Homeobox-leucine zipper protein HAT14 (HD-ZIP leucine zipper protein~gene_id:MPH15.6 [Arabidopsis thaliana]
  misc_feature (29)..(228): Homolog of NCBI NO: 22326632 NR Description: homeobox-leucine zipper protein HAT14 (HD-Zip
  misc_feature (29)..(228): Homolog of NCBI NO: 29028870 NR Description: At5g06710 [Arabidopsis thaliana]
  misc_feature (91)..(228): Homolog of NCBI NO: 25386203 NR Description: homeobox protein HAT14 [imported] - Arabidopsis
  misc_feature (60)..(235): Homolog of NCBI NO: 18034437 NR Description: homeodomain leucine zipper protein CPHB-3
MYKYKGIVTLQVCLFYIKLRVFLSNFTFSSSILALKNPNNSLIKIMAILPENSSNLDLTISVPGFSSSPLSDEGSGGGRDQLRLDMNRLPSSEDGDDEEFSHDDGSAPPRKKLRLTREQSRLLEDSFRQNHTLNPKQKEVLAKHLMLRPRQIEVWFQNRRARSKLKQTEMECEYLKRWFGSLTEENHRLHREVEELRAMKVGPTTVNSASSLTMCPRCERVTPAASPSRAVVPVPAKKTFPPQERDR

SEQ ID NO: 84273 - DNA, 1357 bp, Arabidopsis thaliana
  misc_feature (1)..(1357): Ceres Seq. ID no. 12674073
  misc_feature: MA Experiment ID: 108434 Result: Down-regulated in Transcription
  misc_feature: MA Experiment 108434 PARAMETER Experiment Name: At_Root_Tips_cDNA_P Parameter: Tissue Value: Root Tips
  misc_feature: MA Experiment ID: 108462 Result: Up-regulated in Transcription
  misc_feature: MA Experiment 108462 PARAMETER Experiment Name: At_Germinating_Seeds_cDNA_P Parameter: Age (day) Value: 2 vs. 0
  misc_feature: MA Experiment 108462 PARAMETER Experiment Name: At_Germinating_Seeds_cDNA_P Parameter: Tissue Value: Germinating Seeds
  misc_feature: MA Experiment ID: 108463 Result: Up-regulated in Transcription
  misc_feature: MA Experiment 108463 PARAMETER Experiment Name: At_Germinating_Seeds_cDNA_P Parameter: Age (day) Value: 3 vs. 0
  misc_feature: MA Experiment 108463 PARAMETER Experiment Name: At_Germinating_Seeds_cDNA_P Parameter: Tissue Value: Germinating Seeds
  misc_feature: MA Experiment ID: 108464 Result: Up-regulated in Transcription
  misc_feature: MA Experiment 108464 PARAMETER Experiment Name: At_Germinating_Seeds_cDNA_P Parameter: Age (day) Value: 4 vs. 0
  misc_feature: MA Experiment 108464 PARAMETER Experiment Name: At_Germinating_Seeds_cDNA_P Parameter: Tissue Value: Germinating Seeds
  misc_feature: MA Experiment ID: 108573 Result: Up-regulated in Transcription
  misc_feature: MA Experiment 108573 PARAMETER Experiment Name: At_Drought_cDNA_P Parameter: Timepoint (hr) Value: 6
  misc_feature: MA Experiment 108573 PARAMETER Experiment Name: At_Drought_cDNA_P Parameter: Tissue Value: Aerial
  misc_feature: MA Experiment 108573 PARAMETER Experiment Name: At_Drought_cDNA_P Parameter: Treatment Value: Drought vs. No Drought
  misc_feature: MA Experiment ID: 20000090 Result: Down-regulated in Transcription
  misc_feature: MA Experiment ID: 20000111 Result: Down-regulated in Transcription
  misc_feature: MA Experiment 20000111 PARAMETER Experiment Name: At_42deg_Heat_cDNA_P Parameter: Temperature (deg C) Value: 42 vs. 22
  misc_feature: MA Experiment 20000111 PARAMETER Experiment Name: At_42deg_Heat_cDNA_P Parameter: Timepoint (hr) Value: 6
  misc_feature: MA Experiment 20000111 PARAMETER Experiment Name: At_42deg_Heat_cDNA_P Parameter: Tissue Value: Aerial
  misc_feature: MA Experiment ID: 20000171 Result: Down-regulated in Transcription
  misc_feature: MA Experiment 20000171 PARAMETER Experiment Name: At_42deg_Heat_P Parameter: Age (day) Value: 14
  misc_feature: MA Experiment 20000171 PARAMETER Experiment Name: At_42deg_Heat_P Parameter: Organism Value: A. thaliana
  misc_feature: MA Experiment 20000171 PARAMETER Experiment Name: At_42deg_Heat_P Parameter: Plant Line Value: WS
  misc_feature: MA Experiment 20000171 PARAMETER Experiment Name: At_42deg_Heat_P Parameter: Temperature (deg C) Value: 42 vs. 22
  misc_feature: MA Experiment 20000171 PARAMETER Experiment Name: At_42deg_Heat_P Parameter: Timepoint (hr) Value: 1
  misc_feature: MA Experiment 20000171 PARAMETER Experiment Name: At_42deg_Heat_P Parameter: Tissue Value: Aerial
  misc_feature: MA Experiment ID: 20000173 Result: Down-regulated in Transcription
  misc_feature: MA Experiment 20000173 PARAMETER Experiment Name: At_42deg_Heat_P Parameter: Age (day) Value: 14
  misc_feature: MA Experiment 20000173 PARAMETER Experiment Name: At_42deg_Heat_P Parameter: Organism Value: A. thaliana
  misc_feature: MA Experiment 20000173 PARAMETER Experiment Name: At_42deg_Heat_P Parameter: Plant Line Value: WS
  misc_feature: MA Experiment 20000173 PARAMETER Experiment Name: At_42deg_Heat_P Parameter: Temperature (deg C) Value: 42 vs. 22
  misc_feature: MA Experiment 20000173 PARAMETER Experiment Name: At_42deg_Heat_P Parameter: Timepoint (hr) Value: 6
  misc_feature: MA Experiment 20000173 PARAMETER Experiment Name: At_42deg_Heat_P Parameter: Tissue Value: Aerial
  misc_feature: MA Experiment ID: 20000185 Result: Down-regulated in Transcription
  misc_feature: MA Experiment 20000185 PARAMETER Experiment Name: At_Roots__P Parameter: Age (day) Value: 7 vs. 21
  misc_feature: MA Experiment 20000185 PARAMETER Experiment Name: At_Roots__P Parameter: Organism Value: A. thaliana
  misc_feature: MA Experiment 20000185 PARAMETER Experiment Name: At_Roots__P Parameter: Tissue Value: Roots vs. Whole Plant
  misc_feature: MA Experiment ID: 20000235 Result: Down-regulated in Transcription
  misc_feature: MA Experiment 20000235 PARAMETER Experiment Name: At_Siliques_P Parameter: Age (day) Value: 21
  misc_feature: MA Experiment 20000235 PARAMETER Experiment Name: At_Siliques_P Parameter: Organism Value: A. thaliana
  misc_feature: MA Experiment 20000235 PARAMETER Experiment Name: At_Siliques_P Parameter: Plant Line Value: WS
  misc_feature: MA Experiment 20000235 PARAMETER Experiment Name: At_Siliques_P Parameter: Tissue Value: 5-10mm Siliques vs. Whole Plant
  misc_feature: MA Experiment ID: 20000265 Result: Down-regulated in Transcription
  misc_feature: MA Experiment 20000265 PARAMETER Experiment Name: At_Open_Flower_P Parameter: Age (day) Value: 21
  misc_feature: MA Experiment 20000265 PARAMETER Experiment Name: At_Open_Flower_P Parameter: Plant Line Value: WS
  misc_feature: MA Experiment 20000265 PARAMETER Experiment Name: At_Open_Flower_P Parameter: Tissue Value: Closed Flower vs. Whole Plant
  misc_feature: MA Experiment ID: 20000268 Result: Down-regulated in Transcription
  misc_feature: MA Experiment 20000268 PARAMETER Experiment Name: At_100mM_NaCl__P Parameter: Age (day) Value: 14
  misc_feature: MA Experiment 20000268 PARAMETER Experiment Name: At_100mM_NaCl__P Parameter: Organism Value: A. thaliana
  misc_feature: MA Experiment 20000268 PARAMETER Experiment Name: At_100mM_NaCl__P Parameter: Plant Line Value: WS
  misc_feature: MA Experiment 20000268 PARAMETER Experiment Name: At_100mM_NaCl__P Parameter: Timepoint (hr) Value: 6
  misc_feature: MA Experiment 20000268 PARAMETER Experiment Name: At_100mM_NaCl__P Parameter: Tissue Value: Whole Plant
  misc_feature: MA Experiment 20000268 PARAMETER Experiment Name: At_100mM_NaCl__P Parameter: Treatment Value: 100mM NaCl vs. No Treatment
  misc_feature: MA Experiment ID: 20000286 Result: Down-regulated in Transcription
  misc_feature: MA Experiment 20000286 PARAMETER Experiment Name: At_Open_Flower_P Parameter: Age (day) Value: 21
  misc_feature: MA Experiment 20000286 PARAMETER Experiment Name: At_Open_Flower_P Parameter: Plant Line Value: WS
  misc_feature: MA Experiment 20000286 PARAMETER Experiment Name: At_Open_Flower_P Parameter: Tissue Value: Half Open vs. Whole Plant
  misc_feature: MA Experiment ID: 20000439 Result: Down-regulated in Transcription
  misc_feature: MA Experiment 20000439 PARAMETER Experiment Name: At_Roots__P Parameter: Age (day) Value: 14 vs. 21
  misc_feature: MA Experiment 20000439 PARAMETER Experiment Name: At_Roots__P Parameter: Organism Value: A. thaliana
  misc_feature: MA Experiment 20000439 PARAMETER Experiment Name: At_Roots__P Parameter: Tissue Value: Roots vs. Whole Plant
  misc_feature: MA Experiment ID: 20000441 Result: Up-regulated in Transcription
  misc_feature: MA Experiment 20000441 PARAMETER Experiment Name: At_1uM_BR-BRZ__P Parameter: Tissue Value: Shoot Apices
  misc_feature: MA Experiment 20000441 PARAMETER Experiment Name: At_1uM_BR-BRZ__P Parameter: Treatment Value: 1uM BR vs. No Treatment
  misc_feature: MA Experiment ID: 20000443 Result: Up-regulated in Transcription
  misc_feature: MA Experiment 20000443 PARAMETER Experiment Name: At_1uM_BR-BRZ__P Parameter: Tissue Value: Shoot Apices
  misc_feature: MA Experiment 20000443 PARAMETER Experiment Name: At_1uM_BR-BRZ__P Parameter: Treatment Value: 1uM BRZ vs. No Treatment
  misc_feature: MA Experiment ID: 20000495 Result: Down-regulated in Transcription
  misc_feature: MA Experiment 20000495 PARAMETER Experiment Name: At_Guard_Cells_P Parameter: Harvest Date Value: 8/2/2002
  misc_feature: MA Experiment 20000495 PARAMETER Experiment Name: At_Guard_Cells_P Parameter: Organism Value: A. thaliana
  misc_feature: MA Experiment 20000495 PARAMETER Experiment Name: At_Guard_Cells_P Parameter: Tissue Value: Guard Cells vs. Leaves
  misc_feature: MA Experiment ID: 20000496 Result: Down-regulated in Transcription
  misc_feature: MA Experiment 20000496 PARAMETER Experiment Name: At_Guard_Cells_P Parameter: Harvest Date Value: 7/19/2002
  misc_feature: MA Experiment 20000496 PARAMETER Experiment Name: At_Guard_Cells_P Parameter: Organism Value: Canola
  misc_feature: MA Experiment 20000496 PARAMETER Experiment Name: At_Guard_Cells_P Parameter: Tissue Value: Guard Cells vs. Leaves
  misc_feature: MA Experiment ID: 20000709 Result: Up-regulated in Transcription
  misc_feature: MA Experiment 20000709 PARAMETER Experiment Name: At_15mM_NH4NO3_L-to-H_P Parameter: Age (hr) Value: 14
  misc_feature: MA Experiment 20000709 PARAMETER Experiment Name: At_15mM_NH4NO3_L-to-H_P Parameter: Organism Value: A. thaliana
  misc_feature: MA Experiment 20000709 PARAMETER Experiment Name: At_15mM_NH4NO3_L-to-H_P Parameter: Plant Line Value: WS
  misc_feature: MA Experiment 20000709 PARAMETER Experiment Name: At_15mM_NH4NO3_L-to-H_P Parameter: Timepoint (hr) Value: 4
  misc_feature: MA Experiment 20000709 PARAMETER Experiment Name: At_15mM_NH4NO3_L-to-H_P Parameter: Tissue Value: Aerial
  misc_feature: MA Experiment 20000709 PARAMETER Experiment Name: At_15mM_NH4NO3_L-to-H_P Parameter: Treatment Value: 15mM NH4NO3 vs. 30mM Mannitol
  misc_feature: MA Experiment ID: 20001247 Result: Up-regulated in Transcription
  misc_feature: MA Experiment 20001247 PARAMETER Experiment Name: At_Far-red-induction_P Parameter: Age (day) Value: 7
  misc_feature: MA Experiment 20001247 PARAMETER Experiment Name: At_Far-red-induction_P Parameter: Light Value: Far-red vs. White
  misc_feature: MA Experiment 20001247 PARAMETER Experiment Name: At_Far-red-induction_P Parameter: Organism Value: A. thaliana
  misc_feature: MA Experiment 20001247 PARAMETER Experiment Name: At_Far-red-induction_P Parameter: Plant Line Value: Columbia
  misc_feature: MA Experiment 20001247 PARAMETER Experiment Name: At_Far-red-induction_P Parameter: Timepoint (hr) Value: 1
  misc_feature: MA Experiment 20001247 PARAMETER Experiment Name: At_Far-red-induction_P Parameter: Tissue Value: Whole Plant
  misc_feature: MA Experiment ID: 20001450 Result: Up-regulated in Transcription
  misc_feature: MA Experiment 20001450 PARAMETER Experiment Name: At_Far-red-induction_P Parameter: Age (day) Value: 7
  misc_feature: MA Experiment 20001450 PARAMETER Experiment Name: At_Far-red-induction_P Parameter: Light Value: Far-red vs. White
  misc_feature: MA Experiment 20001450 PARAMETER Experiment Name: At_Far-red-induction_P Parameter: Organism Value: A. thaliana
  misc_feature: MA Experiment 20001450 PARAMETER Experiment Name: At_Far-red-induction_P Parameter: Plant Line Value: Columbia
  misc_feature: MA Experiment 20001450 PARAMETER Experiment Name: At_Far-red-induction_P Parameter: Timepoint (hr) Value: 8
  misc_feature: MA Experiment 20001450 PARAMETER Experiment Name: At_Far-red-induction_P Parameter: Tissue Value: Whole Plant
  misc_feature: MA Experiment ID: 20001451 Result: Up-regulated in Transcription
  misc_feature: MA Experiment 20001451 PARAMETER Experiment Name: At_Far-red-induction_P Parameter: Age (day) Value: 7
  misc_feature: MA Experiment 20001451 PARAMETER Experiment Name: At_Far-red-induction_P Parameter: Light Value: Far-red vs. White
  misc_feature: MA Experiment 20001451 PARAMETER Experiment Name: At_Far-red-induction_P Parameter: Organism Value: A. thaliana
  misc_feature: MA Experiment 20001451 PARAMETER Experiment Name: At_Far-red-induction_P Parameter: Plant Line Value: Columbia
  misc_feature: MA Experiment 20001451 PARAMETER Experiment Name: At_Far-red-induction_P Parameter: Timepoint (hr) Value: 24
  misc_feature: MA Experiment 20001451 PARAMETER Experiment Name: At_Far-red-induction_P Parameter: Tissue Value: Whole Plant
  misc_feature: MA Experiment ID: 20001558 Result: Up-regulated in Transcription
  misc_feature: MA Experiment 20001558 PARAMETER Experiment Name: At_Drought_Soil_Dry_P Parameter: Age (day) Value: 27
  misc_feature: MA Experiment 20001558 PARAMETER Experiment Name: At_Drought_Soil_Dry_P Parameter: Organism Value: A. thaliana
  misc_feature: MA Experiment 20001558 PARAMETER Experiment Name: At_Drought_Soil_Dry_P Parameter: Plant Line Value: WS
  misc_feature: MA Experiment 20001558 PARAMETER Experiment Name: At_Drought_Soil_Dry_P Parameter: Post Timepoint (hr) Value: 6
  misc_feature: MA Experiment 20001558 PARAMETER Experiment Name: At_Drought_Soil_Dry_P Parameter: Post-Treatment Value: Re-Water vs. No Drought
  misc_feature: MA Experiment 20001558 PARAMETER Experiment Name: At_Drought_Soil_Dry_P Parameter: Timepoint (day) Value: 13
  misc_feature: MA Experiment 20001558 PARAMETER Experiment Name: At_Drought_Soil_Dry_P Parameter: Treatment Value: Drought vs. No Drought
  misc_feature: MA Experiment ID: 20001911 Result: Up-regulated in Transcription
  misc_feature: MA Experiment 20001911 PARAMETER Experiment Name: At_Drought_Reproduction_P Parameter: Age (day) Value: 40
  misc_feature: MA Experiment 20001911 PARAMETER Experiment Name: At_Drought_Reproduction_P Parameter: Organism Value: A. thaliana
  misc_feature: MA Experiment 20001911 PARAMETER Experiment Name: At_Drought_Reproduction_P Parameter: Plant Line Value: WS
  misc_feature: MA Experiment 20001911 PARAMETER Experiment Name: At_Drought_Reproduction_P Parameter: Timepoint (day) Value: 10
  misc_feature: MA Experiment 20001911 PARAMETER Experiment Name: At_Drought_Reproduction_P Parameter: Tissue Value: Flowers
  misc_feature: MA Experiment 20001911 PARAMETER Experiment Name: At_Drought_Reproduction_P Parameter: Treatment Value: Drought vs. No Drought
atattcactctctcttcttcattagcctttcgtctccttcttctcttctctatctctctttagcttctctacgcaagcttattatctctttctcttaaagctttttctatatacaaacagaagcgtttgatactgtaaaaaagatttagaaatggagactctgagtcgtttattggttttcatgtctctgttttccggtttagtttctggatttgctctgcaaaatcttccaatcacatcttttgaagaaagttacactcaactttttggtgacaagaacttatttgttcatcaagatggcaaatctgtccggttaacgctcgatgaaagaaccggttccggttttgtttcaaatgattattacttgcatggattcttcagtgcttcaattaaattaccttctgattatacagctggagttgttgttgccttttatatgtctaatggagatatgtatgagaagaatcatgatgagatagattttgagtttcttggtaacattagagaaaaagaatggagagttcagacaaacatttacggtaatggaagtactcattcaggaagagaagagagatataatctctggtttgatcctactgaagattttcatcaatacagtatcctctggtctgattctcacatcatattctttgtagacaatgttcctattagagaggtcaaacgtactgcggaaatgggtggtcactttccatcaaagccgatgtctctctacacaacaatatgggacggttctaaatgggcaactaacggtggaaagtacggtgtaaactacaaatatgcgccttacattgcgcggttctcggatctagtcctgcacggctgccccgtggaccctatcgagcagtttccgaggtgcgatgaaggcgcggctgaggatatgcgtgcggcgcaagagattactccttcacaaaggagtaaaatggatgttttcagacggagactcatgacatattcatattgctatgatcgggctaggtacaatgttgctttatcggagtgtgtggtgaatcccgctgaggctcaaaggcttagggtttatgatccggtcagatttggcggcattccgaggcgccaccgcaatggaaagcaccggagcaagagaagccgggttgatggaaccgagtcgatatgataacatatataggcaaaatagtatgggtgagatttgggggttctataataagtccattattttggttatttatgattcaatgcattttcacatatagaggaggcatttttgtcatttgttagttgtatatcattataagaaaagaaaaaataattaatttatttatttgtgatattttttttatatatgataaattgtttcttg

SEQ ID NO: 84274 - protein, 333 aa, Arabidopsis thaliana; identical to SEQ ID NO: 30673
  peptide (1)..(333): Ceres Seq. ID no. 12674074
  misc_feature (31)..(216): Pfam Name: Glycosyl hydrolases family 16 Pfam Description: Glycosyl hydrolases family 16
  misc_feature (1)..(333): Homolog of NCBI NO: 15226364 NR Description: xyloglucan endotransglycosylase (EXGT-A3); id: At2g01850.1, supported by cDNA: 18876., supported by cDNA: supported by cDNA: gi_2154608 [Arabidopsis thaliana]
  misc_feature (1)..(333): Homolog of NCBI NO: 5533313 NR Description: endoxyloglucan transferase [Arabidopsis thaliana]
  misc_feature (1)..(333): Homolog of NCBI NO: 21553969 NR Description: putative xyloglucan-specific glucanase
  misc_feature (1)..(333): Homolog of NCBI NO: 15223878 NR Description: xyloglucan endotransglycosylase (XTR2); protein At1g14720.1, supported by cDNA: 19079., supported by cDNA: supported by cDNA: gi_14326520, supported by cDNA: gi_2154610
  misc_feature (17)..(332): Homolog of NCBI NO: 6681351 NR Description: ETAG-A3 [Lycopersicon esculentum]
  misc_feature (24)..(333): Homolog of NCBI NO: 13560781 NR Description: endoxyloglucan transferase [Daucus carota]
  misc_feature (17)..(324): Homolog of NCBI NO: 2129774 NR Description: xyloglucan endo-1,4-beta-D-glucanase (EC 3.2.1.-) - Arabidopsis thaliana (fragment) >gi|1244754|gb|AAB18365.1|
  misc_feature (17)..(324): Homolog of NCBI NO: 15222593 NR Description: xyloglucan endotransglycosylase (XTR4), putative; id: At1g32170.1, supported by cDNA: 21403., supported by cDNA: [Arabidopsis thaliana] >gi|25313534|pir||B86446 probable
  misc_feature (17)..(324): Homolog of NCBI NO: 21618261 NR Description: endoxyloglucan transferase, putative [Arabidopsis
  misc_feature (25)..(332): Homolog of NCBI NO: 32470643 NR Description: putative xyloglucan endotransglycosylase-related

SEQ ID NO: 84275 - protein, 323 aa, Arabidopsis thaliana; identical to SEQ ID NO: 30674
  peptide (1)..(323): Ceres Seq. ID no. 12674075
  misc_feature (21)..(206): Pfam Name: Glycosyl hydrolases family 16 Pfam Description: Glycosyl hydrolases family 16
  misc_feature (1)..(323): Homolog of NCBI NO: 15226364 NR Description: xyloglucan endotransglycosylase (EXGT-A3); id: At2g01850.1, supported by cDNA: 18876., supported by cDNA: supported by cDNA: gi_2154608 [Arabidopsis thaliana]
  misc_feature (1)..(323): Homolog of NCBI NO: 5533313 NR Description: endoxyloglucan transferase [Arabidopsis thaliana]
  misc_feature (1)..(323): Homolog of NCBI NO: 21553969 NR Description: putative xyloglucan-specific glucanase
  misc_feature (1)..(323): Homolog of NCBI NO: 15223878 NR Description: xyloglucan endotransglycosylase (XTR2); protein At1g14720.1, supported by cDNA: 19079., supported by cDNA: supported by cDNA: gi_14326520, supported by cDNA: gi_2154610
  misc_feature (7)..(322): Homolog of NCBI NO: 6681351 NR Description: ETAG-A3 [Lycopersicon esculentum]
  misc_feature (14)..(323): Homolog of NCBI NO: 13560781 NR Description: endoxyloglucan transferase [Daucus carota]
  misc_feature (7)..(314): Homolog of NCBI NO: 2129774 NR Description: xyloglucan endo-1,4-beta-D-glucanase (EC 3.2.1.-) - Arabidopsis thaliana (fragment) >gi|1244754|gb|AAB18365.1|
  misc_feature (7)..(314): Homolog of NCBI NO: 15222593 NR Description: xyloglucan endotransglycosylase (XTR4), putative; id: At1g32170.1, supported by cDNA: 21403., supported by cDNA: [Arabidopsis thaliana] >gi|25313534|pir||B86446 probable
  misc_feature (7)..(314): Homolog of NCBI NO: 21618261 NR Description: endoxyloglucan transferase, putative [Arabidopsis
  misc_feature (15)..(322): Homolog of NCBI NO: 32470643 NR Description: putative xyloglucan endotransglycosylase-related

SEQ ID NO: 84276 - protein, 238 aa, Arabidopsis thaliana; identical to SEQ ID NO: 30675
  peptide (1)..(238): Ceres Seq. ID no. 12674076
  misc_feature (1)..(121): Pfam Name: Glycosyl hydrolases family 16 Pfam Description: Glycosyl hydrolases family 16
  misc_feature (1)..(238): Homolog of NCBI NO: 15226364 NR Description: xyloglucan endotransglycosylase (EXGT-A3); id: At2g01850.1, supported by cDNA: 18876., supported by cDNA: supported by cDNA: gi_2154608 [Arabidopsis thaliana]
  misc_feature (1)..(238): Homolog of NCBI NO: 5533313 NR Description: endoxyloglucan transferase [Arabidopsis thaliana]
  misc_feature (1)..(238): Homolog of NCBI NO: 21553969 NR Description: putative xyloglucan-specific glucanase
  misc_feature (1)..(238): Homolog of NCBI NO: 15223878 NR Description: xyloglucan endotransglycosylase (XTR2); protein At1g14720.1, supported by cDNA: 19079., supported by cDNA: supported by cDNA: gi_14326520, supported by cDNA: gi_2154610
  misc_feature (1)..(237): Homolog of NCBI NO: 6681351 NR Description: ETAG-A3 [Lycopersicon esculentum]
  misc_feature (1)..(238): Homolog of NCBI NO: 13560781 NR Description: endoxyloglucan transferase [Daucus carota]
  misc_feature (1)..(229): Homolog of NCBI NO: 2129774 NR Description: xyloglucan endo-1,4-beta-D-glucanase (EC 3.2.1.-) - Arabidopsis thaliana (fragment) >gi|1244754|gb|AAB18365.1|
  misc_feature (1)..(229): Homolog of NCBI NO: 15222593 NR Description: xyloglucan endotransglycosylase (XTR4), putative; id: At1g32170.1, supported by cDNA: 21403., supported by cDNA: [Arabidopsis thaliana] >gi|25313534|pir||B86446 probable
  misc_feature (1)..(229): Homolog of NCBI NO: 21618261 NR Description: endoxyloglucan transferase, putative [Arabidopsis
  misc_feature (1)..(237): Homolog of NCBI NO: 32470643 NR Description: putative xyloglucan endotransglycosylase-related

SEQ ID NO: 84277 - DNA, 495 bp, Arabidopsis thaliana
  misc_feature (1)..(495): Ceres Seq. ID no. 12674086
  misc_feature: MA Experiment ID: 108434 Result: Down-regulated in Transcription
  misc_feature: MA Experiment 108434 PARAMETER Experiment Name: At_Root_Tips_cDNA_P Parameter: Tissue Value: Root Tips
  misc_feature: MA Experiment ID: 108463 Result: Up-regulated in Transcription
  misc_feature: MA Experiment 108463 PARAMETER Experiment Name: At_Germinating_Seeds_cDNA_P Parameter: Age (day) Value: 3 vs. 0
  misc_feature: MA Experiment 108463 PARAMETER Experiment Name: At_Germinating_Seeds_cDNA_P Parameter: Tissue Value: Germinating Seeds
  misc_feature: MA Experiment ID: 108464 Result: Up-regulated in Transcription
  misc_feature: MA Experiment 108464 PARAMETER Experiment Name: At_Germinating_Seeds_cDNA_P Parameter: Age (day) Value: 4 vs. 0
  misc_feature: MA Experiment 108464 PARAMETER Experiment Name: At_Germinating_Seeds_cDNA_P Parameter: Tissue Value: Germinating Seeds
  misc_feature: MA Experiment ID: 108579 Result: Up-regulated in Transcription
  misc_feature: MA Experiment 108579 PARAMETER Experiment Name: At_4deg_Cold_cDNA_P Parameter: Temperature (deg C) Value: 4 vs. 22
  misc_feature: MA Experiment 108579 PARAMETER Experiment Name: At_4deg_Cold_cDNA_P Parameter: Timepoint (hr) Value: 6
  misc_feature: MA Experiment 108579 PARAMETER Experiment Name: At_4deg_Cold_cDNA_P Parameter: Tissue Value: Aerial
  misc_feature: MA Experiment ID: 20000087 Result: Up-regulated in Transcription
  misc_feature: MA Experiment 20000087 PARAMETER Experiment Name: At_100uM_ABA_Mutants_cDNA_P Parameter: Plant Line Value: WS
  misc_feature: MA Experiment 20000087 PARAMETER Experiment Name: At_100uM_ABA_Mutants_cDNA_P Parameter: Timepoint (hr) Value: 6
  misc_feature: MA Experiment 20000087 PARAMETER Experiment Name: At_100uM_ABA_Mutants_cDNA_P Parameter: Tissue Value: Aerial
  misc_feature: MA Experiment 20000087 PARAMETER Experiment Name: At_100uM_ABA_Mutants_cDNA_P Parameter: Treatment Value: 100uM ABA vs. No Treatment
  misc_feature: MA Experiment ID: 20000180 Result: Up-regulated in Transcription
  misc_feature: MA Experiment 20000180 PARAMETER Experiment Name: At_Germinating_Seeds_P Parameter: Age (hr) Value: 24 vs. 0
  misc_feature: MA Experiment 20000180 PARAMETER Experiment Name: At_Germinating_Seeds_P Parameter: Tissue Value: Germinating Seeds
  misc_feature: MA Experiment ID: 20000185 Result: Up-regulated in Transcription
  misc_feature: MA Experiment 20000185 PARAMETER Experiment Name: At_Roots__P Parameter: Age (day) Value: 7 vs. 21
  misc_feature: MA Experiment 20000185 PARAMETER Experiment Name: At_Roots__P Parameter: Organism Value: A. thaliana
  misc_feature: MA Experiment 20000185 PARAMETER Experiment Name: At_Roots__P Parameter: Tissue Value: Roots vs. Whole Plant
  misc_feature: MA Experiment ID: 20001560 Result: Up-regulated in Transcription
  misc_feature: MA Experiment 20001560 PARAMETER Experiment Name: At_Drought_Soil_Dry_P Parameter: Age (day) Value: 28
  misc_feature: MA Experiment 20001560 PARAMETER Experiment Name: At_Drought_Soil_Dry_P Parameter: Organism Value: A. thaliana
  misc_feature: MA Experiment 20001560 PARAMETER Experiment Name: At_Drought_Soil_Dry_P Parameter: Plant Line Value: WS
  misc_feature: MA Experiment 20001560 PARAMETER Experiment Name: At_Drought_Soil_Dry_P Parameter: Post Timepoint (hr) Value: None
  misc_feature: MA Experiment 20001560 PARAMETER Experiment Name: At_Drought_Soil_Dry_P Parameter: Post-Treatment Value: None
  misc_feature: MA Experiment 20001560 PARAMETER Experiment Name: At_Drought_Soil_Dry_P Parameter: Timepoint (day) Value: 14
  misc_feature: MA Experiment 20001560 PARAMETER Experiment Name: At_Drought_Soil_Dry_P Parameter: Treatment Value: Drought vs. No Drought
  misc_feature: MA Experiment ID: 20001904 Result: Up-regulated in Transcription
  misc_feature: MA Experiment 20001904 PARAMETER Experiment Name: At_Drought_Reproduction_P Parameter: Age (day) Value: 37
  misc_feature: MA Experiment 20001904 PARAMETER Experiment Name: At_Drought_Reproduction_P Parameter: Organism Value: A. thaliana
  misc_feature: MA Experiment 20001904 PARAMETER Experiment Name: At_Drought_Reproduction_P Parameter: Plant Line Value: WS
  misc_feature: MA Experiment 20001904 PARAMETER Experiment Name: At_Drought_Reproduction_P Parameter: Timepoint (day) Value: 7
  misc_feature: MA Experiment 20001904 PARAMETER Experiment Name: At_Drought_Reproduction_P Parameter: Tissue Value: Rosettes
  misc_feature: MA Experiment 20001904 PARAMETER Experiment Name: At_Drought_Reproduction_P Parameter: Treatment Value: Drought vs. No Drought
acttcctcattagcattctacagtctgcacacttatcacttctttcgaaatctctctctatccctctcaaaaatgaagctctctgtgcgttttatctccgctgctcttctcttgttcatggtattcattgccacagggatgggtccagtcaccgtggaggcacgcacgtgtgagtcaaaaagccataggttcaagggtccatgtgtgagcacacacaactgtgcaaacgtgtgccacaacgaaggcttcggcggaggtaaatgccgtggattccgtcgtcgttgctactgcacaagacactgctgatccatccattctcatgactcaaatcttcgatccatcgtcagtgtgttacttctttcttatctaaatcttccgtacggtaccatgtcgtaccgtacatgagtgttttctcgaataagtcattggtttgtgtgtttccggttttaatgtaatgttaaatcaattaatggcttttaatatattgtattatgg

SEQ ID NO: 84278 - protein, 101 aa, Arabidopsis thaliana; identical to SEQ ID NO: 25732
  peptide (1)..(101): Ceres Seq. ID no. 12674087
  misc_feature (55)..(101): Pfam Name: Gamma-thionins family Pfam Description: Gamma-thionins family
  misc_feature (25)..(101): Homolog of NCBI NO: 15226878 NR Description: plant defensin protein, putative (PDF2.3); id: At2g02130.1, supported by cDNA: gi_15293090, supported by
  misc_feature (25)..(101): Homolog of NCBI NO: 7488534 NR Description: proteinase inhibitor II - turnip
  misc_feature (25)..(101): Homolog of NCBI NO: 15226872 NR Description: plant defensin protein, putative (PDF2.2); id: At2g02100.1, supported by cDNA: gi_13878184 [Arabidopsis
  misc_feature (25)..(101): Homolog of NCBI NO: 15226876 NR Description: plant defensin protein, putative (PDF2.1);
  misc_feature (25)..(101): Homolog of NCBI NO: 21553559 NR Description: protease inhibitor II [Arabidopsis thaliana]
  misc_feature (25)..(101): Homolog of NCBI NO: 22330359 NR Description: plant defensin protein, putative (PDF2.4);
  misc_feature (25)..(101): Homolog of NCBI NO: 11387188 NR Description: Flower-specific gamma-thionin precursor (Defensin >gi|7672659|gb|AAF66591.1|AF141131_1 defensin [Helianthus annuus]
  misc_feature (25)..(101): Homolog of NCBI NO: 28624546 NR Description: defensin protein 1 [Prunus persica]
  misc_feature (25)..(101): Homolog of NCBI NO: 16225423 NR Description: putative gamma-thionin [Castanea sativa]
  misc_feature (25)..(101): Homolog of NCBI NO: 17066707 NR Description: defensin protein precursor [Capsicum annuum]

SEQ ID NO: 84279 - protein, 77 aa, Arabidopsis thaliana; identical to SEQ ID NO: 25733
  peptide (1)..(77): Ceres Seq. ID no. 12674088
  misc_feature (31)..(77): Pfam Name: Gamma-thionins family Pfam Description: Gamma-thionins family
  misc_feature (1)..(77): Homolog of NCBI NO: 15226878 NR Description: plant defensin protein, putative (PDF2.3); id: At2g02130.1, supported by cDNA: gi_15293090, supported by
  misc_feature (1)..(77): Homolog of NCBI NO: 7488534 NR Description: proteinase inhibitor II - turnip
  misc_feature (1)..(77): Homolog of NCBI NO: 15226872 NR Description: plant defensin protein, putative (PDF2.2); id: At2g02100.1, supported by cDNA: gi_13878184 [Arabidopsis
  misc_feature (1)..(77): Homolog of NCBI NO: 15226876 NR Description: plant defensin protein, putative (PDF2.1);
  misc_feature (1)..(77): Homolog of NCBI NO: 21553559 NR Description: protease inhibitor II [Arabidopsis thaliana]
  misc_feature (1)..(77): Homolog of NCBI NO: 22330359 NR Description: plant defensin protein, putative (PDF2.4);
  misc_feature (1)..(77): Homolog of NCBI NO: 11387188 NR Description: Flower-specific gamma-thionin precursor (Defensin >gi|7672659|gb|AAF66591.1|AF141131_1 defensin [Helianthus annuus]
  misc_feature (1)..(77): Homolog of NCBI NO: 28624546 NR Description: defensin protein 1 [Prunus persica]
  misc_feature (1)..(77): Homolog of NCBI NO: 16225423 NR Description: putative gamma-thionin [Castanea sativa]
  misc_feature (1)..(77): Homolog of NCBI NO: 17066707 NR Description: defensin protein precursor [Capsicum annuum]

SEQ ID NO: 84280 - protein, 62 aa, Arabidopsis thaliana; identical to SEQ ID NO: 25734
  peptide (1)..(62): Ceres Seq. ID no. 12674089
  misc_feature (16)..(62): Pfam Name: Gamma-thionins family Pfam Description: Gamma-thionins family
  misc_feature (1)..(62): Homolog of NCBI NO: 15226878 NR Description: plant defensin protein, putative (PDF2.3); id: At2g02130.1, supported by cDNA: gi_15293090, supported by
  misc_feature (1)..(62): Homolog of NCBI NO: 7488534 NR Description: proteinase inhibitor II - turnip
  misc_feature (1)..(62): Homolog of NCBI NO: 15226872 NR Description: plant defensin protein, putative (PDF2.2); id: At2g02100.1, supported by cDNA: gi_13878184 [Arabidopsis
  misc_feature (1)..(62): Homolog of NCBI NO: 15226876 NR Description: plant defensin protein, putative (PDF2.1);
  misc_feature (1)..(62): Homolog of NCBI NO: 21553559 NR Description: protease inhibitor II [Arabidopsis thaliana]
  misc_feature (1)..(62): Homolog of NCBI NO: 22330359 NR Description: plant defensin protein, putative (PDF2.4);
  misc_feature (1)..(62): Homolog of NCBI NO: 11387188 NR Description: Flower-specific gamma-thionin precursor (Defensin >gi|7672659|gb|AAF66591.1|AF141131_1 defensin [Helianthus annuus]
  misc_feature (1)..(62): Homolog of NCBI NO: 28624546 NR Description: defensin protein 1 [Prunus persica]
  misc_feature (1)..(62): Homolog of NCBI NO: 16225423 NR Description: putative gamma-thionin [Castanea sativa]
  misc_feature (1)..(62): Homolog of NCBI NO: 17066707 NR Description: defensin protein precursor [Capsicum annuum]

SEQ ID NO: 84281 - DNA, 880 bp, Arabidopsis thaliana
  misc_feature (1)..(880): Ceres Seq. ID no. 12674101
  misc_feature: MA Experiment ID: 108462 Result: Up-regulated in Transcription
  misc_feature: MA Experiment 108462 PARAMETER Experiment Name: At_Germinating_Seeds_cDNA_P Parameter: Age (day) Value: 2 vs. 0
  misc_feature: MA Experiment 108462 PARAMETER Experiment Name: At_Germinating_Seeds_cDNA_P Parameter: Tissue Value: Germinating Seeds
  misc_feature: MA Experiment ID: 108463 Result: Up-regulated in Transcription
  misc_feature: MA Experiment 108463 PARAMETER Experiment Name: At_Germinating_Seeds_cDNA_P Parameter: Age (day) Value: 3 vs. 0
  misc_feature: MA Experiment 108463 PARAMETER Experiment Name: At_Germinating_Seeds_cDNA_P Parameter: Tissue Value: Germinating Seeds
  misc_feature: MA Experiment ID: 108464 Result: Up-regulated in Transcription
  misc_feature: MA Experiment 108464 PARAMETER Experiment Name: At_Germinating_Seeds_cDNA_P Parameter: Age (day) Value: 4 vs. 0
  misc_feature: MA Experiment 108464 PARAMETER Experiment Name: At_Germinating_Seeds_cDNA_P Parameter: Tissue Value: Germinating Seeds
  misc_feature: MA Experiment ID: 108469 Result: Down-regulated in Transcription
  misc_feature: MA Experiment ID: 108473 Result: Down-regulated in Transcription
  misc_feature: MA Experiment 108473 PARAMETER Experiment Name: At_Drought_Flowers_cDNA_P Parameter: Timepoint (hr) Value: 7 d
  misc_feature: MA Experiment 108473 PARAMETER Experiment Name: At_Drought_Flowers_cDNA_P Parameter: Tissue Value: Flower
  misc_feature: MA Experiment 108473 PARAMETER Experiment Name: At_Drought_Flowers_cDNA_P Parameter: Treatment Value: Drought vs. No Drought
  misc_feature: MA Experiment ID: 108488 Result: Down-regulated in Transcription
  misc_feature: MA Experiment ID: 108501 Result: Down-regulated in Transcription
  misc_feature: MA Experiment 108501 PARAMETER Experiment Name: At_ap2_floral_buds_cDNA_P Parameter: Plant Line Value: ap2 (Ler.)
  misc_feature: MA Experiment 108501 PARAMETER Experiment Name: At_ap2_floral_buds_cDNA_P Parameter: Tissue Value: Closed Flower
  misc_feature: MA Experiment ID: 108569 Result: Up-regulated in Transcription
  misc_feature: MA Experiment 108569 PARAMETER Experiment Name: At_0.001%_MeJA__cDNA_P Parameter: Timepoint (hr) Value: 6
  misc_feature: MA Experiment 108569 PARAMETER Experiment Name: At_0.001%_MeJA__cDNA_P Parameter: Tissue Value: Aerial
  misc_feature: MA Experiment 108569 PARAMETER Experiment Name: At_0.001%_MeJA__cDNA_P Parameter: Treatment Value: 0.001% MeJA vs. No Treatment
  misc_feature: MA Experiment ID: 108572 Result: Up-regulated in Transcription
  misc_feature: MA Experiment 108572 PARAMETER Experiment Name: At_Drought_cDNA_P Parameter: Timepoint (hr) Value: 1
  misc_feature: MA Experiment 108572 PARAMETER Experiment Name: At_Drought_cDNA_P Parameter: Tissue Value: Aerial
  misc_feature: MA Experiment 108572 PARAMETER Experiment Name: At_Drought_cDNA_P Parameter: Treatment Value: Drought vs. No Drought
  misc_feature: MA Experiment ID: 108573 Result: Up-regulated in Transcription
  misc_feature: MA Experiment 108573 PARAMETER Experiment Name: At_Drought_cDNA_P Parameter: Timepoint (hr) Value: 6
  misc_feature: MA Experiment 108573 PARAMETER Experiment Name: At_Drought_cDNA_P Parameter: Tissue Value: Aerial
  misc_feature: MA Experiment 108573 PARAMETER Experiment Name: At_Drought_cDNA_P Parameter: Treatment Value: Drought vs. No Drought
  misc_feature: MA Experiment ID: 108574 Result: Up-regulated in Transcription
  misc_feature: MA Experiment 108574 PARAMETER Experiment Name: At_Wounding__cDNA_P Parameter: Timepoint (hr) Value: 1
  misc_feature: MA Experiment 108574 PARAMETER Experiment Name: At_Wounding__cDNA_P Parameter: Tissue Value: Aerial
  misc_feature: MA Experiment 108574 PARAMETER Experiment Name: At_Wounding__cDNA_P Parameter: Treatment Value: Wounding vs. No Wounding
  misc_feature: MA Experiment ID: 108585 Result: Up-regulated in Transcription
  misc_feature: MA Experiment 108585 PARAMETER Experiment Name: At_5mM_NaNP_cDNA_P Parameter: Timepoint (hr) Value: 6
  misc_feature: MA Experiment 108585 PARAMETER Experiment Name: At_5mM_NaNP_cDNA_P Parameter: Tissue Value: Aerial
  misc_feature: MA Experiment 108585 PARAMETER Experiment Name: At_5mM_NaNP_cDNA_P Parameter: Treatment Value: null
  misc_feature: MA Experiment ID: 108594 Result: Up-regulated in Transcription
  misc_feature: MA Experiment 108594 PARAMETER Experiment Name: At_Ler-rhl_Root_cDNA_P Parameter: Plant Line Value: null
  misc_feature: MA Experiment ID: 108595 Result: Up-regulated in Transcription
  misc_feature: MA Experiment 108595 PARAMETER Experiment Name: At_Ler-pi_Ovule_cDNA_P Parameter: Plant Line Value: null
  misc_feature: MA Experiment ID: 108605 Result: Up-regulated in Transcription
  misc_feature: MA Experiment 108605 PARAMETER Experiment Name: At_100uM_ABA_cDNA_P Parameter: Timepoint (hr) Value: 6
  misc_feature: MA Experiment 108605 PARAMETER Experiment Name: At_100uM_ABA_cDNA_P Parameter: Tissue Value: Aerial
  misc_feature: MA Experiment 108605 PARAMETER Experiment Name: At_100uM_ABA_cDNA_P Parameter: Treatment Value: 100uM ABA vs. No Treatment
  misc_feature: MA Experiment ID: 108607 Result: Up-regulated in Transcription
  misc_feature: MA Experiment 108607 PARAMETER Experiment Name: At_100uM_ABA_cDNA_P Parameter: Timepoint (hr) Value: 4
  misc_feature: MA Experiment 108607 PARAMETER Experiment Name: At_100uM_ABA_cDNA_P Parameter: Tissue Value: Aerial
  misc_feature: MA Experiment 108607 PARAMETER Experiment Name: At_100uM_ABA_cDNA_P Parameter: Treatment Value: 100uM ABA vs. No Treatment
  misc_feature: MA Experiment ID: 108608 Result: Up-regulated in Transcription
  misc_feature: MA Experiment 108608 PARAMETER Experiment Name: At_100uM_ABA_cDNA_P Parameter: Timepoint (hr) Value: 1
  misc_feature: MA Experiment 108608 PARAMETER Experiment Name: At_100uM_ABA_cDNA_P Parameter: Tissue Value: Aerial
  misc_feature: MA Experiment 108608 PARAMETER Experiment Name: At_100uM_ABA_cDNA_P Parameter: Treatment Value: 100uM ABA vs. No Treatment
  misc_feature: MA Experiment ID: 108609 Result: Up-regulated in Transcription
  misc_feature: MA Experiment 108609 PARAMETER Experiment Name: At_100uM_ABA_cDNA_P Parameter: Timepoint (hr) Value: 24
  misc_feature: MA Experiment 108609 PARAMETER Experiment Name: At_100uM_ABA_cDNA_P Parameter: Tissue Value: Aerial
  misc_feature: MA Experiment 108609 PARAMETER Experiment Name: At_100uM_ABA_cDNA_P Parameter: Treatment Value: 100uM ABA vs. No Treatment
  misc_feature: MA Experiment ID: 20000030 Result: Down-regulated in Transcription
  misc_feature: MA Experiment 20000030 PARAMETER Experiment Name: At_CS6630_Roots_cDNA_P Parameter: Plant Line Value: CS6630 vs. WS
  misc_feature: MA Experiment 20000030 PARAMETER Experiment Name: At_CS6630_Roots_cDNA_P Parameter: Tissue Value: Roots
  misc_feature: MA Experiment ID: 20000068 Result: Up-regulated in Transcription
  misc_feature: MA Experiment ID: 20000069 Result: Up-regulated in Transcription
  misc_feature: MA Experiment 20000069 PARAMETER Experiment Name: At_100uM_ABA_Mutants_cDNA_P Parameter: Plant Line Value: CS23
  misc_feature: MA Experiment 20000069 PARAMETER Experiment Name: At_100uM_ABA_Mutants_cDNA_P Parameter: Timepoint (hr) Value: 6
  misc_feature: MA Experiment 20000069 PARAMETER Experiment Name: At_100uM_ABA_Mutants_cDNA_P Parameter: Tissue Value: Aerial
  misc_feature: MA Experiment 20000069 PARAMETER Experiment Name: At_100uM_ABA_Mutants_cDNA_P Parameter: Treatment Value: 100uM ABA vs. No Treatment
  misc_feature: MA Experiment ID: 20000070 Result: Up-regulated in Transcription
  misc_feature: MA Experiment 20000070 PARAMETER Experiment Name: At_100uM_ABA_Mutants_cDNA_P Parameter: Plant Line Value: CS24
  misc_feature: MA Experiment 20000070 PARAMETER Experiment Name: At_100uM_ABA_Mutants_cDNA_P Parameter: Timepoint (hr) Value: 6
  misc_feature: MA Experiment 20000070 PARAMETER Experiment Name: At_100uM_ABA_Mutants_cDNA_P Parameter: Tissue Value: Aerial
  misc_feature: MA Experiment 20000070 PARAMETER Experiment Name: At_100uM_ABA_Mutants_cDNA_P Parameter: Treatment Value: 100uM ABA vs. No Treatment
  misc_feature: MA Experiment ID: 20000071 Result: Up-regulated in Transcription
  misc_feature: MA Experiment 20000071 PARAMETER Experiment Name: At_100uM_ABA_Mutants_cDNA_P Parameter: Plant Line Value: CS8104
  misc_feature: MA Experiment 20000071 PARAMETER Experiment Name: At_100uM_ABA_Mutants_cDNA_P Parameter: Timepoint (hr) Value: 6
  misc_feature: MA Experiment 20000071 PARAMETER Experiment Name: At_100uM_ABA_Mutants_cDNA_P Parameter: Tissue Value: Aerial
  misc_feature: MA Experiment 20000071 PARAMETER Experiment Name: At_100uM_ABA_Mutants_cDNA_P Parameter: Treatment Value: 100uM ABA vs. No Treatment
  misc_feature: MA Experiment ID: 20000072 Result: Up-regulated in Transcription
  misc_feature: MA Experiment 20000072 PARAMETER Experiment Name: At_100uM_ABA_Mutants_cDNA_P Parameter: Plant Line Value: CS8105
  misc_feature: MA Experiment 20000072 PARAMETER Experiment Name: At_100uM_ABA_Mutants_cDNA_P Parameter: Timepoint (hr) Value: 6
  misc_feature: MA Experiment 20000072 PARAMETER Experiment Name: At_100uM_ABA_Mutants_cDNA_P Parameter: Tissue Value: Aerial
  misc_feature: MA Experiment 20000072 PARAMETER Experiment Name: At_100uM_ABA_Mutants_cDNA_P Parameter: Treatment Value: 100uM ABA vs. No Treatment
  misc_feature: MA Experiment ID: 20000086 Result: Up-regulated in Transcription
  misc_feature: MA Experiment 20000086 PARAMETER Experiment Name: At_100uM_ABA_Mutants_cDNA_P Parameter: Plant Line Value: CS22
  misc_feature: MA Experiment 20000086 PARAMETER Experiment Name: At_100uM_ABA_Mutants_cDNA_P Parameter: Timepoint (hr) Value: 6
  misc_feature: MA Experiment 20000086 PARAMETER Experiment Name: At_100uM_ABA_Mutants_cDNA_P Parameter: Tissue Value: Aerial
  misc_feature: MA Experiment 20000086 PARAMETER Experiment Name: At_100uM_ABA_Mutants_cDNA_P Parameter: Treatment Value: 100uM ABA vs. No Treatment
  misc_feature: MA Experiment ID: 20000087 Result: Up-regulated in Transcription
  misc_feature: MA Experiment 20000087 PARAMETER Experiment Name: At_100uM_ABA_Mutants_cDNA_P Parameter: Plant Line Value: WS
  misc_feature: MA Experiment 20000087 PARAMETER Experiment Name: At_100uM_ABA_Mutants_cDNA_P Parameter: Timepoint (hr) Value: 6
  misc_feature: MA Experiment 20000087 PARAMETER Experiment Name: At_100uM_ABA_Mutants_cDNA_P Parameter: Tissue Value: Aerial
  misc_feature: MA Experiment 20000087 PARAMETER Experiment Name: At_100uM_ABA_Mutants_cDNA_P Parameter: Treatment Value: 100uM ABA vs. No Treatment
  misc_feature: MA Experiment ID: 20000088 Result: Up-regulated in Transcription
  misc_feature: MA Experiment 20000088 PARAMETER Experiment Name: At_100uM_ABA_Mutants_cDNA_P Parameter: Plant Line Value: Landsberg
  misc_feature: MA Experiment 20000088 PARAMETER Experiment Name: At_100uM_ABA_Mutants_cDNA_P Parameter: Timepoint (hr) Value: 6
  misc_feature: MA Experiment 20000088 PARAMETER Experiment Name: At_100uM_ABA_Mutants_cDNA_P Parameter: Tissue Value: Aerial
  misc_feature: MA Experiment 20000088 PARAMETER Experiment Name: At_100uM_ABA_Mutants_cDNA_P Parameter: Treatment Value: 100uM ABA vs. No Treatment
  misc_feature: MA Experiment ID: 20000090 Result: Up-regulated in Transcription
  misc_feature: MA Experiment ID: 20000112 Result: Down-regulated in Transcription
  misc_feature: MA Experiment 20000112 PARAMETER Experiment Name: At_42deg_Heat_cDNA_P Parameter: Temperature (deg C) Value: 42 vs. 22
  misc_feature: MA Experiment 20000112 PARAMETER Experiment Name: At_42deg_Heat_cDNA_P Parameter: Timepoint (hr) Value: 2
  misc_feature: MA Experiment 20000112 PARAMETER Experiment Name: At_42deg_Heat_cDNA_P Parameter: Tissue Value: Aerial
  misc_feature: MA Experiment ID: 20000113 Result: Down-regulated in Transcription
  misc_feature: MA Experiment 20000113 PARAMETER Experiment Name: At_42deg_Heat_cDNA_P Parameter: Temperature (deg C) Value: 42 vs. 22
  misc_feature: MA Experiment 20000113 PARAMETER Experiment Name: At_42deg_Heat_cDNA_P Parameter: Timepoint (hr) Value: 8
  misc_feature: MA Experiment 20000113 PARAMETER Experiment Name: At_42deg_Heat_cDNA_P Parameter: Tissue Value: Aerial
  misc_feature: MA Experiment ID: 20000169 Result: Up-regulated in Transcription
  misc_feature: MA Experiment 20000169 PARAMETER Experiment Name: At_100uM_ABA_P Parameter: Age (day) Value: 14
  misc_feature: MA Experiment 20000169 PARAMETER Experiment Name: At_100uM_ABA_P Parameter: Organism Value: A. thaliana
  misc_feature: MA Experiment 20000169 PARAMETER Experiment Name: At_100uM_ABA_P Parameter: Plant Line Value: WS
  misc_feature: MA Experiment 20000169 PARAMETER Experiment Name: At_100uM_ABA_P Parameter: Timepoint (hr) Value: 6
  misc_feature: MA Experiment 20000169 PARAMETER Experiment Name: At_100uM_ABA_P Parameter: Tissue Value: Aerial
  misc_feature: MA Experiment 20000169 PARAMETER Experiment Name: At_100uM_ABA_P Parameter: Treatment Value: 100uM ABA vs. No Treatment
  misc_feature: MA Experiment ID: 20000180 Result: Up-regulated in Transcription
  misc_feature: MA Experiment 20000180 PARAMETER Experiment Name: At_Germinating_Seeds_P Parameter: Age (hr) Value: 24 vs. 0
  misc_feature: MA Experiment 20000180 PARAMETER Experiment Name: At_Germinating_Seeds_P Parameter: Tissue Value: Germinating Seeds
  misc_feature: MA Experiment ID: 20000224 Result: Up-regulated in Transcription
  misc_feature: MA Experiment ID: 20000234 Result: Up-regulated in Transcription
  misc_feature: MA Experiment 20000234 PARAMETER Experiment Name: At_Siliques_P Parameter: Age (day) Value: 21
  misc_feature: MA Experiment 20000234 PARAMETER Experiment Name: At_Siliques_P Parameter: Organism Value: A. thaliana
  misc_feature: MA Experiment 20000234 PARAMETER Experiment Name: At_Siliques_P Parameter: Plant Line Value: WS
  misc_feature: MA Experiment 20000234 PARAMETER Experiment Name: At_Siliques_P Parameter: Tissue Value: Less Than 5mm Siliques vs. Whole Plant
  misc_feature: MA Experiment ID: 20000264 Result: Up-regulated in Transcription
  misc_feature: MA Experiment 20000264 PARAMETER Experiment Name: At_Open_Flower_P Parameter: Age (day) Value: 21
  misc_feature: MA Experiment 20000264 PARAMETER Experiment Name: At_Open_Flower_P Parameter: Plant Line Value: WS
  misc_feature: MA Experiment 20000264 PARAMETER Experiment Name: At_Open_Flower_P Parameter: Tissue Value: Open Flower vs. Whole Plant
  misc_feature: MA Experiment ID: 20000265 Result: Up-regulated in Transcription
  misc_feature: MA Experiment 20000265 PARAMETER Experiment Name: At_Open_Flower_P Parameter: Age (day) Value: 21
  misc_feature: MA Experiment 20000265 PARAMETER Experiment Name: At_Open_Flower_P Parameter: Plant Line Value: WS
  misc_feature: MA Experiment 20000265 PARAMETER Experiment Name: At_Open_Flower_P Parameter: Tissue Value: Closed Flower vs. Whole Plant
  misc_feature: MA Experiment ID: 20000267 Result: Up-regulated in Transcription
  misc_feature: MA Experiment 20000267 PARAMETER Experiment Name: At_Drought_P Parameter: Age (day) Value: 7
  misc_feature: MA Experiment 20000267 PARAMETER Experiment Name: At_Drought_P Parameter: Organism Value: A. thaliana
  misc_feature: MA Experiment 20000267 PARAMETER Experiment Name: At_Drought_P Parameter: Plant Line Value: WS
  misc_feature: MA Experiment 20000267 PARAMETER Experiment Name: At_Drought_P Parameter: Timepoint (hr) Value: 6
  misc_feature: MA Experiment 20000267 PARAMETER Experiment Name: At_Drought_P Parameter: Tissue Value: Whole Plant
  misc_feature: MA Experiment 20000267 PARAMETER Experiment Name: At_Drought_P Parameter: Treatment Value: Drought vs. No Drought
  misc_feature: MA Experiment ID: 20000268 Result: Up-regulated in Transcription
  misc_feature: MA Experiment 20000268 PARAMETER Experiment Name: At_100mM_NaCl__P Parameter: Age (day) Value: 14
  misc_feature: MA Experiment 20000268 PARAMETER Experiment Name: At_100mM_NaCl__P Parameter: Organism Value: A. thaliana
  misc_feature: MA Experiment 20000268 PARAMETER Experiment Name: At_100mM_NaCl__P Parameter: Plant Line Value: WS
  misc_feature: MA Experiment 20000268 PARAMETER Experiment Name: At_100mM_NaCl__P Parameter: Timepoint (hr) Value: 6
  misc_feature: MA Experiment 20000268 PARAMETER Experiment Name: At_100mM_NaCl__P Parameter: Tissue Value: Whole Plant
  misc_feature: MA Experiment 20000268 PARAMETER Experiment Name: At_100mM_NaCl__P Parameter: Treatment Value: 100mM NaCl vs. No Treatment
  misc_feature: MA Experiment ID: 20000269 Result: Up-regulated in Transcription
  misc_feature: MA Experiment 20000269 PARAMETER Experiment Name: At_1mM_KNO3_L-vs-H_Roots_P Parameter: Age (day) Value: 7,10,12
  misc_feature: MA Experiment 20000269 PARAMETER Experiment Name: At_1mM_KNO3_L-vs-H_Roots_P Parameter: Organism Value: A. thaliana
  misc_feature: MA Experiment 20000269 PARAMETER Experiment Name: At_1mM_KNO3_L-vs-H_Roots_P Parameter: Plant Line Value: WS
  misc_feature: MA Experiment 20000269 PARAMETER Experiment Name: At_1mM_KNO3_L-vs-H_Roots_P Parameter: Timepoint (day) Value: 7,10,12
  misc_feature: MA Experiment 20000269 PARAMETER Experiment Name: At_1mM_KNO3_L-vs-H_Roots_P Parameter: Tissue Value: Roots
  misc_feature: MA Experiment 20000269 PARAMETER Experiment Name: At_1mM_KNO3_L-vs-H_Roots_P Parameter: Treatment Value: 1mM KNO3 vs. 50mM KNO3
  misc_feature: MA Experiment ID: 20000286 Result: Up-regulated in Transcription
  misc_feature: MA Experiment 20000286 PARAMETER Experiment Name: At_Open_Flower_P Parameter: Age (day) Value: 21
  misc_feature: MA Experiment 20000286 PARAMETER Experiment Name: At_Open_Flower_P Parameter: Plant Line Value: WS
  misc_feature: MA Experiment 20000286 PARAMETER Experiment Name: At_Open_Flower_P Parameter: Tissue Value: Half Open vs. Whole Plant
  misc_feature: MA Experiment ID: 20000308 Result: Up-regulated in Transcription
  misc_feature: MA Experiment 20000308 PARAMETER Experiment Name: At_100mM_NaCl__P Parameter: Age (day) Value: 17
  misc_feature: MA Experiment 20000308 PARAMETER Experiment Name: At_100mM_NaCl__P Parameter: Organism Value: A. thaliana
  misc_feature: MA Experiment 20000308 PARAMETER Experiment Name: At_100mM_NaCl__P Parameter: Plant Line Value: WS
  misc_feature: MA Experiment 20000308 PARAMETER Experiment Name: At_100mM_NaCl__P Parameter: Timepoint (hr) Value: 72
  misc_feature: MA Experiment 20000308 PARAMETER Experiment Name: At_100mM_NaCl__P Parameter: Tissue Value: Whole Plant
  misc_feature: MA Experiment 20000308 PARAMETER Experiment Name: At_100mM_NaCl__P Parameter: Treatment Value: 100mM NaCl vs. No Treatment
  misc_feature: MA Experiment ID: 20000436 Result: Up-regulated in Transcription
  misc_feature: MA Experiment 20000436 PARAMETER Experiment Name: At_Drought_P Parameter: Age (day) Value: 7
  misc_feature: MA Experiment 20000436 PARAMETER Experiment Name: At_Drought_P Parameter: Organism Value: A. thaliana
  misc_feature: MA Experiment 20000436 PARAMETER Experiment Name: At_Drought_P Parameter: Plant Line Value: WS
  misc_feature: MA Experiment 20000436 PARAMETER Experiment Name: At_Drought_P Parameter: Timepoint (hr) Value: 12
  misc_feature: MA Experiment 20000436 PARAMETER Experiment Name: At_Drought_P Parameter: Tissue Value: Whole Plant
  misc_feature: MA Experiment 20000436 PARAMETER Experiment Name: At_Drought_P Parameter: Treatment Value: Drought vs. No Drought
  misc_feature: MA Experiment ID: 20000438 Result: Down-regulated in Transcription
  misc_feature: MA Experiment 20000438 PARAMETER Experiment Name: At_Shoots__P Parameter: Age (day) Value: 14
  misc_feature: MA Experiment 20000438 PARAMETER Experiment Name: At_Shoots__P Parameter: Tissue Value: Shoots vs. Whole Plant
  misc_feature: MA Experiment ID: 20000453 Result: Up-regulated in Transcription
  misc_feature: MA Experiment 20000453 PARAMETER Experiment Name: At_100uM_ABA_P Parameter: Age (day) Value: 15
  misc_feature: MA Experiment 20000453 PARAMETER Experiment Name: At_100uM_ABA_P Parameter: Organism Value: A. thaliana
  misc_feature: MA Experiment 20000453 PARAMETER Experiment Name: At_100uM_ABA_P Parameter: Plant Line Value: WS
  misc_feature: MA Experiment 20000453 PARAMETER Experiment Name: At_100uM_ABA_P Parameter: Timepoint (hr) Value: 24
  misc_feature: MA Experiment 20000453 PARAMETER Experiment Name: At_100uM_ABA_P Parameter: Tissue Value: Aerial
  misc_feature: MA Experiment 20000453 PARAMETER Experiment Name: At_100uM_ABA_P Parameter: Treatment Value: 100uM ABA vs. No Treatment
  misc_feature: MA Experiment ID: 20000456 Result: Up-regulated in Transcription
  misc_feature: MA Experiment 20000456 PARAMETER Experiment Name: At_100uM_BA_P Parameter: Age (day) Value: 14
  misc_feature: MA Experiment 20000456 PARAMETER Experiment Name: At_100uM_BA_P Parameter: Organism Value: A. thaliana
  misc_feature: MA Experiment 20000456 PARAMETER Experiment Name: At_100uM_BA_P Parameter: Plant Line Value: WS
  misc_feature: MA Experiment 20000456 PARAMETER Experiment Name: At_100uM_BA_P Parameter: Timepoint (hr) Value: 6
  misc_feature: MA Experiment 20000456 PARAMETER Experiment Name: At_100uM_BA_P Parameter: Tissue Value: Aerial
  misc_feature: MA Experiment 20000456 PARAMETER Experiment Name: At_100uM_BA_P Parameter: Treatment Value: 100uM BA vs. No Treatment
  misc_feature: MA Experiment ID: 20000495 Result: Down-regulated in Transcription
  misc_feature: MA Experiment 20000495 PARAMETER Experiment Name: At_Guard_Cells_P Parameter: Harvest Date Value: 8/2/2002
  misc_feature: MA Experiment 20000495 PARAMETER Experiment Name: At_Guard_Cells_P Parameter: Organism Value: A. thaliana
  misc_feature: MA Experiment 20000495 PARAMETER Experiment Name: At_Guard_Cells_P Parameter: Tissue Value: Guard Cells vs. Leaves
  misc_feature: MA Experiment ID: 20000506 Result: Up-regulated in Transcription
  misc_feature: MA Experiment 20000506 PARAMETER Experiment Name: At_Wounding_P Parameter: Organism Value: A. thaliana
  misc_feature: MA Experiment 20000506 PARAMETER Experiment Name: At_Wounding_P Parameter: Plant Line Value: WS
  misc_feature: MA Experiment 20000506 PARAMETER Experiment Name: At_Wounding_P Parameter: Timepoint (hr) Value: 6
  misc_feature: MA Experiment 20000506 PARAMETER Experiment Name: At_Wounding_P Parameter: Tissue Value: Aerial
  misc_feature: MA Experiment 20000506 PARAMETER Experiment Name: At_Wounding_P Parameter: Treatment Value: Wounding vs. No Wounding
  misc_feature: MA Experiment ID: 20000527 Result: Down-regulated in Transcription
  misc_feature: MA Experiment 20000527 PARAMETER Experiment Name: At_10percent_PEG_P Parameter: Age (day) Value: 20
  misc_feature: MA Experiment 20000527 PARAMETER Experiment Name: At_10percent_PEG_P Parameter: Organism Value: A. thaliana
  misc_feature: MA Experiment 20000527 PARAMETER Experiment Name: At_10percent_PEG_P Parameter: Plant Line Value: WS
  misc_feature: MA Experiment 20000527 PARAMETER Experiment Name: At_10percent_PEG_P Parameter: Timepoint (day) Value: 20
  misc_feature: MA Experiment 20000527 PARAMETER Experiment Name: At_10percent_PEG_P Parameter: Tissue Value: Whole Plant
  misc_feature: MA Experiment 20000527 PARAMETER Experiment Name: At_10percent_PEG_P Parameter: Treatment Value: 10percent PEG vs. No Treatment
  misc_feature: MA Experiment ID: 20000794 Result: Up-regulated in Transcription
  misc_feature: MA Experiment 20000794 PARAMETER Experiment Name: At_Petals_P Parameter: Age (day) Value: 23-25 days
  misc_feature: MA Experiment 20000794 PARAMETER Experiment Name: At_Petals_P Parameter: Plant Line Value: WS
  misc_feature: MA Experiment 20000794 PARAMETER Experiment Name: At_Petals_P Parameter: Tissue Value: Petals vs. Whole plant
  misc_feature: MA Experiment ID: 20001450 Result: Down-regulated in Transcription
  misc_feature: MA Experiment 20001450 PARAMETER Experiment Name: At_Far-red-induction_P Parameter: Age (day) Value: 7
  misc_feature: MA Experiment 20001450 PARAMETER Experiment Name: At_Far-red-induction_P Parameter: Light Value: Far-red vs. White
  misc_feature: MA Experiment 20001450 PARAMETER Experiment Name: At_Far-red-induction_P Parameter: Organism Value: A. thaliana
  misc_feature: MA Experiment 20001450 PARAMETER Experiment Name: At_Far-red-induction_P Parameter: Plant Line Value: Columbia
  misc_feature: MA Experiment 20001450 PARAMETER Experiment Name: At_Far-red-induction_P Parameter: Timepoint (hr) Value: 8
  misc_feature: MA Experiment 20001450 PARAMETER Experiment Name: At_Far-red-induction_P Parameter: Tissue Value: Whole Plant
  misc_feature: MA Experiment ID: 20001558 Result: Down-regulated in Transcription
  misc_feature: MA Experiment 20001558 PARAMETER Experiment Name: At_Drought_Soil_Dry_P Parameter: Age (day) Value: 27
  misc_feature: MA Experiment 20001558 PARAMETER Experiment Name: At_Drought_Soil_Dry_P Parameter: Organism Value: A. thaliana
  misc_feature: MA Experiment 20001558 PARAMETER Experiment Name: At_Drought_Soil_Dry_P Parameter: Plant Line Value: WS
  misc_feature: MA Experiment 20001558 PARAMETER Experiment Name: At_Drought_Soil_Dry_P Parameter: Post Timepoint (hr) Value: 6
  misc_feature: MA Experiment 20001558 PARAMETER Experiment Name: At_Drought_Soil_Dry_P Parameter: Post-Treatment Value: Re-Water vs. No Drought
  misc_feature: MA Experiment 20001558 PARAMETER Experiment Name: At_Drought_Soil_Dry_P Parameter: Timepoint (day) Value: 13
  misc_feature: MA Experiment 20001558 PARAMETER Experiment Name: At_Drought_Soil_Dry_P Parameter: Treatment Value: Drought vs. No Drought
  misc_feature: MA Experiment ID: 20001769 Result: Up-regulated in Transcription
  misc_feature: MA Experiment 20001769 PARAMETER Experiment Name: At_Far-red-enriched-adult_P Parameter: Age (day) Value: 28
  misc_feature: MA Experiment 20001769 PARAMETER Experiment Name: At_Far-red-enriched-adult_P Parameter: Light Value: Far-red enriched vs. White
  misc_feature: MA Experiment 20001769 PARAMETER Experiment Name: At_Far-red-enriched-adult_P Parameter: Organism Value: A. thaliana
  misc_feature: MA Experiment 20001769 PARAMETER Experiment Name: At_Far-red-enriched-adult_P Parameter: Plant Line Value: Columbia
  misc_feature: MA Experiment 20001769 PARAMETER Experiment Name: At_Far-red-enriched-adult_P Parameter: Timepoint (hr) Value: 4
  misc_feature: MA Experiment 20001769 PARAMETER Experiment Name: At_Far-red-enriched-adult_P Parameter: Tissue Value: Aerial
  misc_feature: MA Experiment ID: 20001906 Result: Up-regulated in Transcription
  misc_feature: MA Experiment 20001906 PARAMETER Experiment Name: At_Drought_Reproduction_P Parameter: Age (day) Value: 35
  misc_feature: MA Experiment 20001906 PARAMETER Experiment Name: At_Drought_Reproduction_P Parameter: Organism Value: A. thaliana
  misc_feature: MA Experiment 20001906 PARAMETER Experiment Name: At_Drought_Reproduction_P Parameter: Plant Line Value: WS
  misc_feature: MA Experiment 20001906 PARAMETER Experiment Name: At_Drought_Reproduction_P Parameter: Timepoint (day) Value: 5
  misc_feature: MA Experiment 20001906 PARAMETER Experiment Name: At_Drought_Reproduction_P Parameter: Tissue Value: Siliques
  misc_feature: MA Experiment 20001906 PARAMETER Experiment Name: At_Drought_Reproduction_P Parameter: Treatment Value: Drought vs. No Drought
  misc_feature: MA Experiment ID: 20001908 Result: Up-regulated in Transcription
  misc_feature: MA Experiment 20001908 PARAMETER Experiment Name: At_Drought_Reproduction_P Parameter: Age (day) Value: 40
  misc_feature: MA Experiment 20001908 PARAMETER Experiment Name: At_Drought_Reproduction_P Parameter: Organism Value: A. thaliana
  misc_feature: MA Experiment 20001908 PARAMETER Experiment Name: At_Drought_Reproduction_P Parameter: Plant Line Value: WS
  misc_feature: MA Experiment 20001908 PARAMETER Experiment Name: At_Drought_Reproduction_P Parameter: Timepoint (day) Value: 10
  misc_feature: MA Experiment 20001908 PARAMETER Experiment Name: At_Drought_Reproduction_P Parameter: Tissue Value: Siliques
  misc_feature: MA Experiment 20001908 PARAMETER Experiment Name: At_Drought_Reproduction_P Parameter: Treatment Value: Drought vs. No Drought
aaccctcaaaatcacaatcttctcttacaaaaaactttgaaagatgaagattcttctagcatcattgtgtttgatcagtcttctcgtaatcttgccttctgtcttctctgcttcttcttcctctgaagattttgatttcttctacttcgtccaacaatggccaggatcatactgtgacacacagaagaagtgttgttatccaaattcaggcaaaccagctgctgattttggcattcatggtctttggcctaactacaaagatggaacttatccatctaactgtgatgcctctaaaccattcgatagctcaacgatatcagatcttctcacttcaatgaagaagagctggccaacactggcttgcccaagcggttcaggtgaagcgttttgggagcacgaatgggagaagcatggtacttgctctgaatcggttatcgatcaacatgaatatttccaaaccgctcttaaccttaaacagaaaaccaatctccttggagctctaaccaaagccgggattaatccggatggaaaatcttactctttggagagcataagagattcgataaaagagtcaattggtttcactccttgggttgagtgtaacagagatggttctggtaatagccaattgtaccaagtctatctttgtgttgaccggtctggttccggtttaatcgaatgtccggttttcccacatgggaaatgtggagctgagatcgaattcccttctttttagtttccaatttctaaattcagtctcttgaaccggcatcgatcttttgttcatggagattggtttggtcaaaaagaagatttaatgtaataaaaatttatgggatattggataatgatatagttcaatttcaataatattctacgt

SEQ ID NO: 84282 - protein, 230 aa, Arabidopsis thaliana; identical to SEQ ID NO: 36323
  peptide (1)..(230): Ceres Seq. ID no. 12674102
  misc_feature (30)..(219): Pfam Name: Ribonuclease T2 family Pfam Description: Ribonuclease T2 family
  misc_feature (1)..(230): Homolog of NCBI NO: 15227068 NR Description: ribonuclease, RNS1; protein id: At2g02990.1, by cDNA: 27242., supported by cDNA: gi_18252956, supported by gi_561997 [Arabidopsis thaliana] >gi|1173103|sp|P42813|RNS1_ARATH
  misc_feature (1)..(230): Homolog of NCBI NO: 21555182 NR Description: ribonuclease, RNS1 [Arabidopsis thaliana]
  misc_feature (10)..(230): Homolog of NCBI NO: 3860325 NR Description: ribonuclease T2 [Cicer arietinum]
  misc_feature (7)..(230): Homolog of NCBI NO: 9081845 NR Description: S-like ribonuclease [Prunus dulcis]
  misc_feature (6)..(230): Homolog of NCBI NO: 1710615 NR Description: Extracellular ribonuclease LE precursor (RNase LE)
  misc_feature (10)..(230): Homolog of NCBI NO: 532754 NR Description: RNase NE [Nicotiana alata]
  misc_feature (10)..(230): Homolog of NCBI NO: 2148018 NR Description: ribonuclease II (EC 3.1.-.-) precursor,
  misc_feature (24)..(230): Homolog of NCBI NO: 10120506 NR Description: Chain A, Crystal Structure Of Rnase Le
  misc_feature (14)..(230): Homolog of NCBI NO: 7435266 NR Description: ribonuclease M5 (EC 3.1.-.-) precursor,
  misc_feature (10)..(230): Homolog of NCBI NO: 7768564 NR Description: RNase [Nicotiana tabacum]

SEQ ID NO: 84283 - protein, 133 aa, Arabidopsis thaliana; identical to SEQ ID NO: 36324
  peptide (1)..(133): Ceres Seq. ID no. 12674103
  misc_feature (1)..(122): Pfam Name: Ribonuclease T2 family Pfam Description: Ribonuclease T2 family
  misc_feature (1)..(133): Homolog of NCBI NO: 15227068 NR Description: ribonuclease, RNS1; protein id: At2g02990.1, by cDNA: 27242., supported by cDNA: gi_18252956, supported by gi_561997 [Arabidopsis thaliana] >gi|1173103|sp|P42813|RNS1_ARATH
  misc_feature (1)..(133): Homolog of NCBI NO: 21555182 NR Description: ribonuclease, RNS1 [Arabidopsis thaliana]
  misc_feature (1)..(133): Homolog of NCBI NO: 3860325 NR Description: ribonuclease T2 [Cicer arietinum]
  misc_feature (1)..(133): Homolog of NCBI NO: 9081845 NR Description: S-like ribonuclease [Prunus dulcis]
  misc_feature (1)..(133): Homolog of NCBI NO: 1710615 NR Description: Extracellular ribonuclease LE precursor (RNase LE)
  misc_feature (1)..(133): Homolog of NCBI NO: 532754 NR Description: RNase NE [Nicotiana alata]
  misc_feature (1)..(133): Homolog of NCBI NO: 2148018 NR Description: ribonuclease II (EC 3.1.-.-) precursor,
  misc_feature (1)..(133): Homolog of NCBI NO: 10120506 NR Description: Chain A, Crystal Structure Of Rnase Le
  misc_feature (1)..(133): Homolog of NCBI NO: 7435266 NR Description: ribonuclease M5 (EC 3.1.-.-) precursor,
  misc_feature (1)..(133): Homolog of NCBI NO: 7768564 NR Description: RNase [Nicotiana tabacum]

SEQ ID NO: 84284 - DNA, 1935 bp, Arabidopsis thaliana
  misc_feature (1)..(1935): Ceres Seq. ID no. 12674114
  misc_feature: MA Experiment ID: 108434 Result: Up-regulated in Transcription
  misc_feature: MA Experiment 108434 PARAMETER Experiment Name: At_Root_Tips_cDNA_P Parameter: Tissue Value: Root Tips
  misc_feature: MA Experiment ID: 108461 Result: Down-regulated in Transcription
  misc_feature: MA Experiment 108461 PARAMETER Experiment Name: At_Germinating_Seeds_cDNA_P Parameter: Age (day) Value: 1 vs. 0
  misc_feature: MA Experiment 108461 PARAMETER Experiment Name: At_Germinating_Seeds_cDNA_P Parameter: Tissue Value: Germinating Seeds
  misc_feature: MA Experiment ID: 108462 Result: Down-regulated in Transcription
  misc_feature: MA Experiment 108462 PARAMETER Experiment Name: At_Germinating_Seeds_cDNA_P Parameter: Age (day) Value: 2 vs. 0
  misc_feature: MA Experiment 108462 PARAMETER Experiment Name: At_Germinating_Seeds_cDNA_P Parameter: Tissue Value: Germinating Seeds
  misc_feature: MA Experiment ID: 108463 Result: Down-regulated in Transcription
  misc_feature: MA Experiment 108463 PARAMETER Experiment Name: At_Germinating_Seeds_cDNA_P Parameter: Age (day) Value: 3 vs. 0
  misc_feature: MA Experiment 108463 PARAMETER Experiment Name: At_Germinating_Seeds_cDNA_P Parameter: Tissue Value: Germinating Seeds
  misc_feature: MA Experiment ID: 20000180 Result: Down-regulated in Transcription
  misc_feature: MA Experiment 20000180 PARAMETER Experiment Name: At_Germinating_Seeds_P Parameter: Age (hr) Value: 24 vs. 0
  misc_feature: MA Experiment 20000180 PARAMETER Experiment Name: At_Germinating_Seeds_P Parameter: Tissue Value: Germinating Seeds
  misc_feature: MA Experiment ID: 20001558 Result: Up-regulated in Transcription
  misc_feature: MA Experiment 20001558 PARAMETER Experiment Name: At_Drought_Soil_Dry_P Parameter: Age (day) Value: 27
  misc_feature: MA Experiment 20001558 PARAMETER Experiment Name: At_Drought_Soil_Dry_P Parameter: Organism Value: A. thaliana
  misc_feature: MA Experiment 20001558 PARAMETER Experiment Name: At_Drought_Soil_Dry_P Parameter: Plant Line Value: WS
  misc_feature: MA Experiment 20001558 PARAMETER Experiment Name: At_Drought_Soil_Dry_P Parameter: Post Timepoint (hr) Value: 6
  misc_feature: MA Experiment 20001558 PARAMETER Experiment Name: At_Drought_Soil_Dry_P Parameter: Post-Treatment Value: Re-Water vs. No Drought
  misc_feature: MA Experiment 20001558 PARAMETER Experiment Name: At_Drought_Soil_Dry_P Parameter: Timepoint (day) Value: 13
  misc_feature: MA Experiment 20001558 PARAMETER Experiment Name: At_Drought_Soil_Dry_P Parameter: Treatment Value: Drought vs. No Drought
aaacccctgtaaagccaataacttgttgttccccaaagtttggttcttcatgttggaaaccgaaagcagtgtctgcgacaacatcgccggcaatgagaaatggcgagcggaagctgaaattggtggcaacgagagagctctgcaagcgcttcgagaactcattatcttcccttttcgttaccctctcgaagctcgaactcttggtctcaaatggcctagaggattgcttctctacggtcctcctggaaccggcaagacaagcttggtccgtgctgttgtccaggaatgtgatgcacatttgattgttttaagccctcattctgtacatcgagcacatgctggagaaagcgagaaagtcttaagggaagctttcgctgaggcttcttctcacgctgtttcagacaagccttctgtgatttttattgatgaaatcgatgttctttgtcctcgtcgtgatgctagacgagaacaagatgttcgtattgcttctcaactgtttacacttatggactcaaacaagccttcatcatctgcaccaagagttgttgttgtagcatccacaaatagggtggatgcgattgacccagcgctaagaagagcgggacgatttgatgctttagttgaagtgagcacaccaaatgaggaggatcgtttaaaaatcctgcagctgtacacaaagaaagtcaatttagatcctagtgtcgatcttcaagccattgcaatatcttgcaacggttatgttggagcagatttggaagctttatgtcgtgaagcgacaatatctgcaagtaaaagatcttcagattctcttattctaacatctcaagacttcaagattgcaaaatctgtggttggtccaagtataaacagaggcatcacagttgaaatccctaaagtgacatgggacgatgttggtggtcttaaagacttaaagaaaaagctccagcaagctgttgaatggccaatcaaacattcagctgcatttgtaaaaatgggcatatcgccaatgcgtgggatacttctacatggtcctccaggttgctcaaagacaactcttgctaaagccgctgcaaatgctgctcaagcctccttcttttccttaagctgtgcggagctattttctatgtatgttggagaaggtgaagcattattgcggaatacatttcaaagagctcgacttgcttctccaagtataatattctttgatgaagctgatgtcgttgcctgtaaaagaggtgatgagagctcaagcaatagttctacagttggagaaaggcttctatctacactgttaaccgaaatggacggtcttgaagaagcaaagggaatcctcgtcttggctgccacaaaccgcccgtatgcaattgatgctgctctaatgcgacctggtcgatttgatctcgtgctatacgtgccaccgcctgatctagaagcccggtttgaaatactgcaagtgcatacacgcaacatgacactaggagacgacgttgatctcagaaaaatcgctgaagaaaccgatctcttcacaggtgccgagctcgagggtctatgcagagaaagcggaactgtctcacttagagaaaacatcgcagcaaccgctgtcttcaatcgccatttccaaaccgcaaaaagctcgcttaaaccagcgttaacaatcgaagaagtcgaaacttattcatcattcaggaaggcggcgaaaagatctgattcgaaaccgattccgattaacaaaaagaaggcgacttccaccgtcttcggattctcatggcaattaggtgttttgagcttattgttgcttgctactggaaactattacttcaaccacactaaacatgaattactagtagcttctgctacatgagacttgaaacagctcaaagttaaaaaaagttgctaattttgttttattcataaataccaaaatatcttttgttt

SEQ ID NO: 84285 - protein, 619 aa, Arabidopsis thaliana
  peptide (1)..(619): Ceres Seq. ID no. 12674115
  misc_feature (74)..(264): Pfam Name: ATPase family associated with various cellular Pfam Description: ATPase family associated with various cellular
  misc_feature (17)..(619): Homolog of NCBI NO: 15227690 NR Description: putative AAA-type ATPase; protein id: supported by cDNA: gi_17064733 [Arabidopsis thaliana] Cell division control protein 48 homolog B (AtCDC48b)
  misc_feature (33)..(560): Homolog of NCBI NO: 38345020 NR Description: OSJNBa0029H02.4 [Oryza sativa (japonica
  misc_feature (39)..(567): Homolog of NCBI NO: 14602090 NR Description: transitional endoplasmic reticulum ATPase pernix] >gi|7435761|pir||B72479 probable transitional endoplasmic
  misc_feature (39)..(558): Homolog of NCBI NO: 11498895 NR Description: cell division control protein 48, AAA family [Archaeoglobus fulgidus] >gi|7435749|pir||H69411 cell division
  misc_feature (40)..(550): Homolog of NCBI NO: 10946660 NR Description: spermatogenesis associated factor [Mus musculus]
  misc_feature (40)..(550): Homolog of NCBI NO: 12847023 NR Description: unnamed protein product [Mus musculus]
  misc_feature (236)..(563): Homolog of NCBI NO: 11499681 NR Description: cell division control protein 48, AAA family [Archaeoglobus fulgidus] >gi|7435750|pir||B69512 cell division
  misc_feature (39)..(231): Homolog of NCBI NO: 11499681 NR Description: cell division control protein 48, AAA family [Archaeoglobus fulgidus] >gi|7435750|pir||B69512 cell division
  misc_feature (40)..(550): Homolog of NCBI NO: 21624654 NR Description: spermatogenesis associated factor SPAF [Homo >gi|19880131|gb|AAM00262.1|AF361489_1 spermatogenesis associated
  misc_feature (39)..(558): Homolog of NCBI NO: 15679634 NR Description: cell division control protein Cdc48 thermautotrophicus] >gi|7435751|pir||A69086 cell division control
NPCKANNLLFPKVWFFMLETESSVCDNIAGNEKWRAEAEIGGNERALQALRELIIFPFRYPLEARTLGLKWPRGLLLYGPPGTGKTSLVRAVVQECDAHLIVLSPHSVHRAHAGESEKVLREAFAEASSHAVSDKPSVIFIDEIDVLCPRRDARREQDVRIASQLFTLMDSNKPSSSAPRVVVVASTNRVDAIDPALRRAGRFDALVEVSTPNEEDRLKILQLYTKKVNLDPSVDLQAIAISCNGYVGADLEALCREATISASKRSSDSLILTSQDFKIAKSVVGPSINRGITVEIPKVTWDDVGGLKDLKKKLQQAVEWPIKHSAAFVKMGISPMRGILLHGPPGCSKTTLAKAAANAAQASFFSLSCAELFSMYVGEGEALLRNTFQRARLASPSIIFFDEADVVACKRGDESSSNSSTVGERLLSTLLTEMDGLEEAKGILVLAATNRPYAIDAALMRPGRFDLVLYVPPPDLEARFEILQVHTRNMTLGDDVDLRKIAEETDLFTGAELEGLCRESGTVSLRENIAATAVFNRHFQTAKSSLKPALTIEEVETYSSFRKAAKRSDSKPIPINKKKATSTVFGFSWQLGVLSLLLLATGNYYFNHTKHELLVASAT

SEQ ID NO: 84286 - protein, 603 aa, Arabidopsis thaliana; identical to SEQ ID NO: 38725
  peptide (1)..(603): Ceres Seq. ID no. 12674116
  misc_feature (58)..(248): Pfam Name: ATPase family associated with various cellular Pfam Description: ATPase family associated with various cellular
  misc_feature (1)..(603): Homolog of NCBI NO: 15227690 NR Description: putative AAA-type ATPase; protein id: supported by cDNA: gi_17064733 [Arabidopsis thaliana] Cell division control protein 48 homolog B (AtCDC48b)
  misc_feature (17)..(544): Homolog of NCBI NO: 38345020 NR Description: OSJNBa0029H02.4 [Oryza sativa (japonica
  misc_feature (23)..(551): Homolog of NCBI NO: 14602090 NR Description: transitional endoplasmic reticulum ATPase pernix] >gi|7435761|pir||B72479 probable transitional endoplasmic
  misc_feature (23)..(542): Homolog of NCBI NO: 11498895 NR Description: cell division control protein 48, AAA family [Archaeoglobus fulgidus] >gi|7435749|pir||H69411 cell division
  misc_feature (24)..(534): Homolog of NCBI NO: 10946660 NR Description: spermatogenesis associated factor [Mus musculus]
  misc_feature (24)..(534): Homolog of NCBI NO: 12847023 NR Description: unnamed protein product [Mus musculus]
  misc_feature (220)..(547): Homolog of NCBI NO: 11499681 NR Description: cell division control protein 48, AAA family [Archaeoglobus fulgidus] >gi|7435750|pir||B69512 cell division
  misc_feature (23)..(215): Homolog of NCBI NO: 11499681 NR Description: cell division control protein 48, AAA family [Archaeoglobus fulgidus] >gi|7435750|pir||B69512 cell division
  misc_feature (24)..(534): Homolog of NCBI NO: 21624654 NR Description: spermatogenesis associated factor SPAF [Homo >gi|19880131|gb|AAM00262.1|AF361489_1 spermatogenesis associated
  misc_feature (23)..(542): Homolog of NCBI NO: 15679634 NR Description: cell division control protein Cdc48 thermautotrophicus] >gi|7435751|pir||A69086 cell division control

SEQ ID NO: 84287 - protein, 451 aa, Arabidopsis thaliana; identical to SEQ ID NO: 38726
  peptide (1)..(451): Ceres Seq. ID no. 12674117
  misc_feature (1)..(96): Pfam Name: ATPase family associated with various cellular Pfam Description: ATPase family associated with various cellular
  misc_feature (1)..(451): Homolog of NCBI NO: 15227690 NR Description: putative AAA-type ATPase; protein id: supported by cDNA: gi_17064733 [Arabidopsis thaliana] Cell division control protein 48 homolog B (AtCDC48b)
  misc_feature (1)..(392): Homolog of NCBI NO: 38345020 NR Description: OSJNBa0029H02.4 [Oryza sativa (japonica
  misc_feature (1)..(399): Homolog of NCBI NO: 14602090 NR Description: transitional endoplasmic reticulum ATPase pernix] >gi|7435761|pir||B72479 probable transitional endoplasmic
  misc_feature (1)..(390): Homolog of NCBI NO: 11498895 NR Description: cell division control protein 48, AAA family [Archaeoglobus fulgidus] >gi|7435749|pir||H69411 cell division
  misc_feature (1)..(382): Homolog of NCBI NO: 10946660 NR Description: spermatogenesis associated factor [Mus musculus]
  misc_feature (1)..(382): Homolog of NCBI NO: 12847023 NR Description: unnamed protein product [Mus musculus]
  misc_feature (68)..(395): Homolog of NCBI NO: 11499681 NR Description: cell division control protein 48, AAA family [Archaeoglobus fulgidus] >gi|7435750|pir||B69512 cell division
  misc_feature (1)..(63): Homolog of NCBI NO: 11499681 NR Description: cell division control protein 48, AAA family [Archaeoglobus fulgidus] >gi|7435750|pir||B69512 cell division
  misc_feature (1)..(382): Homolog of NCBI NO: 21624654 NR Description: spermatogenesis associated factor SPAF [Homo >gi|19880131|gb|AAM00262.1|AF361489_1 spermatogenesis associated
  misc_feature (1)..(390): Homolog of NCBI NO: 15679634 NR Description: cell division control protein Cdc48 thermautotrophicus] >gi|7435751|pir||A69086 cell division control

SEQ ID NO: 84288 - DNA, 1277 bp, Arabidopsis thaliana
  misc_feature (1)..(1277): Ceres Seq. ID no. 12674134
  misc_feature: MA Experiment ID: 20000111 Result: Down-regulated in Transcription
  misc_feature: MA Experiment 20000111 PARAMETER Experiment Name: At_42deg_Heat_cDNA_P Parameter: Temperature (deg C) Value: 42 vs. 22
  misc_feature: MA Experiment 20000111 PARAMETER Experiment Name: At_42deg_Heat_cDNA_P Parameter: Timepoint (hr) Value: 6
  misc_feature: MA Experiment 20000111 PARAMETER Experiment Name: At_42deg_Heat_cDNA_P Parameter: Tissue Value: Aerial
  misc_feature: MA Experiment ID: 20000184 Result: Down-regulated in Transcription
  misc_feature: MA Experiment 20000184 PARAMETER Experiment Name: At_Shoots__P Parameter: Age (day) Value: 7
  misc_feature: MA Experiment 20000184 PARAMETER Experiment Name: At_Shoots__P Parameter: Tissue Value: Shoots vs. Whole Plant
atgattttgaaaataagcggccgaaacattatacacttcctccacacgcacaacaatagactcaaagcaaacgcaactcatatccaatcgcttttaaacgccaataatcgcgttacagtaacaactcgaaaaatggtaacactaatcgtggccaccaccgccgatccagcgtcgatcaaccctgcggcggcgcttctcgccatgcccggttggaccgccggacctatcttaccgccggacataaagagttttagtaacaagcaaacgagagtgattcaacacgatagatctatagtaaaagaagacgatctcgatttacgttgggaagaagctaccggtgaagttgttgatgaagtcatcttcctcagccgtcacaccgccgtctcaaatcgtcctgctttaactgttcatccgattggagtgcttcatctaaaggatggagaatcaccgccgcaaggaggaaagcctggatgggcggcgttgccaagcactagaattggtccatggtttcgtcttttgaagaaaatggctgaagctcatggtttagttcctgagtttgagataacattggaagctactcatcatggaccaataactaacaagccaacgatgtttttggagattggtagtaccgaggaatactggaagaggcaagacgcagctcaagtcatggctcttttaatgtgggaaggtcttgggctaggaggcagtgaagaagtagggaagtggaaaagtgaaaccggaaagaggaaagttcttttaggcattggaggtggacattatgctcctcgtcacatggatatagctttgaaagatgatatttgggtaggccatttgctttctggatactcattaccgatggaagatccaactcaaaccaaaacaacgcctggagagaattacattggtggaaattggagacaatcaattaaggcagcatttgaagctactaaagcatcattccccggaggcgagatcttggctcatcttgaccacaagagcttcaaaggatggcaaaagaaggccattacagagtttttagcagaagagagcatcaatgttgggaagccaaacgatttcacatgaactgtgagagacccccttaaaacatatcttgagatctgagtttttggtttattggttcagaatctatcattgatgatgatgggtttagattattttcagctgttacaagtaagtagagattgaaattcatctgtaagctgccctttttaaagttcacattcagatttaagatagaagaagaataaaacatg

SEQ ID NO: 84289 - protein, 361 aa, Arabidopsis thaliana
  peptide (1)..(361): Ceres Seq. ID no. 12674135
  misc_feature (93)..(357): Pfam Name: Protein of unknown function (DUF516) Pfam Description: Protein of unknown function (DUF516)
  misc_feature (1)..(361): Homolog of NCBI NO: 15227708 NR Description: unknown protein; protein id: At2g03800.1 thaliana] >gi|21363087|sp|Q9ZPQ3|U204_ARATH Hypothetical protein >gi|25411034|pir||D84452 hypothetical protein At2g03800
  misc_feature (45)..(360): Homolog of NCBI NO: 38636945 NR Description: putative GEKO1 [Oryza sativa (japonica
  misc_feature (48)..(284): Homolog of NCBI NO: 11498233 NR Description: conserved hypothetical protein [Archaeoglobus
  misc_feature (83)..(283): Homolog of NCBI NO: 22406443 NR Description: hypothetical protein [Ferroplasma acidarmanus]
  misc_feature (114)..(289): Homolog of NCBI NO: 15668338 NR Description: conserved hypothetical protein [Methanococcus
  misc_feature (48)..(294): Homolog of NCBI NO: 14589968 NR Description: hypothetical protein [Pyrococcus horikoshii]
  misc_feature (109)..(284): Homolog of NCBI NO: 14601434 NR Description: hypothetical protein [Aeropyrum pernix]
  misc_feature (81)..(287): Homolog of NCBI NO: 14520224 NR Description: hypothetical protein [Pyrococcus abyssi]
  misc_feature (173)..(288): Homolog of NCBI NO: 18978354 NR Description: hypothetical protein [Pyrococcus furiosus DSM >gi|21363101|sp|P58852|YJ82_PYRFU Hypothetical protein PF1982
  misc_feature (48)..(225): Homolog of NCBI NO: 18978354 NR Description: hypothetical protein [Pyrococcus furiosus DSM >gi|21363101|sp|P58852|YJ82_PYRFU Hypothetical protein PF1982
MILKISGRNIIHFLHTHNNRLKANATHIQSLLNANNRVTVTTRKMVTLIVATTADPASINPAAALLAMPGWTAGPILPPDIKSFSNKQTRVIQHDRSIVKEDDLDLRWEEATGEVVDEVIFLSRHTAVSNRPALTVHPIGVLHLKDGESPPQGGKPGWAALPSTRIGPWFRLLKKMAEAHGLVPEFEITLEATHHGPITNKPTMFLEIGSTEEYWKRQDAAQVMALLMWEGLGLGGSEEVGKWKSETGKRKVLLGIGGGHYAPRHMDIALKDDIWVGHLLSGYSLPMEDPTQTKTTPGENYIGGNWRQSIKAAFEATKASFPGGEILAHLDHKSFKGWQKKAITEFLAEESINVGKPNDFT

SEQ ID NO: 84290 - protein, 317 aa, Arabidopsis thaliana
  peptide (1)..(317): Ceres Seq. ID no. 12674136
  misc_feature (49)..(313): Pfam Name: Protein of unknown function (DUF516) Pfam Description: Protein of unknown function (DUF516)
  misc_feature (1)..(317): Homolog of NCBI NO: 15227708 NR Description: unknown protein; protein id: At2g03800.1 thaliana] >gi|21363087|sp|Q9ZPQ3|U204_ARATH Hypothetical protein >gi|25411034|pir||D84452 hypothetical protein At2g03800
  misc_feature (1)..(316): Homolog of NCBI NO: 38636945 NR Description: putative GEKO1 [Oryza sativa (japonica
  misc_feature (4)..(240): Homolog of NCBI NO: 11498233 NR Description: conserved hypothetical protein [Archaeoglobus
  misc_feature (39)..(239): Homolog of NCBI NO: 22406443 NR Description: hypothetical protein [Ferroplasma acidarmanus]
  misc_feature (70)..(245): Homolog of NCBI NO: 15668338 NR Description: conserved hypothetical protein [Methanococcus
  misc_feature (4)..(250): Homolog of NCBI NO: 14589968 NR Description: hypothetical protein [Pyrococcus horikoshii]
  misc_feature (65)..(240): Homolog of NCBI NO: 14601434 NR Description: hypothetical protein [Aeropyrum pernix]
  misc_feature (37)..(243): Homolog of NCBI NO: 14520224 NR Description: hypothetical protein [Pyrococcus abyssi]
  misc_feature (129)..(244): Homolog of NCBI NO: 18978354 NR Description: hypothetical protein [Pyrococcus furiosus DSM >gi|21363101|sp|P58852|YJ82_PYRFU Hypothetical protein PF1982
  misc_feature (4)..(181): Homolog of NCBI NO: 18978354 NR Description: hypothetical protein [Pyrococcus furiosus DSM >gi|21363101|sp|P58852|YJ82_PYRFU Hypothetical protein PF1982
MVTLIVATTADPASINPAAALLAMPGWTAGPILPPDIKSFSNKQTRVIQHDRSIVKEDDLDLRWEEATGEVVDEVIFLSRHTAVSNRPALTVHPIGVLHLKDGESPPQGGKPGWAALPSTRIGPWFRLLKKMAEAHGLVPEFEITLEATHHGPITNKPTMFLEIGSTEEYWKRQDAAQVMALLMWEGLGLGGSEEVGKWKSETGKRKVLLGIGGGHYAPRHMDIALKDDIWVGHLLSGYSLPMEDPTQTKTTPGENYIGGNWRQSIKAAFEATKASFPGGEILAHLDHKSFKGWQKKAITEFLAEESINVGKPNDFT

SEQ ID NO: 84291 - protein, 294 aa, Arabidopsis thaliana
  peptide (1)..(294): Ceres Seq. ID no. 12674137
  misc_feature (26)..(290): Pfam Name: Protein of unknown function (DUF516) Pfam Description: Protein of unknown function (DUF516)
  misc_feature (1)..(294): Homolog of NCBI NO: 15227708 NR Description: unknown protein; protein id: At2g03800.1 thaliana] >gi|21363087|sp|Q9ZPQ3|U204_ARATH Hypothetical protein >gi|25411034|pir||D84452 hypothetical protein At2g03800
  misc_feature (1)..(293): Homolog of NCBI NO: 38636945 NR Description: putative GEKO1 [Oryza sativa (japonica
  misc_feature (1)..(217): Homolog of NCBI NO: 11498233 NR Description: conserved hypothetical protein [Archaeoglobus
  misc_feature (16)..(216): Homolog of NCBI NO: 22406443 NR Description: hypothetical protein [Ferroplasma acidarmanus]
  misc_feature (47)..(222): Homolog of NCBI NO: 15668338 NR Description: conserved hypothetical protein [Methanococcus
  misc_feature (1)..(227): Homolog of NCBI NO: 14589968 NR Description: hypothetical protein [Pyrococcus horikoshii]
  misc_feature (42)..(217): Homolog of NCBI NO: 14601434 NR Description: hypothetical protein [Aeropyrum pernix]
  misc_feature (14)..(220): Homolog of NCBI NO: 14520224 NR Description: hypothetical protein [Pyrococcus abyssi]
  misc_feature (106)..(221): Homolog of NCBI NO: 18978354 NR Description: hypothetical protein [Pyrococcus furiosus DSM >gi|21363101|sp|P58852|YJ82_PYRFU Hypothetical protein PF1982
  misc_feature (1)..(158): Homolog of NCBI NO: 18978354 NR Description: hypothetical protein [Pyrococcus furiosus DSM >gi|21363101|sp|P58852|YJ82_PYRFU Hypothetical protein PF1982
MPGWTAGPILPPDIKSFSNKQTRVIQHDRSIVKEDDLDLRWEEATGEVVDEVIFLSRHTAVSNRPALTVHPIGVLHLKDGESPPQGGKPGWAALPSTRIGPWFRLLKKMAEAHGLVPEFEITLEATHHGPITNKPTMFLEIGSTEEYWKRQDAAQVMALLMWEGLGLGGSEEVGKWKSETGKRKVLLGIGGGHYAPRHMDIALKDDIWVGHLLSGYSLPMEDPTQTKTTPGENYIGGNWRQSIKAAFEATKASFPGGEILAHLDHKSFKGWQKKAITEFLAEESINVGKPNDFT

SEQ ID NO: 84292 - DNA, 1590 bp, Arabidopsis thaliana
  misc_feature (1)..(1590): Ceres Seq. ID no. 12674217
  misc_feature: MA Experiment ID: 108461 Result: Down-regulated in Transcription
  misc_feature: MA Experiment 108461 PARAMETER Experiment Name: At_Germinating_Seeds_cDNA_P Parameter: Age (day) Value: 1 vs. 0
  misc_feature: MA Experiment 108461 PARAMETER Experiment Name: At_Germinating_Seeds_cDNA_P Parameter: Tissue Value: Germinating Seeds
  misc_feature: MA Experiment ID: 108462 Result: Down-regulated in Transcription
  misc_feature: MA Experiment 108462 PARAMETER Experiment Name: At_Germinating_Seeds_cDNA_P Parameter: Age (day) Value: 2 vs. 0
  misc_feature: MA Experiment 108462 PARAMETER Experiment Name: At_Germinating_Seeds_cDNA_P Parameter: Tissue Value: Germinating Seeds
  misc_feature: MA Experiment ID: 108573 Result: Up-regulated in Transcription
  misc_feature: MA Experiment 108573 PARAMETER Experiment Name: At_Drought_cDNA_P Parameter: Timepoint (hr) Value: 6
  misc_feature: MA Experiment 108573 PARAMETER Experiment Name: At_Drought_cDNA_P Parameter: Tissue Value: Aerial
  misc_feature: MA Experiment 108573 PARAMETER Experiment Name: At_Drought_cDNA_P Parameter: Treatment Value: Drought vs. No Drought
  misc_feature: MA Experiment ID: 108585 Result: Up-regulated in Transcription
  misc_feature: MA Experiment 108585 PARAMETER Experiment Name: At_5mM_NaNP_cDNA_P Parameter: Timepoint (hr) Value: 6
  misc_feature: MA Experiment 108585 PARAMETER Experiment Name: At_5mM_NaNP_cDNA_P Parameter: Tissue Value: Aerial
  misc_feature: MA Experiment 108585 PARAMETER Experiment Name: At_5mM_NaNP_cDNA_P Parameter: Treatment Value: null
  misc_feature: MA Experiment ID: 20000307 Result: Down-regulated in Transcription
  misc_feature: MA Experiment 20000307 PARAMETER Experiment Name: At_Germinating_Seeds_Sub_P Parameter: Age (hr) Value: 24 vs. 0
  misc_feature: MA Experiment 20000307 PARAMETER Experiment Name: At_Germinating_Seeds_Sub_P Parameter: Organism Value: A. thaliana
  misc_feature: MA Experiment 20000307 PARAMETER Experiment Name: At_Germinating_Seeds_Sub_P Parameter: Plant Line Value: WS
  misc_feature: MA Experiment 20000307 PARAMETER Experiment Name: At_Germinating_Seeds_Sub_P Parameter: Tissue Value: Germinating Seeds
  misc_feature: MA Experiment ID: 20001807 Result: Down-regulated in Transcription
  misc_feature: MA Experiment 20001807 PARAMETER Experiment Name: At_50mM_NH4NO3_L-to-H_Sub_P Parameter: Timepoint (hr) Value: 6
  misc_feature: MA Experiment 20001807 PARAMETER Experiment Name: At_50mM_NH4NO3_L-to-H_Sub_P Parameter: Tissue Value: Leaf
  misc_feature: MA Experiment 20001807 PARAMETER Experiment Name: At_50mM_NH4NO3_L-to-H_Sub_P Parameter: Treatment Value: 50mM NH4NO3 vs 100mM Mannitol
ctcgccgccatcggcgactgcgcccagtactgctgtgtcggctacctcgcttgctcctggctttcgatttcatccgactgatgaggaactcgtgagctattacttgaagaggaaggttctgggtaaacctgtacgcttcgatgcgattggagaggtagatatctacaagcatgagccctgggatttagcagtgttttcgaagttgaaaactcgggaccaagaatggtacttcttcagtgcgttagataagaagtacggtaatggtgctaggatgaatcgagcaactaacaaagggtactggaaagcaactggaaaagacagagaaatccgccgggatattcagttgctcggtatgaaaaagacgcttgttttccacagcgggcgtgctccagacggccttcggactaattgggtcatgcacgagtatcgccttgtggaatatgaaactgaaactaacggaagcctgctggatgcatatgtgttgtgcagagtgtttcacaagaataacattgggccaccaagtgggaacagatatgcgccattcatggaagaagaatgggctgatggtggaggagctctgattccaggaatagacgttagggtcagggtagaggctctaccacaagccaatggaaacaaccagatggaccaggaaatgcattcagcaagcaaggatctcattaacatcaacgagctaccgagagatgctactccaatggacatcgaacctaaccaacagaatcatcatgagagtgccttcaagccacaggagagtaacaaccatagtggttatgaagaagatgaggacacactcaaacgcgagcacgcagaagaagatgagcgtcctccttctctatgcattctcaacaaagaagctccactacctctcctgcaatacaaacgtagacgccaaaacgagtccaacaacaactcaagcaggaacacacaggaccattgttcgtccacaataacaaccgtcgacaatacaaccaccttaatctcatcatctgctgctgctgctaccaacactgccatctctgcattgcttgagttctcacttatgggtatctccgacaagaaagaaaaccagcagaaagaggaaacttctcctcctagtccaattgcatctcctgaagagaaggttaatgatctccagaaggaggttcaccagatgtctgttgaaagagaaactttcaagcttgagatgatgagtgcagaggctatgatcagcattctccagtcaagaatcgatgcgctgcgtcaggagaacgaggaacttaagaagaagaacgccagtggacaagctagttaaaccaccgcaacatctctccaggtgtcttcttcttcttcttcttcttctttgcctcttagctgtaatcttcttaatagtatgagctatggatgtagcttcttcagacggatcagaaaccttatgaatctctgttgtaaaattaggataaaacggaacggagccaaccaactaggtctttttattttatccttttttactttggatgtttctgcatcttttgggaacattttcaggctgatccattgtcgtatattatcatctatctatctagtcttttc

SEQ ID NO: 84293 - protein, 436 aa, Arabidopsis thaliana
  peptide (1)..(436): Ceres Seq. ID no. 12674218
  misc_feature (17)..(145): Pfam Name: No apical meristem (NAM) protein Pfam Description: No apical meristem (NAM) protein
  misc_feature (1)..(436): Homolog of NCBI NO: 18398891 NR Description: expressed protein; protein id: At3g10480.1 thaliana] >gi|8567777|gb|AAF76349.1| unknown protein [Arabidopsis >gi|12322797|gb|AAG51394.1|AC011560_26 unknown protein; unknown
  misc_feature (1)..(434): Homolog of NCBI NO: 30681347 NR Description: expressed protein [Arabidopsis thaliana]
  misc_feature (1)..(223): Homolog of NCBI NO: 18398893 NR Description: expressed protein; protein id: At3g10490.1
  misc_feature (4)..(309): Homolog of NCBI NO: 21105744 NR Description: nam-like protein 8 [Petunia x hybrida]
  misc_feature (1)..(309): Homolog of NCBI NO: 21105736 NR Description: nam-like protein 4 [Petunia x hybrida]
  misc_feature (13)..(262): Homolog of NCBI NO: 15237699 NR Description: putative protein; protein id: At5g04410.1, by cDNA: gi_20466285, supported by cDNA: gi_6456750 [Arabidopsis
  misc_feature (13)..(204): Homolog of NCBI NO: 21105746 NR Description: nam-like protein 9 [Petunia x hybrida]
  misc_feature (13)..(262): Homolog of NCBI NO: 6456751 NR Description: NAC2 [Arabidopsis thaliana]
  misc_feature (13)..(188): Homolog of NCBI NO: 8567779 NR Description: NAC, putative [Arabidopsis thaliana]
  misc_feature (13)..(188): Homolog of NCBI NO: 18398895 NR Description: expressed protein; protein id: At3g10500.1 thaliana] >gi|15293139|gb|AAK93680.1| unknown protein thaliana] >gi|19310691|gb|AAL85076.1| unknown protein
SPPSATAPSTAVSATSLAPGFRFHPTDEELVSYYLKRKVLGKPVRFDAIGEVDIYKHEPWDLAVFSKLKTRDQEWYFFSALDKKYGNGARMNRATNKGYWKATGKDREIRRDIQLLGMKKTLVFHSGRAPDGLRTNWVMHEYRLVEYETETNGSLLDAYVLCRVFHKNNIGPPSGNRYAPFMEEEWADGGGALIPGIDVRVRVEALPQANGNNQMDQEMHSASKDLININELPRDATPMDIEPNQQNHHESAFKPQESNNHSGYEEDEDTLKREHAEEDERPPSLCILNKEAPLPLLQYKRRRQNESNNNSSRNTQDHCSSTITTVDNTTTLISSSAAAATNTAISALLEFSLMGISDKKENQQKEETSPPSPIASPEEKVNDLQKEVHQMSVERETFKLEMMSAEAMISILQSRIDALRQENEELKKKNASGQAS

SEQ ID NO: 84294 - protein, 346 aa, Arabidopsis thaliana
  peptide (1)..(346): Ceres Seq. ID no. 12674219
  misc_feature (1)..(55): Pfam Name: No apical meristem (NAM) protein Pfam Description: No apical meristem (NAM) protein
  misc_feature (1)..(346): Homolog of NCBI NO: 18398891 NR Description: expressed protein; protein id: At3g10480.1 thaliana] >gi|8567777|gb|AAF76349.1| unknown protein [Arabidopsis >gi|12322797|gb|AAG51394.1|AC011560_26 unknown protein; unknown
  misc_feature (1)..(344): Homolog of NCBI NO: 30681347 NR Description: expressed protein [Arabidopsis thaliana]
  misc_feature (1)..(133): Homolog of NCBI NO: 18398893 NR Description: expressed protein; protein id: At3g10490.1
  misc_feature (1)..(219): Homolog of NCBI NO: 21105744 NR Description: nam-like protein 8 [Petunia x hybrida]
  misc_feature (1)..(219): Homolog of NCBI NO: 21105736 NR Description: nam-like protein 4 [Petunia x hybrida]
  misc_feature (1)..(172): Homolog of NCBI NO: 15237699 NR Description: putative protein; protein id: At5g04410.1, by cDNA: gi_20466285, supported by cDNA: gi_6456750 [Arabidopsis
  misc_feature (1)..(114): Homolog of NCBI NO: 21105746 NR Description: nam-like protein 9 [Petunia x hybrida]
  misc_feature (1)..(172): Homolog of NCBI NO: 6456751 NR Description: NAC2 [Arabidopsis thaliana]
  misc_feature (1)..(98): Homolog of NCBI NO: 8567779 NR Description: NAC, putative [Arabidopsis thaliana]
  misc_feature (1)..(98): Homolog of NCBI NO: 18398895 NR Description: expressed protein; protein id: At3g10500.1 thaliana] >gi|15293139|gb|AAK93680.1| unknown protein thaliana] >gi|19310691|gb|AAL85076.1| unknown protein
MNRATNKGYWKATGKDREIRRDIQLLGMKKTLVFHSGRAPDGLRTNWVMHEYRLVEYETETNGSLLDAYVLCRVFHKNNIGPPSGNRYAPFMEEEWADGGGALIPGIDVRVRVEALPQANGNNQMDQEMHSASKDLININELPRDATPMDIEPNQQNHHESAFKPQESNNHSGYEEDEDTLKREHAEEDERPPSLCILNKEAPLPLLQYKRRRQNESNNNSSRNTQDHCSSTITTVDNTTTLISSSAAAATNTAISALLEFSLMGISDKKENQQKEETSPPSPIASPEEKVNDLQKEVHQMSVERETFKLEMMSAEAMISILQSRIDALRQENEELKKKNASGQAS

SEQ ID NO: 84295 - protein, 319 aa, Arabidopsis thaliana
  peptide (1)..(319): Ceres Seq. ID no. 12674220
  misc_feature (1)..(319): Homolog of NCBI NO: 18398891 NR Description: expressed protein; protein id: At3g10480.1 thaliana] >gi|8567777|gb|AAF76349.1| unknown protein [Arabidopsis >gi|12322797|gb|AAG51394.1|AC011560_26 unknown protein; unknown
  misc_feature (1)..(317): Homolog of NCBI NO: 30681347 NR Description: expressed protein [Arabidopsis thaliana]
  misc_feature (1)..(106): Homolog of NCBI NO: 18398893 NR Description: expressed protein; protein id: At3g10490.1
  misc_feature (1)..(192): Homolog of NCBI NO: 21105744 NR Description: nam-like protein 8 [Petunia x hybrida]
  misc_feature (1)..(192): Homolog of NCBI NO: 21105736 NR Description: nam-like protein 4 [Petunia x hybrida]
  misc_feature (1)..(145): Homolog of NCBI NO: 15237699 NR Description: putative protein; protein id: At5g04410.1, by cDNA: gi_20466285, supported by cDNA: gi_6456750 [Arabidopsis
  misc_feature (1)..(87): Homolog of NCBI NO: 21105746 NR Description: nam-like protein 9 [Petunia x hybrida]
  misc_feature (1)..(145): Homolog of NCBI NO: 6456751 NR Description: NAC2 [Arabidopsis thaliana]
  misc_feature (1)..(71): Homolog of NCBI NO: 8567779 NR Description: NAC, putative [Arabidopsis thaliana]
  misc_feature (1)..(71): Homolog of NCBI NO: 18398895 NR Description: expressed protein; protein id: At3g10500.1 thaliana] >gi|15293139|gb|AAK93680.1| unknown protein thaliana] >gi|19310691|gb|AAL85076.1| unknown protein
MKKTLVFHSGRAPDGLRTNWVMHEYRLVEYETETNGSLLDAYVLCRVFHKNNIGPPSGNRYAPFMEEEWADGGGALIPGIDVRVRVEALPQANGNNQMDQEMHSASKDLININELPRDATPMDIEPNQQNHHESAFKPQESNNHSGYEEDEDTLKREHAEEDERPPSLCILNKEAPLPLLQYKRRRQNESNNNSSRNTQDHCSSTITTVDNTTTLISSSAAAATNTAISALLEFSLMGISDKKENQQKEETSPPSPIASPEEKVNDLQKEVHQMSVERETFKLEMMSAEAMISILQSRIDALRQENEELKKKNASGQAS

SEQ ID NO: 84296 - DNA, 798 bp, Arabidopsis thaliana
  misc_feature (1)..(798): Ceres Seq. ID no. 12674245
  misc_feature: MA Experiment ID: 108461 Result: Up-regulated in Transcription
  misc_feature: MA Experiment 108461 PARAMETER Experiment Name: At_Germinating_Seeds_cDNA_P Parameter: Age (day) Value: 1 vs. 0
  misc_feature: MA Experiment 108461 PARAMETER Experiment Name: At_Germinating_Seeds_cDNA_P Parameter: Tissue Value: Germinating Seeds
  misc_feature: MA Experiment ID: 108462 Result: Up-regulated in Transcription
  misc_feature: MA Experiment 108462 PARAMETER Experiment Name: At_Germinating_Seeds_cDNA_P Parameter: Age (day) Value: 2 vs. 0
  misc_feature: MA Experiment 108462 PARAMETER Experiment Name: At_Germinating_Seeds_cDNA_P Parameter: Tissue Value: Germinating Seeds
  misc_feature: MA Experiment ID: 108463 Result: Up-regulated in Transcription
  misc_feature: MA Experiment 108463 PARAMETER Experiment Name: At_Germinating_Seeds_cDNA_P Parameter: Age (day) Value: 3 vs. 0
  misc_feature: MA Experiment 108463 PARAMETER Experiment Name: At_Germinating_Seeds_cDNA_P Parameter: Tissue Value: Germinating Seeds
  misc_feature: MA Experiment ID: 108464 Result: Up-regulated in Transcription
  misc_feature: MA Experiment 108464 PARAMETER Experiment Name: At_Germinating_Seeds_cDNA_P Parameter: Age (day) Value: 4 vs. 0
  misc_feature: MA Experiment 108464 PARAMETER Experiment Name: At_Germinating_Seeds_cDNA_P Parameter: Tissue Value: Germinating Seeds
  misc_feature: MA Experiment ID: 20000224 Result: Down-regulated in Transcription
  misc_feature: MA Experiment ID: 20000307 Result: Up-regulated in Transcription
  misc_feature: MA Experiment 20000307 PARAMETER Experiment Name: At_Germinating_Seeds_Sub_P Parameter: Age (hr) Value: 24 vs. 0
  misc_feature: MA Experiment 20000307 PARAMETER Experiment Name: At_Germinating_Seeds_Sub_P Parameter: Organism Value: A. thaliana
  misc_feature: MA Experiment 20000307 PARAMETER Experiment Name: At_Germinating_Seeds_Sub_P Parameter: Plant Line Value: WS
  misc_feature: MA Experiment 20000307 PARAMETER Experiment Name: At_Germinating_Seeds_Sub_P Parameter: Tissue Value: Germinating Seeds
  misc_feature: MA Experiment ID: 20000315 Result: Down-regulated in Transcription
  misc_feature: MA Experiment 20000315 PARAMETER Experiment Name: At_14day_Shoots-Roots_Sub_P Parameter: Age (day) Value: 14
  misc_feature: MA Experiment 20000315 PARAMETER Experiment Name: At_14day_Shoots-Roots_Sub_P Parameter: Organism Value: A. thaliana
  misc_feature: MA Experiment 20000315 PARAMETER Experiment Name: At_14day_Shoots-Roots_Sub_P Parameter: Plant Line Value: WS
  misc_feature: MA Experiment 20000315 PARAMETER Experiment Name: At_14day_Shoots-Roots_Sub_P Parameter: Tissue Value: Shoots vs. Whole Plant
  misc_feature: MA Experiment ID: 20001807 Result: Up-regulated in Transcription
  misc_feature: MA Experiment 20001807 PARAMETER Experiment Name: At_50mM_NH4NO3_L-to-H_Sub_P Parameter: Timepoint (hr) Value: 6
  misc_feature: MA Experiment 20001807 PARAMETER Experiment Name: At_50mM_NH4NO3_L-to-H_Sub_P Parameter: Tissue Value: Leaf
  misc_feature: MA Experiment 20001807 PARAMETER Experiment Name: At_50mM_NH4NO3_L-to-H_Sub_P Parameter: Treatment Value: 50mM NH4NO3 vs 100mM Mannitol
ctctatctctatctctatctctcttctccttcttcttcagtttcgatcattcttgaatctgattcttctcgagaaaaaagcgtttcaatttcagaaatttcgactacgattgttgctttgttcaattagaagaggcgaaaaaggatggcgacggttaatgggtacacagggaatactccggcggcgactacaccggcagccaccggatcaaagcaatctgctcctccgactaagaccgtcgatagccactccgttctaaaaaggctgcaatctgaactaatgggattgatgatgggagctgatccggggatatctgcgtttccagaggaagacaacatattttgctggaaaggaacaattacaggaagcaaagatactgtgttcgaaggaactgagtacagactctcactcactttctctaacgattatccttttaagtctcccaaagttaagtttgagacatgctgcttccaccccaatgtggatctctatggcaatatttgcttggacattcttcaggataaatggtcatctgcttatgatgtgaggacgatattactctcaattcaaagccttctcggaaccgaacatcagctcaccattgaacaatcaagcggctcagctttggagcaatcaagaagagtacaggaagatggttgagaagctctacaagcctttaaacgcatgattctcaaaaatcactgtaactgattttaaaatctcaactgtattggatcatatctcttttacttttataatctcaatttgagccaatattagcaatcaaactctaccttt

SEQ ID NO: 84297 - protein, 171 aa, Arabidopsis thaliana; identical to SEQ ID NO: 35726
  peptide (1)..(171): Ceres Seq. ID no. 12674246
  misc_feature (1)..(146): Homolog of NCBI NO: 18402475 NR Description: E2, ubiquitin-conjugating enzyme, putative; id: At3g20060.1 [Arabidopsis thaliana]
  misc_feature (1)..(146): Homolog of NCBI NO: 18403097 NR Description: E2, ubiquitin-conjugating enzyme, putative;
  misc_feature (1)..(146): Homolog of NCBI NO: 21618179 NR Description: E2, ubiquitin-conjugating enzyme, putative
  misc_feature (1)..(146): Homolog of NCBI NO: 25293673 NR Description: hypothetical protein F17J6.3 [imported] -
  misc_feature (37)..(146): Homolog of NCBI NO: 9454557 NR Description: Putative ubiquitin carrier protein [Arabidopsis
  misc_feature (8)..(146): Homolog of NCBI NO: 34903234 NR Description: unnamed protein product [Oryza sativa (japonica group)] >gi|6815106|dbj|BAA90392.1| unnamed protein product
  misc_feature (17)..(146): Homolog of NCBI NO: 3915196 NR Description: Ubiquitin-conjugating enzyme E2-C
  misc_feature (21)..(146): Homolog of NCBI NO: 24663332 NR Description: vihar CG10682-PA >gi|7294569|gb|AAF49909.1|
  misc_feature (29)..(146): Homolog of NCBI NO: 4388942 NR Description: E2-C, An Ubiquitin Conjugating Enzyme Required
  misc_feature (13)..(171): Homolog of NCBI NO: 6097072 NR Description: cyclin-selective ubiquitin carrier protein E2-C

SEQ ID NO: 84298 - protein, 126 aa, Arabidopsis thaliana; identical to SEQ ID NO: 35727
  peptide (1)..(126): Ceres Seq. ID no. 12674247
  misc_feature (1)..(101): Homolog of NCBI NO: 18402475 NR Description: E2, ubiquitin-conjugating enzyme, putative; id: At3g20060.1 [Arabidopsis thaliana]
  misc_feature (1)..(101): Homolog of NCBI NO: 18403097 NR Description: E2, ubiquitin-conjugating enzyme, putative;
  misc_feature (1)..(101): Homolog of NCBI NO: 21618179 NR Description: E2, ubiquitin-conjugating enzyme, putative
  misc_feature (1)..(101): Homolog of NCBI NO: 25293673 NR Description: hypothetical protein F17J6.3 [imported] -
  misc_feature (1)..(101): Homolog of NCBI NO: 9454557 NR Description: Putative ubiquitin carrier protein [Arabidopsis
  misc_feature (1)..(101): Homolog of NCBI NO: 34903234 NR Description: unnamed protein product [Oryza sativa (japonica group)] >gi|6815106|dbj|BAA90392.1| unnamed protein product
  misc_feature (1)..(101): Homolog of NCBI NO: 3915196 NR Description: Ubiquitin-conjugating enzyme E2-C
  misc_feature (1)..(101): Homolog of NCBI NO: 24663332 NR Description: vihar CG10682-PA >gi|7294569|gb|AAF49909.1|
  misc_feature (1)..(101): Homolog of NCBI NO: 4388942 NR Description: E2-C, An Ubiquitin Conjugating Enzyme Required
  misc_feature (1)..(126): Homolog of NCBI NO: 6097072 NR Description: cyclin-selective ubiquitin carrier protein E2-C

SEQ ID NO: 84299 - protein, 123 aa, Arabidopsis thaliana; identical to SEQ ID NO: 35728
  peptide (1)..(123): Ceres Seq. ID no. 12674248
  misc_feature (1)..(98): Homolog of NCBI NO: 18402475 NR Description: E2, ubiquitin-conjugating enzyme, putative; id: At3g20060.1 [Arabidopsis thaliana]
  misc_feature (1)..(98): Homolog of NCBI NO: 18403097 NR Description: E2, ubiquitin-conjugating enzyme, putative;
  misc_feature (1)..(98): Homolog of NCBI NO: 21618179 NR Description: E2, ubiquitin-conjugating enzyme, putative
  misc_feature (1)..(98): Homolog of NCBI NO: 25293673 NR Description: hypothetical protein F17J6.3 [imported] -
  misc_feature (1)..(98): Homolog of NCBI NO: 9454557 NR Description: Putative ubiquitin carrier protein [Arabidopsis
  misc_feature (1)..(98): Homolog of NCBI NO: 34903234 NR Description: unnamed protein product [Oryza sativa (japonica group)] >gi|6815106|dbj|BAA90392.1| unnamed protein product
  misc_feature (1)..(98): Homolog of NCBI NO: 3915196 NR Description: Ubiquitin-conjugating enzyme E2-C
  misc_feature (1)..(98): Homolog of NCBI NO: 24663332 NR Description: vihar CG10682-PA >gi|7294569|gb|AAF49909.1|
  misc_feature (1)..(98): Homolog of NCBI NO: 4388942 NR Description: E2-C, An Ubiquitin Conjugating Enzyme Required
  misc_feature (1)..(123): Homolog of NCBI NO: 6097072 NR Description: cyclin-selective ubiquitin carrier protein E2-C

SEQ ID NO: 84300 - DNA, 744 bp, Arabidopsis thaliana
  misc_feature (1)..(744): Ceres Seq. ID no. 12674268
  misc_feature: MA Experiment ID: 108461 Result: Up-regulated in Transcription
  misc_feature: MA Experiment 108461 PARAMETER Experiment Name: At_Germinating_Seeds_cDNA_P Parameter: Age (day) Value: 1 vs. 0
  misc_feature: MA Experiment 108461 PARAMETER Experiment Name: At_Germinating_Seeds_cDNA_P Parameter: Tissue Value: Germinating Seeds
  misc_feature: MA Experiment ID: 108462 Result: Up-regulated in Transcription
  misc_feature: MA Experiment 108462 PARAMETER Experiment Name: At_Germinating_Seeds_cDNA_P Parameter: Age (day) Value: 2 vs. 0
  misc_feature: MA Experiment 108462 PARAMETER Experiment Name: At_Germinating_Seeds_cDNA_P Parameter: Tissue Value: Germinating Seeds
  misc_feature: MA Experiment ID: 108463 Result: Up-regulated in Transcription
  misc_feature: MA Experiment 108463 PARAMETER Experiment Name: At_Germinating_Seeds_cDNA_P Parameter: Age (day) Value: 3 vs. 0
  misc_feature: MA Experiment 108463 PARAMETER Experiment Name: At_Germinating_Seeds_cDNA_P Parameter: Tissue Value: Germinating Seeds
  misc_feature: MA Experiment ID: 108464 Result: Up-regulated in Transcription
  misc_feature: MA Experiment 108464 PARAMETER Experiment Name: At_Germinating_Seeds_cDNA_P Parameter: Age (day) Value: 4 vs. 0
  misc_feature: MA Experiment 108464 PARAMETER Experiment Name: At_Germinating_Seeds_cDNA_P Parameter: Tissue Value: Germinating Seeds
  misc_feature: MA Experiment ID: 20000224 Result: Down-regulated in Transcription
  misc_feature: MA Experiment ID: 20000307 Result: Up-regulated in Transcription
  misc_feature: MA Experiment 20000307 PARAMETER Experiment Name: At_Germinating_Seeds_Sub_P Parameter: Age (hr) Value: 24 vs. 0
  misc_feature: MA Experiment 20000307 PARAMETER Experiment Name: At_Germinating_Seeds_Sub_P Parameter: Organism Value: A. thaliana
  misc_feature: MA Experiment 20000307 PARAMETER Experiment Name: At_Germinating_Seeds_Sub_P Parameter: Plant Line Value: WS
  misc_feature: MA Experiment 20000307 PARAMETER Experiment Name: At_Germinating_Seeds_Sub_P Parameter: Tissue Value: Germinating Seeds
  misc_feature: MA Experiment ID: 20000315 Result: Down-regulated in Transcription
  misc_feature: MA Experiment 20000315 PARAMETER Experiment Name: At_14day_Shoots-Roots_Sub_P Parameter: Age (day) Value: 14
  misc_feature: MA Experiment 20000315 PARAMETER Experiment Name: At_14day_Shoots-Roots_Sub_P Parameter: Organism Value: A. thaliana
  misc_feature: MA Experiment 20000315 PARAMETER Experiment Name: At_14day_Shoots-Roots_Sub_P Parameter: Plant Line Value: WS
  misc_feature: MA Experiment 20000315 PARAMETER Experiment Name: At_14day_Shoots-Roots_Sub_P Parameter: Tissue Value: Shoots vs. Whole Plant
  misc_feature: MA Experiment ID: 20001807 Result: Up-regulated in Transcription
  misc_feature: MA Experiment 20001807 PARAMETER Experiment Name: At_50mM_NH4NO3_L-to-H_Sub_P Parameter: Timepoint (hr) Value: 6
  misc_feature: MA Experiment 20001807 PARAMETER Experiment Name: At_50mM_NH4NO3_L-to-H_Sub_P Parameter: Tissue Value: Leaf
  misc_feature: MA Experiment 20001807 PARAMETER Experiment Name: At_50mM_NH4NO3_L-to-H_Sub_P Parameter: Treatment Value: 50mM NH4NO3 vs 100mM Mannitol
tcttcttcagtttcgatcattcttgaatctgattcttctcgagaaaaaagcgtttcaatttcagaaatttcgactacgattgttgctttgttcaattagaagaggcgaaaaaggatggcgacggttaatgggtacacagggaatactccggcggcgactacaccggcagccaccggatcaaagcaatctgctcctccgactaagaccgtcgatagccactccgttctaaaaaggctgcaatctgaactaatgggattgatgatgggagctgatccggggatatctgcgtttccagaggaagacaacatattttgctggaaaggaacaattacaggaagcaaagatactgtgttcgaaggaactgagtacagactctcactcactttctctaacgattatccttttaagtctcccaaagttaagtttgagacatgctgcttccaccccaatgtggatctctatggcaatatttgcttggacattcttcaggataaatggtcatctgcttatgatgtgaggacgatattactctcaattcaaagccttctcggagaaccgaacatcagctcaccattgaacaatcaagcggctcagctttggagcaatcaagaagagtacaggaagatggttgagaagctctacaagcctttaaacgcatgattctcaaaaatcactgtaactgattttaaaatctcaactgtattggatcatatctcttttacttttataatctcaatttgagcc

SEQ ID NO: 84301 - protein, 181 aa, Arabidopsis thaliana
  peptide (1)..(181): Ceres Seq. ID no. 12674269
  misc_feature (1)..(181): Homolog of NCBI NO: 18402475 NR Description: E2, ubiquitin-conjugating enzyme, putative; id: At3g20060.1 [Arabidopsis thaliana]
  misc_feature (1)..(181): Homolog of NCBI NO: 18403097 NR Description: E2, ubiquitin-conjugating enzyme, putative;
  misc_feature (1)..(181): Homolog of NCBI NO: 21618179 NR Description: E2, ubiquitin-conjugating enzyme, putative
  misc_feature (1)..(181): Homolog of NCBI NO: 25293673 NR Description: hypothetical protein F17J6.3 [imported] -
  misc_feature (37)..(181): Homolog of NCBI NO: 9454557 NR Description: Putative ubiquitin carrier protein [Arabidopsis
  misc_feature (8)..(178): Homolog of NCBI NO: 34903234 NR Description: unnamed protein product [Oryza sativa (japonica group)] >gi|6815106|dbj|BAA90392.1| unnamed protein product
  misc_feature (17)..(177): Homolog of NCBI NO: 3915196 NR Description: Ubiquitin-conjugating enzyme E2-C
  misc_feature (21)..(177): Homolog of NCBI NO: 24663332 NR Description: vihar CG10682-PA >gi|7294569|gb|AAF49909.1|
  misc_feature (29)..(177): Homolog of NCBI NO: 4388942 NR Description: E2-C, An Ubiquitin Conjugating Enzyme Required
  misc_feature (12)..(176): Homolog of NCBI NO: 30583869 NR Description: Homo sapiens ubiquitin-conjugating enzyme E2C
MATVNGYTGNTPAATTPAATGSKQSAPPTKTVDSHSVLKRLQSELMGLMMGADPGISAFPEEDNIFCWKGTITGSKDTVFEGTEYRLSLTFSNDYPFKSPKVKFETCCFHPNVDLYGNICLDILQDKWSSAYDVRTILLSIQSLLGEPNISSPLNNQAAQLWSNQEEYRKMVEKLYKPLNA

SEQ ID NO: 84302 - protein, 136 aa, Arabidopsis thaliana; identical to SEQ ID NO: 37835
  peptide (1)..(136): Ceres Seq. ID no. 12674270
  misc_feature (1)..(136): Homolog of NCBI NO: 18402475 NR Description: E2, ubiquitin-conjugating enzyme, putative; id: At3g20060.1 [Arabidopsis thaliana]
  misc_feature (1)..(136): Homolog of NCBI NO: 18403097 NR Description: E2, ubiquitin-conjugating enzyme, putative;
  misc_feature (1)..(136): Homolog of NCBI NO: 21618179 NR Description: E2, ubiquitin-conjugating enzyme, putative
  misc_feature (1)..(136): Homolog of NCBI NO: 25293673 NR Description: hypothetical protein F17J6.3 [imported] -
  misc_feature (1)..(136): Homolog of NCBI NO: 9454557 NR Description: Putative ubiquitin carrier protein [Arabidopsis
  misc_feature (1)..(133): Homolog of NCBI NO: 34903234 NR Description: unnamed protein product [Oryza sativa (japonica group)] >gi|6815106|dbj|BAA90392.1| unnamed protein product
  misc_feature (1)..(132): Homolog of NCBI NO: 3915196 NR Description: Ubiquitin-conjugating enzyme E2-C
  misc_feature (1)..(132): Homolog of NCBI NO: 24663332 NR Description: vihar CG10682-PA >gi|7294569|gb|AAF49909.1|
  misc_feature (1)..(132): Homolog of NCBI NO: 4388942 NR Description: E2-C, An Ubiquitin Conjugating Enzyme Required
  misc_feature (1)..(131): Homolog of NCBI NO: 30583869 NR Description: Homo sapiens ubiquitin-conjugating enzyme E2C

SEQ ID NO: 84303 - protein, 133 aa, Arabidopsis thaliana; identical to SEQ ID NO: 37836
  peptide (1)..(133): Ceres Seq. ID no. 12674271
  misc_feature (1)..(133): Homolog of NCBI NO: 18402475 NR Description: E2, ubiquitin-conjugating enzyme, putative; id: At3g20060.1 [Arabidopsis thaliana]
  misc_feature (1)..(133): Homolog of NCBI NO: 18403097 NR Description: E2, ubiquitin-conjugating enzyme, putative;
  misc_feature (1)..(133): Homolog of NCBI NO: 21618179 NR Description: E2, ubiquitin-conjugating enzyme, putative
  misc_feature (1)..(133): Homolog of NCBI NO: 25293673 NR Description: hypothetical protein F17J6.3 [imported] -
  misc_feature (1)..(133): Homolog of NCBI NO: 9454557 NR Description: Putative ubiquitin carrier protein [Arabidopsis
  misc_feature (1)..(130): Homolog of NCBI NO: 34903234 NR Description: unnamed protein product [Oryza sativa (japonica group)] >gi|6815106|dbj|BAA90392.1| unnamed protein product
  misc_feature (1)..(129): Homolog of NCBI NO: 3915196 NR Description: Ubiquitin-conjugating enzyme E2-C
  misc_feature (1)..(129): Homolog of NCBI NO: 24663332 NR Description: vihar CG10682-PA >gi|7294569|gb|AAF49909.1|
  misc_feature (1)..(129): Homolog of NCBI NO: 4388942 NR Description: E2-C, An Ubiquitin Conjugating Enzyme Required
  misc_feature (1)..(128): Homolog of NCBI NO: 30583869 NR Description: Homo sapiens ubiquitin-conjugating enzyme E2C

SEQ ID NO: 84304 - DNA, 965 bp, Arabidopsis thaliana
  misc_feature (1)..(965): Ceres Seq. ID no. 12674329
  misc_feature: MA Experiment ID: 108576 Result: Down-regulated in Transcription
  misc_feature: MA Experiment 108576 PARAMETER Experiment Name: At_42deg_Heat_cDNA_P Parameter: Temperature (deg C) Value: 42 vs. 22
  misc_feature: MA Experiment 108576 PARAMETER Experiment Name: At_42deg_Heat_cDNA_P Parameter: Timepoint (hr) Value: 1
  misc_feature: MA Experiment 108576 PARAMETER Experiment Name: At_42deg_Heat_cDNA_P Parameter: Tissue Value: Aerial
  misc_feature: MA Experiment ID: 108577 Result: Down-regulated in Transcription
  misc_feature: MA Experiment 108577 PARAMETER Experiment Name: At_42deg_Heat_cDNA_P Parameter: Temperature (deg C) Value: 42 vs. 22
  misc_feature: MA Experiment 108577 PARAMETER Experiment Name: At_42deg_Heat_cDNA_P Parameter: Timepoint (hr) Value: 6
  misc_feature: MA Experiment 108577 PARAMETER Experiment Name: At_42deg_Heat_cDNA_P Parameter: Tissue Value: Aerial
  misc_feature: MA Experiment ID: 108585 Result: Up-regulated in Transcription
  misc_feature: MA Experiment 108585 PARAMETER Experiment Name: At_5mM_NaNP_cDNA_P Parameter: Timepoint (hr) Value: 6
  misc_feature: MA Experiment 108585 PARAMETER Experiment Name: At_5mM_NaNP_cDNA_P Parameter: Tissue Value: Aerial
  misc_feature: MA Experiment 108585 PARAMETER Experiment Name: At_5mM_NaNP_cDNA_P Parameter: Treatment Value: null
  misc_feature: MA Experiment ID: 20000184 Result: Up-regulated in Transcription
  misc_feature: MA Experiment 20000184 PARAMETER Experiment Name: At_Shoots__P Parameter: Age (day) Value: 7
  misc_feature: MA Experiment 20000184 PARAMETER Experiment Name: At_Shoots__P Parameter: Tissue Value: Shoots vs. Whole Plant
  misc_feature: MA Experiment ID: 20000224 Result: Down-regulated in Transcription
  misc_feature: Pfam Name: PRA1 Pfam Description: PRA1 family protein
aacttcagctcttgaatttttttcgtttcagactaacggatcgaaacttctcagccaaatcagccgcatctaacctcacgcgccgccgcaatggcaactccaccgacgctacctgtcaccaatcagcaagctgttcaatctcagcctccaatcaacacacctgcttttcgtactttcttctcacgtctctccacctcgatccgtgatggcttgtcacagcgtcgtccatggacggagctcatcgatcgtagttccatggcgagacctgaatctctcaccgatgccttgtcccggataaggaagaatctcgcttacttcaaggttaactacgtcgccatcgtctccctcgtactcgccttttcgcttttctctcatcctctctccctccttgtcctcatcggactcctaggcggttggatgtttctctacctcttccgtccctcagatcagccactggtcgtcttcggtcgcactttctctgatcgagagactctgcttgctcttgtgctgtctacgatcgtcgtcgtgtttatgacgagcgttggatctctcttaacctccgcgcttatgattggtgttgcaatcgtttgcgtacacggtgcgtttgtggttccggatgatctcttcttggacgagcaagagcctgcgaatgctggattactctcattccttggaggttctgctacctcagctgctgcagctgtctcagggagagtctaagagctggatttgattcagatctcgtcaattgtggttggtaactccgtactgattttagtgatttgttgttgttgaaatggaatgtagattcgtaacgaagctctacagatttagaactacgaatttttggttgcagtatctgcttcttcttgttgttttatctctttggtggctcgacacttttatgttcagatgtagaaaactcaaagttgatctttctctatcgtttctcctattgtgggatt

SEQ ID NO: 84305 - protein, 209 aa, Arabidopsis thaliana; identical to SEQ ID NO: 28604
  peptide (1)..(209): Ceres Seq. ID no. 12674330
  misc_feature: Pfam Name: PRA1 Pfam Description: PRA1 family protein
  misc_feature (1)..(209): Homolog of NCBI NO: 15228824 NR Description: putative protein; protein id: At3g56110.1, by cDNA: 11163., supported by cDNA: gi_15450977, supported by
  misc_feature (1)..(209): Homolog of NCBI NO: 15450978 NR Description: putative protein [Arabidopsis thaliana]
  misc_feature (2)..(209): Homolog of NCBI NO: 15226664 NR Description: unknown protein; protein id: At2g40380.1
  misc_feature (1)..(209): Homolog of NCBI NO: 15239101 NR Description: putative protein; protein id: At5g05380.1 thaliana] >gi|10176750|dbj|BAB09981.1|
  misc_feature (1)..(209): Homolog of NCBI NO: 18072825 NR Description: prenylated Rab receptor 2 [Arabidopsis thaliana]
  misc_feature (1)..(209): Homolog of NCBI NO: 15224494 NR Description: unknown protein; protein id: At2g38360.1
  misc_feature (4)..(203): Homolog of NCBI NO: 15241022 NR Description: putative protein; protein id: At5g01640.1
  misc_feature (1)..(204): Homolog of NCBI NO: 15240698 NR Description: putative protein; protein id: At5g07110.1, by cDNA: 22460. [Arabidopsis thaliana] >gi|11281602|pir||T48482
  misc_feature (9)..(193): Homolog of NCBI NO: 18405248 NR Description: expressed protein; protein id: At1g55190.1, by cDNA: 21940. [Arabidopsis thaliana] >gi|25347725|pir||F96593
  misc_feature (1)..(198): Homolog of NCBI NO: 40539036 NR Description: putative prenylated rab acceptor protein [Oryza

SEQ ID NO: 84306 - protein, 154 aa, Arabidopsis thaliana; identical to SEQ ID NO: 28605
  peptide (1)..(154): Ceres Seq. ID no. 12674331
  misc_feature: Pfam Name: PRA1 Pfam Description: PRA1 family protein
  misc_feature (1)..(154): Homolog of NCBI NO: 15228824 NR Description: putative protein; protein id: At3g56110.1, by cDNA: 11163., supported by cDNA: gi_15450977, supported by
  misc_feature (1)..(154): Homolog of NCBI NO: 15450978 NR Description: putative protein [Arabidopsis thaliana]
  misc_feature (1)..(154): Homolog of NCBI NO: 15226664 NR Description: unknown protein; protein id: At2g40380.1
  misc_feature (1)..(154): Homolog of NCBI NO: 15239101 NR Description: putative protein; protein id: At5g05380.1 thaliana] >gi|10176750|dbj|BAB09981.1|
  misc_feature (1)..(154): Homolog of NCBI NO: 18072825 NR Description: prenylated Rab receptor 2 [Arabidopsis thaliana]
  misc_feature (1)..(154): Homolog of NCBI NO: 15224494 NR Description: unknown protein; protein id: At2g38360.1
  misc_feature (1)..(148): Homolog of NCBI NO: 15241022 NR Description: putative protein; protein id: At5g01640.1
  misc_feature (1)..(149): Homolog of NCBI NO: 15240698 NR Description: putative protein; protein id: At5g07110.1, by cDNA: 22460. [Arabidopsis thaliana] >gi|11281602|pir||T48482
  misc_feature (1)..(138): Homolog of NCBI NO: 18405248 NR Description: expressed protein; protein id: At1g55190.1, by cDNA: 21940. [Arabidopsis thaliana] >gi|25347725|pir||F96593
  misc_feature (1)..(143): Homolog of NCBI NO: 40539036 NR Description: putative prenylated rab acceptor protein [Oryza

SEQ ID NO: 84307 - DNA, 1494 bp, Arabidopsis thaliana
  misc_feature (1)..(1494): Ceres Seq. ID no. 12674332
  misc_feature: MA Experiment ID: 20001451 Result: Down-regulated in Transcription
  misc_feature: MA Experiment 20001451 PARAMETER Experiment Name: At_Far-red-induction_P Parameter: Age (day) Value: 7
  misc_feature: MA Experiment 20001451 PARAMETER Experiment Name: At_Far-red-induction_P Parameter: Light Value: Far-red vs. White
  misc_feature: MA Experiment 20001451 PARAMETER Experiment Name: At_Far-red-induction_P Parameter: Organism Value: A. thaliana
  misc_feature: MA Experiment 20001451 PARAMETER Experiment Name: At_Far-red-induction_P Parameter: Plant Line Value: Columbia
  misc_feature: MA Experiment 20001451 PARAMETER Experiment Name: At_Far-red-induction_P Parameter: Timepoint (hr) Value: 24
  misc_feature: MA Experiment 20001451 PARAMETER Experiment Name: At_Far-red-induction_P Parameter: Tissue Value: Whole Plant
aaatctagtttattttttctatttactaaaacctcccaaggaccaaagaacatcgacaaaggaagacgacgaagaagatttcgagcttcgacaaatcatgcggattcttactgctcgcatagctaaccatttttgcagggcacgaaacgcgaatcctcgatctcgaaatttctcctcgtcgaacaagaaagatgaccttacattggaggaagaagctgagaggaaaataggttggtgtctcaaaattttctttgcgggcacagcaacgtatattggataccagtttttcccttacttaggtgataacttaattcatcaatcaatatcgcttttacatgtgaaggatcctttgtttaagagaatgggagcttctcggctttcccgtttcgctattgatgatgaaaggaggatgaaggttgtagagatgggtggggctcaagagctactacatatgttgggaagtgctaaagatgacaagacaaggaaagaagccctaaaggctcttgctgctctctctaaatcaggtgaagctgctaaattcctaggctctaatggagcactctctatcgtcaaatcgactccaaattccttggaagattcagacatttcaacatacaagtcaaacatactcgagaagctagttgagaaaaacctcgctgtctcttccaactgaactacctttttacggacaaggataggtcaagaatcataagagcatgtccattgcagggaccttgcaagttttttaagaaaatccttatgaataatagcaaaaaattaaatcagaatggtgtaataaaccaaggtgcgaaccttgtttaaggtatttttgggtgtattaggtgcgctgacgtggctgtatattattggatgacaacttttcccgtgtttttttttctttcccattcccaaactatttttttctttctctcctctctcctctcctgttttctccgaatttcgacttcgacggatcaaattcttcatcgtctctttttttatcatgtctctcttctcatacgatccacaagattcgtgatcgaagaggtgtcagaaaatccaccggaagagctactcttaccggctttgctgaggtcaacgatgtggcgctgtttttcggtggattggttagaatgttgatgctcataggatcctgcttgtgggttcgtctgctggttgaatttgattgcaagttaaagtctggtgcttttgatctggtaattgcttcttacaagttgatctgtaacaattgatttcgaattcagtatatggatttgtatacagattctgggctttgctttatgttcaaatttgtgtttgatcttttggtttttaagataaaaatgtgactcttttggtgcttattcacttgtatgtcatgttatggtctatgttctctaagtggttttagcttagataacttgtatgtctgttttctttactttaagttcaatatgacttgtatcacttcggctttaatgatattgttgttta

SEQ ID NO: 84308 - protein, 223 aa, Arabidopsis thaliana
  peptide (1)..(223): Ceres Seq. ID no. 12674333
  misc_feature (33)..(223): Homolog of NCBI NO: 30694398 NR Description: expressed protein [Arabidopsis thaliana]
  misc_feature (54)..(215): Homolog of NCBI NO: 40538927 NR Description: expressed protein [Oryza sativa (japonica
  misc_feature (121)..(223): Homolog of NCBI NO: 11281187 NR Description: hypothetical protein F18O21.170 - Arabidopsis >gi|7572919|emb|CAB87420.1| hypothetical protein [Arabidopsis
NLVYFFYLLKPPKDQRTSTKEDDEEDFELRQIMRILTARIANHFCRARNANPRSRNFSSSNKKDDLTLEEEAERKIGWCLKIFFAGTATYIGYQFFPYLGDNLIHQSISLLHVKDPLFKRMGASRLSRFAIDDERRMKVVEMGGAQELLHMLGSAKDDKTRKEALKALAALSKSGEAAKFLGSNGALSIVKSTPNSLEDSDISTYKSNILEKLVEKNLAVSSN

SEQ ID NO: 84309 - protein, 191 aa, Arabidopsis thaliana; identical to SEQ ID NO: 38424
  peptide (1)..(191): Ceres Seq. ID no. 12674334
  misc_feature (1)..(191): Homolog of NCBI NO: 30694398 NR Description: expressed protein [Arabidopsis thaliana]
  misc_feature (22)..(183): Homolog of NCBI NO: 40538927 NR Description: expressed protein [Oryza sativa (japonica
  misc_feature (89)..(191): Homolog of NCBI NO: 11281187 NR Description: hypothetical protein F18O21.170 - Arabidopsis >gi|7572919|emb|CAB87420.1| hypothetical protein [Arabidopsis

SEQ ID NO: 84310 - DNA, 609 bp, Arabidopsis thaliana
  misc_feature (1)..(609): Ceres Seq. ID no. 12674388
  misc_feature: MA Experiment ID: 108434 Result: Down-regulated in Transcription
  misc_feature: MA Experiment 108434 PARAMETER Experiment Name: At_Root_Tips_cDNA_P Parameter: Tissue Value: Root Tips
  misc_feature: MA Experiment ID: 20000184 Result: Up-regulated in Transcription
  misc_feature: MA Experiment 20000184 PARAMETER Experiment Name: At_Shoots__P Parameter: Age (day) Value: 7
  misc_feature: MA Experiment 20000184 PARAMETER Experiment Name: At_Shoots__P Parameter: Tissue Value: Shoots vs. Whole Plant
  misc_feature: MA Experiment ID: 20000227 Result: Down-regulated in Transcription
  misc_feature: MA Experiment 20000227 PARAMETER Experiment Name: At_Root-Tips-vs-Tops_P Parameter: Tissue Value: Root Tips vs. Root Tops
  misc_feature: MA Experiment ID: 20000234 Result: Up-regulated in Transcription
  misc_feature: MA Experiment 20000234 PARAMETER Experiment Name: At_Siliques_P Parameter: Age (day) Value: 21
  misc_feature: MA Experiment 20000234 PARAMETER Experiment Name: At_Siliques_P Parameter: Organism Value: A. thaliana
  misc_feature: MA Experiment 20000234 PARAMETER Experiment Name: At_Siliques_P Parameter: Plant Line Value: WS
  misc_feature: MA Experiment 20000234 PARAMETER Experiment Name: At_Siliques_P Parameter: Tissue Value: Less Than 5mm Siliques vs. Whole Plant
  misc_feature: MA Experiment ID: 20000235 Result: Up-regulated in Transcription
  misc_feature: MA Experiment 20000235 PARAMETER Experiment Name: At_Siliques_P Parameter: Age (day) Value: 21
  misc_feature: MA Experiment 20000235 PARAMETER Experiment Name: At_Siliques_P Parameter: Organism Value: A. thaliana
  misc_feature: MA Experiment 20000235 PARAMETER Experiment Name: At_Siliques_P Parameter: Plant Line Value: WS
  misc_feature: MA Experiment 20000235 PARAMETER Experiment Name: At_Siliques_P Parameter: Tissue Value: 5-10mm Siliques vs. Whole Plant
  misc_feature: MA Experiment ID: 20000495 Result: Up-regulated in Transcription
  misc_feature: MA Experiment 20000495 PARAMETER Experiment Name: At_Guard_Cells_P Parameter: Harvest Date Value: 8/2/2002
  misc_feature: MA Experiment 20000495 PARAMETER Experiment Name: At_Guard_Cells_P Parameter: Organism Value: A. thaliana
  misc_feature: MA Experiment 20000495 PARAMETER Experiment Name: At_Guard_Cells_P Parameter: Tissue Value: Guard Cells vs. Leaves
  misc_feature: MA Experiment ID: 20001760 Result: Up-regulated in Transcription
  misc_feature: MA Experiment 20001760 PARAMETER Experiment Name: At_50mM_NH4NO3_L-to-H_P Parameter: Timepoint (hr) Value: 2
  misc_feature: MA Experiment 20001760 PARAMETER Experiment Name: At_50mM_NH4NO3_L-to-H_P Parameter: Tissue Value: Siliques
  misc_feature: MA Experiment 20001760 PARAMETER Experiment Name: At_50mM_NH4NO3_L-to-H_P Parameter: Treatment Value: 50mM NH4NO3 vs 100mM Mannitol
ctcactttttttctctgttgcatcatcttccaaactcccgaagaagaagaaaataactacaatgagtcaacaacctcctgctgttggtgttcctccttctcatgcttatccggcggaaggaccacccaaggacgcttatccacctccgggacaaccctatcctcagcaaggatatcctcctccgcagggatatcctcaacaaggttatcctcctcaaggttatcctccgcaggggtaccctgaacaaggatatcctcaacaaggttacccacctcagcaacaacagcaacagaaacacagtcctggtatgcttgaaggatgtattgctgctctgtgctgttactgtgtcttggacgcttgcttctgagtggaggtctccgcttgaagctgcaaaattggtttataccgatgatctcatctcattctctttcgtttctctacagacttgactctcttctaagcattttatcttagttactattagattatttggattttgccaaatgggaatgtaaatggttgggtgacccaattcatgttgcacattattggcttttaccctctgctttttcttcctagcttcatctaatgattgcaccctatttattt

SEQ ID NO: 84311 - protein, 121 aa, Arabidopsis thaliana
  peptide (1)..(121): Ceres Seq. ID no. 12674389
  misc_feature (9)..(101): Pfam Name: Extensin-like region Pfam Description: Extensin-like region
  misc_feature (21)..(121): Homolog of NCBI NO: 21554421 NR Description: unknown [Arabidopsis thaliana]
  misc_feature (21)..(121): Homolog of NCBI NO: 15227350 NR Description: unknown protein; protein id: At2g41420.1
  misc_feature (23)..(121): Homolog of NCBI NO: 40538901 NR Description: expressed protein [Oryza sativa (japonica
  misc_feature (23)..(121): Homolog of NCBI NO: 34393718 NR Description: adhesive/proline-rich protein homolog-like
  misc_feature (47)..(121): Homolog of NCBI NO: 1808688 NR Description: hypothetical protein [Sporobolus stapfianus]
  misc_feature (48)..(121): Homolog of NCBI NO: 21618167 NR Description: adhesive/proline-rich protein homolog
  misc_feature (48)..(121): Homolog of NCBI NO: 18425209 NR Description: expressed protein; protein id: At5g67600.1, by cDNA: 9946., supported by cDNA: gi_14532793, supported by gi_21281248 [Arabidopsis thaliana] >gi|9757881|dbj|BAB08468.1|
  misc_feature (14)..(121): Homolog of NCBI NO: 15229624 NR Description: putative protein; protein id: At3g49840.1
  misc_feature (23)..(93): Homolog of NCBI NO: 6469591 NR Description: unknown [Eufolliculina uhligi]
  misc_feature (25)..(101): Homolog of NCBI NO: 6469591 NR Description: unknown [Eufolliculina uhligi]
SLFFSVASSSKLPKKKKITTMSQQPPAVGVPPSHAYPAEGPPKDAYPPPGQPYPQQGYPPPQGYPQQGYPPQGYPPQGYPEQGYPQQGYPPQQQQQQKHSPGMLEGCIAALCCYCVLDACF

SEQ ID NO: 84312 - protein, 115 aa, Arabidopsis thaliana
  peptide (1)..(115): Ceres Seq. ID no. 12674390
  misc_feature (1)..(115): Homolog of NCBI NO: 30694583 NR Description: expressed protein [Arabidopsis thaliana]
MLIRRKDHPRTLIHLRDNPILSKDILLRRDILNKVILLKVILRRGTLNKDILNKVTHLSNNSNRNTVLVCLKDVLLLCAVTVSWTLASEWRSPLEAAKLVYTDDLISFSFVSLQT

SEQ ID NO: 84313 - protein, 101 aa, Arabidopsis thaliana
  peptide (1)..(101): Ceres Seq. ID no. 12674391
  misc_feature (1)..(81): Pfam Name: Extensin-like region Pfam Description: Extensin-like region
  misc_feature (1)..(101): Homolog of NCBI NO: 21554421 NR Description: unknown [Arabidopsis thaliana]
  misc_feature (1)..(101): Homolog of NCBI NO: 15227350 NR Description: unknown protein; protein id: At2g41420.1
  misc_feature (3)..(101): Homolog of NCBI NO: 40538901 NR Description: expressed protein [Oryza sativa (japonica
  misc_feature (3)..(101): Homolog of NCBI NO: 34393718 NR Description: adhesive/proline-rich protein homolog-like
  misc_feature (27)..(101): Homolog of NCBI NO: 1808688 NR Description: hypothetical protein [Sporobolus stapfianus]
  misc_feature (28)..(101): Homolog of NCBI NO: 21618167 NR Description: adhesive/proline-rich protein homolog
  misc_feature (28)..(101): Homolog of NCBI NO: 18425209 NR Description: expressed protein; protein id: At5g67600.1, by cDNA: 9946., supported by cDNA: gi_14532793, supported by gi_21281248 [Arabidopsis thaliana] >gi|9757881|dbj|BAB08468.1|
  misc_feature (1)..(101): Homolog of NCBI NO: 15229624 NR Description: putative protein; protein id: At3g49840.1
  misc_feature (3)..(73): Homolog of NCBI NO: 6469591 NR Description: unknown [Eufolliculina uhligi]
  misc_feature (5)..(81): Homolog of NCBI NO: 6469591 NR Description: unknown [Eufolliculina uhligi]
MSQQPPAVGVPPSHAYPAEGPPKDAYPPPGQPYPQQGYPPPQGYPQQGYPPQGYPPQGYPEQGYPQQGYPPQQQQQQKHSPGMLEGCIAALCCYCVLDACF

SEQ ID NO: 84314 - DNA, 1398 bp, Arabidopsis thaliana
  misc_feature (1)..(1398): Ceres Seq. ID no. 12674430
  misc_feature: MA Experiment ID: 108434 Result: Up-regulated in Transcription
  misc_feature: MA Experiment 108434 PARAMETER Experiment Name: At_Root_Tips_cDNA_P Parameter: Tissue Value: Root Tips
  misc_feature: MA Experiment ID: 108569 Result: Up-regulated in Transcription
  misc_feature: MA Experiment 108569 PARAMETER Experiment Name: At_0.001%_MeJA__cDNA_P Parameter: Timepoint (hr) Value: 6
  misc_feature: MA Experiment 108569 PARAMETER Experiment Name: At_0.001%_MeJA__cDNA_P Parameter: Tissue Value: Aerial
  misc_feature: MA Experiment 108569 PARAMETER Experiment Name: At_0.001%_MeJA__cDNA_P Parameter: Treatment Value: 0.001% MeJA vs. No Treatment
  misc_feature: MA Experiment ID: 108573 Result: Up-regulated in Transcription
  misc_feature: MA Experiment 108573 PARAMETER Experiment Name: At_Drought_cDNA_P Parameter: Timepoint (hr) Value: 6
  misc_feature: MA Experiment 108573 PARAMETER Experiment Name: At_Drought_cDNA_P Parameter: Tissue Value: Aerial
  misc_feature: MA Experiment 108573 PARAMETER Experiment Name: At_Drought_cDNA_P Parameter: Treatment Value: Drought vs. No Drought
  misc_feature: MA Experiment ID: 108595 Result: Down-regulated in Transcription
  misc_feature: MA Experiment 108595 PARAMETER Experiment Name: At_Ler-pi_Ovule_cDNA_P Parameter: Plant Line Value: null
tttgttttgatttcctctctcactctgcacacgaaggcgagagagagagagaaagaaaaaagcgaagaatacgcagaatccatccaatttagggttagggctgcccctaatctggaaacctttgcctcgtttctgatctgttttccggatccgacttgaaggaaagaagacgacgacgcactaccaaaaacatgggcgcgaattcgcttccaacggatgcaaccctcgatctagatgagcagatctcgcagctcatgcagtgcaagcctctctccgagcaacaggtagcattatgtgagaaagctaaggagatcttaatggatgaaagcaacgttcagcctgttaaaagccctgtgacaatctgcggtgatattcatggacagttccatgatcttgcagagcttttccgtattgggggaaagtgtcctgataccaactatctgtttatgggagactatgtcgaccgtggatattattctgtggaaactgttacgctgttggttggcttgaaagtacggtatccacagcgaatcactattcttagaggaaaccatgaaagtcgtcagattactcaggtttatggattttatgatgaatgtctgcgaaagtatggcaatgcaaatgtttggaagatatttacagacctctttgactatttcccactgacagccttggtggagtcggaaatattctgccttcacggtggattatcaccatccatcgagacccttgacaacattaggaactttgatcgggttcaagaagttccacatgaagggcctatgtgtgacttattatggtctgatcctgatgacagatgtggctggggaatctctcctcgtggtgctggatatacatttggtcaggatatttcggaacaattcaatcacactaacaacttaaagctgatcgcccgagcgcatcagctcgttatggatggattcaattgggcacacgagcaaaaagtggttactatattcagtgcaccaaactattgctatcgctgtggaaacatggcctcaattcttgaggtcgatgactgcaggaaccacacgttcattcagtttgaaccagcaccgaggagaggagagccagatgtaacccgaaggacacctgactatttcctttgaagatactcagctcctcctgcagcttccggttgttggtttttgaagatctctgcttattccatttggttcaacgcatttgtgttccaggttgcttctctttaaaatcaatttagccctctcccttggaatagtgtaatataggcaaagaggtcaatgaactttaaaacctctcatgaacatgtgtttggctgaacttattagctcccttctgcatcagaatctgtttattgtgagatattttttcgatttatttcacgtaatttttccc

SEQ ID NO: 84315 - protein, 312 aa, Arabidopsis thaliana
  peptide (1)..(312): Ceres Seq. ID no. 12674431
  misc_feature (53)..(248): Pfam Name: Calcineurin-like phosphoesterase Pfam Description: Calcineurin-like phosphoesterase
  misc_feature (1)..(312): Homolog of NCBI NO: 18410971 NR Description: protein phosphatase PP2A catalytic subunit; id: At3g58500.1, supported by cDNA: gi_15810366, supported by gi_16209681, supported by cDNA: gi_473258 [Arabidopsis thaliana]
  misc_feature (1)..(312): Homolog of NCBI NO: 18405985 NR Description: protein phosphatase 2A (PP2A); protein id:
  misc_feature (6)..(312): Homolog of NCBI NO: 418777 NR Description: phosphoprotein phosphatase (EC 3.1.3.16) 2A-alpha
  misc_feature (1)..(312): Homolog of NCBI NO: 548441 NR Description: SERINE/THREONINE PROTEIN PHOSPHATASE PP2A
  misc_feature (1)..(312): Homolog of NCBI NO: 7248363 NR Description: type 2A protein phosphatase-3 [Vicia faba]
  misc_feature (5)..(312): Homolog of NCBI NO: 1352668 NR Description: SERINE/THREONINE PROTEIN PHOSPHATASE PP2A
  misc_feature (5)..(312): Homolog of NCBI NO: 81694 NR Description: phosphoprotein phosphatase (EC 3.1.3.16) 2A
  misc_feature (33)..(312): Homolog of NCBI NO: 21593204 NR Description: phosphoprotein phosphatase 2A isoform 4
  misc_feature (1)..(291): Homolog of NCBI NO: 11262975 NR Description: phosphoprotein phosphatase (EC 3.1.3.16) 2A-4
  misc_feature (14)..(312): Homolog of NCBI NO: 11134218 NR Description: Serine/threonine protein phosphatase PP2A-2
MGANSLPTDATLDLDEQISQLMQCKPLSEQQVALCEKAKEILMDESNVQPVKSPVTICGDIHGQFHDLAELFRIGGKCPDTNYLFMGDYVDRGYYSVETVTLLVGLKVRYPQRITILRGNHESRQITQVYGFYDECLRKYGNANVWKIFTDLFDYFPLTALVESEIFCLHGGLSPSIETLDNIRNFDRVQEVPHEGPMCDLLWSDPDDRCGWGISPRGAGYTFGQDISEQFNHTNNLKLIARAHQLVMDGFNWAHEQKVVTIFSAPNYCYRCGNMASILEVDDCRNHTFIQFEPAPRRGEPDVTRRTPDYFL

SEQ ID NO: 84316 - protein, 291 aa, Arabidopsis thaliana
  peptide (1)..(291): Ceres Seq. ID no. 12674432
  misc_feature (32)..(227): Pfam Name: Calcineurin-like phosphoesterase Pfam Description: Calcineurin-like phosphoesterase
  misc_feature (1)..(291): Homolog of NCBI NO: 18410971 NR Description: protein phosphatase PP2A catalytic subunit; id: At3g58500.1, supported by cDNA: gi_15810366, supported by gi_16209681, supported by cDNA: gi_473258 [Arabidopsis thaliana]
  misc_feature (1)..(291): Homolog of NCBI NO: 18405985 NR Description: protein phosphatase 2A (PP2A); protein id:
  misc_feature (1)..(291): Homolog of NCBI NO: 418777 NR Description: phosphoprotein phosphatase (EC 3.1.3.16) 2A-alpha
  misc_feature (1)..(291): Homolog of NCBI NO: 548441 NR Description: SERINE/THREONINE PROTEIN PHOSPHATASE PP2A
  misc_feature (1)..(291): Homolog of NCBI NO: 7248363 NR Description: type 2A protein phosphatase-3 [Vicia faba]
  misc_feature (1)..(291): Homolog of NCBI NO: 1352668 NR Description: SERINE/THREONINE PROTEIN PHOSPHATASE PP2A
  misc_feature (1)..(291): Homolog of NCBI NO: 81694 NR Description: phosphoprotein phosphatase (EC 3.1.3.16) 2A
  misc_feature (12)..(291): Homolog of NCBI NO: 21593204 NR Description: phosphoprotein phosphatase 2A isoform 4
  misc_feature (1)..(270): Homolog of NCBI NO: 11262975 NR Description: phosphoprotein phosphatase (EC 3.1.3.16) 2A-4
  misc_feature (1)..(291): Homolog of NCBI NO: 11134218 NR Description: Serine/threonine protein phosphatase PP2A-2
MQCKPLSEQQVALCEKAKEILMDESNVQPVKSPVTICGDIHGQFHDLAELFRIGGKCPDTNYLFMGDYVDRGYYSVETVTLLVGLKVRYPQRITILRGNHESRQITQVYGFYDECLRKYGNANVWKIFTDLFDYFPLTALVESEIFCLHGGLSPSIETLDNIRNFDRVQEVPHEGPMCDLLWSDPDDRCGWGISPRGAGYTFGQDISEQFNHTNNLKLIARAHQLVMDGFNWAHEQKVVTIFSAPNYCYRCGNMASILEVDDCRNHTFIQFEPAPRRGEPDVTRRTPDYFL

SEQ ID NO: 84317 - protein, 270 aa, Arabidopsis thaliana; identical to SEQ ID NO: 23779
  peptide (1)..(270): Ceres Seq. ID no. 12674433
  misc_feature (11)..(206): Pfam Name: Calcineurin-like phosphoesterase Pfam Description: Calcineurin-like phosphoesterase
  misc_feature (1)..(270): Homolog of NCBI NO: 18410971 NR Description: protein phosphatase PP2A catalytic subunit; id: At3g58500.1, supported by cDNA: gi_15810366, supported by gi_16209681, supported by cDNA: gi_473258 [Arabidopsis thaliana]
  misc_feature (1)..(270): Homolog of NCBI NO: 18405985 NR Description: protein phosphatase 2A (PP2A); protein id:
  misc_feature (1)..(270): Homolog of NCBI NO: 418777 NR Description: phosphoprotein phosphatase (EC 3.1.3.16) 2A-alpha
  misc_feature (1)..(270): Homolog of NCBI NO: 548441 NR Description: SERINE/THREONINE PROTEIN PHOSPHATASE PP2A
  misc_feature (1)..(270): Homolog of NCBI NO: 7248363 NR Description: type 2A protein phosphatase-3 [Vicia faba]
  misc_feature (1)..(270): Homolog of NCBI NO: 1352668 NR Description: SERINE/THREONINE PROTEIN PHOSPHATASE PP2A
  misc_feature (1)..(270): Homolog of NCBI NO: 81694 NR Description: phosphoprotein phosphatase (EC 3.1.3.16) 2A
  misc_feature (1)..(270): Homolog of NCBI NO: 21593204 NR Description: phosphoprotein phosphatase 2A isoform 4
  misc_feature (1)..(249): Homolog of NCBI NO: 11262975 NR Description: phosphoprotein phosphatase (EC 3.1.3.16) 2A-4
  misc_feature (1)..(270): Homolog of NCBI NO: 11134218 NR Description: Serine/threonine protein phosphatase PP2A-2

SEQ ID NO: 84318 - DNA, 1509 bp, Arabidopsis thaliana
  misc_feature (1)..(1509): Ceres Seq. ID no. 12674438
  misc_feature: MA Experiment ID: 20000173 Result: Down-regulated in Transcription
  misc_feature: MA Experiment 20000173 PARAMETER Experiment Name: At_42deg_Heat_P Parameter: Age (day) Value: 14
  misc_feature: MA Experiment 20000173 PARAMETER Experiment Name: At_42deg_Heat_P Parameter: Organism Value: A. thaliana
  misc_feature: MA Experiment 20000173 PARAMETER Experiment Name: At_42deg_Heat_P Parameter: Plant Line Value: WS
  misc_feature: MA Experiment 20000173 PARAMETER Experiment Name: At_42deg_Heat_P Parameter: Temperature (deg C) Value: 42 vs. 22
  misc_feature: MA Experiment 20000173 PARAMETER Experiment Name: At_42deg_Heat_P Parameter: Timepoint (hr) Value: 6
  misc_feature: MA Experiment 20000173 PARAMETER Experiment Name: At_42deg_Heat_P Parameter: Tissue Value: Aerial
  misc_feature: MA Experiment ID: 20000179 Result: Up-regulated in Transcription
  misc_feature: MA Experiment 20000179 PARAMETER Experiment Name: At_Germinating_Seeds_P Parameter: Age (hr) Value: 6 vs. 0
  misc_feature: MA Experiment 20000179 PARAMETER Experiment Name: At_Germinating_Seeds_P Parameter: Tissue Value: Germinating Seeds
  misc_feature: MA Experiment ID: 20000180 Result: Up-regulated in Transcription
  misc_feature: MA Experiment 20000180 PARAMETER Experiment Name: At_Germinating_Seeds_P Parameter: Age (hr) Value: 24 vs. 0
  misc_feature: MA Experiment 20000180 PARAMETER Experiment Name: At_Germinating_Seeds_P Parameter: Tissue Value: Germinating Seeds
  misc_feature: MA Experiment ID: 20000185 Result: Down-regulated in Transcription
  misc_feature: MA Experiment 20000185 PARAMETER Experiment Name: At_Roots__P Parameter: Age (day) Value: 7 vs. 21
  misc_feature: MA Experiment 20000185 PARAMETER Experiment Name: At_Roots__P Parameter: Organism Value: A. thaliana
  misc_feature: MA Experiment 20000185 PARAMETER Experiment Name: At_Roots__P Parameter: Tissue Value: Roots vs. Whole Plant
  misc_feature: MA Experiment ID: 20000234 Result: Down-regulated in Transcription
  misc_feature: MA Experiment 20000234 PARAMETER Experiment Name: At_Siliques_P Parameter: Age (day) Value: 21
  misc_feature: MA Experiment 20000234 PARAMETER Experiment Name: At_Siliques_P Parameter: Organism Value: A. thaliana
  misc_feature: MA Experiment 20000234 PARAMETER Experiment Name: At_Siliques_P Parameter: Plant Line Value: WS
  misc_feature: MA Experiment 20000234 PARAMETER Experiment Name: At_Siliques_P Parameter: Tissue Value: Less Than 5mm Siliques vs. Whole Plant
  misc_feature: MA Experiment ID: 20000265 Result: Down-regulated in Transcription
  misc_feature: MA Experiment 20000265 PARAMETER Experiment Name: At_Open_Flower_P Parameter: Age (day) Value: 21
  misc_feature: MA Experiment 20000265 PARAMETER Experiment Name: At_Open_Flower_P Parameter: Plant Line Value: WS
  misc_feature: MA Experiment 20000265 PARAMETER Experiment Name: At_Open_Flower_P Parameter: Tissue Value: Closed Flower vs. Whole Plant
  misc_feature: MA Experiment ID: 20000286 Result: Down-regulated in Transcription
  misc_feature: MA Experiment 20000286 PARAMETER Experiment Name: At_Open_Flower_P Parameter: Age (day) Value: 21
  misc_feature: MA Experiment 20000286 PARAMETER Experiment Name: At_Open_Flower_P Parameter: Plant Line Value: WS
  misc_feature: MA Experiment 20000286 PARAMETER Experiment Name: At_Open_Flower_P Parameter: Tissue Value: Half Open vs. Whole Plant
  misc_feature: MA Experiment ID: 20000308 Result: Down-regulated in Transcription
  misc_feature: MA Experiment 20000308 PARAMETER Experiment Name: At_100mM_NaCl__P Parameter: Age (day) Value: 17
  misc_feature: MA Experiment 20000308 PARAMETER Experiment Name: At_100mM_NaCl__P Parameter: Organism Value: A. thaliana
  misc_feature: MA Experiment 20000308 PARAMETER Experiment Name: At_100mM_NaCl__P Parameter: Plant Line Value: WS
  misc_feature: MA Experiment 20000308 PARAMETER Experiment Name: At_100mM_NaCl__P Parameter: Timepoint (hr) Value: 72
  misc_feature: MA Experiment 20000308 PARAMETER Experiment Name: At_100mM_NaCl__P Parameter: Tissue Value: Whole Plant
  misc_feature: MA Experiment 20000308 PARAMETER Experiment Name: At_100mM_NaCl__P Parameter: Treatment Value: 100mM NaCl vs. No Treatment
  misc_feature: MA Experiment ID: 20000438 Result: Up-regulated in Transcription
  misc_feature: MA Experiment 20000438 PARAMETER Experiment Name: At_Shoots__P Parameter: Age (day) Value: 14
  misc_feature: MA Experiment 20000438 PARAMETER Experiment Name: At_Shoots__P Parameter: Tissue Value: Shoots vs. Whole Plant
  misc_feature: MA Experiment ID: 20000439 Result: Down-regulated in Transcription
  misc_feature: MA Experiment 20000439 PARAMETER Experiment Name: At_Roots__P Parameter: Age (day) Value: 14 vs. 21
  misc_feature: MA Experiment 20000439 PARAMETER Experiment Name: At_Roots__P Parameter: Organism Value: A. thaliana
  misc_feature: MA Experiment 20000439 PARAMETER Experiment Name: At_Roots__P Parameter: Tissue Value: Roots vs. Whole Plant
  misc_feature: MA Experiment ID: 20000441 Result: Up-regulated in Transcription
  misc_feature: MA Experiment 20000441 PARAMETER Experiment Name: At_1uM_BR-BRZ__P Parameter: Tissue Value: Shoot Apices
  misc_feature: MA Experiment 20000441 PARAMETER Experiment Name: At_1uM_BR-BRZ__P Parameter: Treatment Value: 1uM BR vs. No Treatment
  misc_feature: MA Experiment ID: 20000443 Result: Up-regulated in Transcription
  misc_feature: MA Experiment 20000443 PARAMETER Experiment Name: At_1uM_BR-BRZ__P Parameter: Tissue Value: Shoot Apices
  misc_feature: MA Experiment 20000443 PARAMETER Experiment Name: At_1uM_BR-BRZ__P Parameter: Treatment Value: 1uM BRZ vs. No Treatment
  misc_feature: MA Experiment ID: 20000578 Result: Down-regulated in Transcription
  misc_feature: MA Experiment 20000578 PARAMETER Experiment Name: At_CS3726__P Parameter: Organism Value: A. thaliana
  misc_feature: MA Experiment 20000578 PARAMETER Experiment Name: At_CS3726__P Parameter: Plant Line Value: CS3726
  misc_feature: MA Experiment 20000578 PARAMETER Experiment Name: At_CS3726__P Parameter: Tissue Value: Whole Plant
  misc_feature: MA Experiment ID: 20001247 Result: Up-regulated in Transcription
  misc_feature: MA Experiment 20001247 PARAMETER Experiment Name: At_Far-red-induction_P Parameter: Age (day) Value: 7
  misc_feature: MA Experiment 20001247 PARAMETER Experiment Name: At_Far-red-induction_P Parameter: Light Value: Far-red vs. White
  misc_feature: MA Experiment 20001247 PARAMETER Experiment Name: At_Far-red-induction_P Parameter: Organism Value: A. thaliana
  misc_feature: MA Experiment 20001247 PARAMETER Experiment Name: At_Far-red-induction_P Parameter: Plant Line Value: Columbia
  misc_feature: MA Experiment 20001247 PARAMETER Experiment Name: At_Far-red-induction_P Parameter: Timepoint (hr) Value: 1
  misc_feature: MA Experiment 20001247 PARAMETER Experiment Name: At_Far-red-induction_P Parameter: Tissue Value: Whole Plant
  misc_feature: MA Experiment ID: 20001450 Result: Up-regulated in Transcription
  misc_feature: MA Experiment 20001450 PARAMETER Experiment Name: At_Far-red-induction_P Parameter: Age (day) Value: 7
  misc_feature: MA Experiment 20001450 PARAMETER Experiment Name: At_Far-red-induction_P Parameter: Light Value: Far-red vs. White
  misc_feature: MA Experiment 20001450 PARAMETER Experiment Name: At_Far-red-induction_P Parameter: Organism Value: A. thaliana
  misc_feature: MA Experiment 20001450 PARAMETER Experiment Name: At_Far-red-induction_P Parameter: Plant Line Value: Columbia
  misc_feature: MA Experiment 20001450 PARAMETER Experiment Name: At_Far-red-induction_P Parameter: Timepoint (hr) Value: 8
  misc_feature: MA Experiment 20001450 PARAMETER Experiment Name: At_Far-red-induction_P Parameter: Tissue Value: Whole Plant
  misc_feature: MA Experiment ID: 20001560 Result: Down-regulated in Transcription
  misc_feature: MA Experiment 20001560 PARAMETER Experiment Name: At_Drought_Soil_Dry_P Parameter: Age (day) Value: 28
  misc_feature: MA Experiment 20001560 PARAMETER Experiment Name: At_Drought_Soil_Dry_P Parameter: Organism Value: A. thaliana
  misc_feature: MA Experiment 20001560 PARAMETER Experiment Name: At_Drought_Soil_Dry_P Parameter: Plant Line Value: WS
  misc_feature: MA Experiment 20001560 PARAMETER Experiment Name: At_Drought_Soil_Dry_P Parameter: Post Timepoint (hr) Value: None
  misc_feature: MA Experiment 20001560 PARAMETER Experiment Name: At_Drought_Soil_Dry_P Parameter: Post-Treatment Value: None
  misc_feature: MA Experiment 20001560 PARAMETER Experiment Name: At_Drought_Soil_Dry_P Parameter: Timepoint (day) Value: 14
  misc_feature: MA Experiment 20001560 PARAMETER Experiment Name: At_Drought_Soil_Dry_P Parameter: Treatment Value: Drought vs. No Drought
  misc_feature: MA Experiment ID: 20001757 Result: Up-regulated in Transcription
  misc_feature: MA Experiment 20001757 PARAMETER Experiment Name: At_50mM_NH4NO3_L-to-H_P Parameter: Timepoint (hr) Value: 6
  misc_feature: MA Experiment 20001757 PARAMETER Experiment Name: At_50mM_NH4NO3_L-to-H_P Parameter: Tissue Value: Leaf
  misc_feature: MA Experiment 20001757 PARAMETER Experiment Name: At_50mM_NH4NO3_L-to-H_P Parameter: Treatment Value: 50mM NH4NO3 vs 100mM Mannitol
  misc_feature: MA Experiment ID: 20001771 Result: Up-regulated in Transcription
  misc_feature: MA Experiment 20001771 PARAMETER Experiment Name: At_Far-red-enriched-adult_P Parameter: Age (day) Value: 28
  misc_feature: MA Experiment 20001771 PARAMETER Experiment Name: At_Far-red-enriched-adult_P Parameter: Light Value: Far-red enriched vs. White
  misc_feature: MA Experiment 20001771 PARAMETER Experiment Name: At_Far-red-enriched-adult_P Parameter: Organism Value: A. thaliana
  misc_feature: MA Experiment 20001771 PARAMETER Experiment Name: At_Far-red-enriched-adult_P Parameter: Plant Line Value: Columbia
  misc_feature: MA Experiment 20001771 PARAMETER Experiment Name: At_Far-red-enriched-adult_P Parameter: Timepoint (hr) Value: 16
  misc_feature: MA Experiment 20001771 PARAMETER Experiment Name: At_Far-red-enriched-adult_P Parameter: Tissue Value: Aerial
  misc_feature: MA Experiment ID: 20001904 Result: Down-regulated in Transcription
  misc_feature: MA Experiment 20001904 PARAMETER Experiment Name: At_Drought_Reproduction_P Parameter: Age (day) Value: 37
  misc_feature: MA Experiment 20001904 PARAMETER Experiment Name: At_Drought_Reproduction_P Parameter: Organism Value: A. thaliana
  misc_feature: MA Experiment 20001904 PARAMETER Experiment Name: At_Drought_Reproduction_P Parameter: Plant Line Value: WS
  misc_feature: MA Experiment 20001904 PARAMETER Experiment Name: At_Drought_Reproduction_P Parameter: Timepoint (day) Value: 7
  misc_feature: MA Experiment 20001904 PARAMETER Experiment Name: At_Drought_Reproduction_P Parameter: Tissue Value: Rosettes
  misc_feature: MA Experiment 20001904 PARAMETER Experiment Name: At_Drought_Reproduction_P Parameter: Treatment Value: Drought vs. No Drought
  misc_feature: MA Experiment ID: 20001905 Result: Down-regulated in Transcription
  misc_feature: MA Experiment 20001905 PARAMETER Experiment Name: At_Drought_Reproduction_P Parameter: Age (day) Value: 40
  misc_feature: MA Experiment 20001905 PARAMETER Experiment Name: At_Drought_Reproduction_P Parameter: Organism Value: A. thaliana
  misc_feature: MA Experiment 20001905 PARAMETER Experiment Name: At_Drought_Reproduction_P Parameter: Plant Line Value: WS
  misc_feature: MA Experiment 20001905 PARAMETER Experiment Name: At_Drought_Reproduction_P Parameter: Timepoint (day) Value: 10
  misc_feature: MA Experiment 20001905 PARAMETER Experiment Name: At_Drought_Reproduction_P Parameter: Tissue Value: Rosettes
  misc_feature: MA Experiment 20001905 PARAMETER Experiment Name: At_Drought_Reproduction_P Parameter: Treatment Value: Drought vs. No Drought
atggaacaagtgtttgctgattggaattttgaagataattttcacatgtccactaataaaagatcaatcagaccagaagatgaattagtggagctattgtggagagatggtcaagtggttttacaaagccaagctcgtagagaaccgtcagtccaagtccaaacccacaaacaagaaaccctaagaaaacccaacaatatttttcttgacaaccaagaaacagtacaaaagcctaactacgctgctctagatgatcaagaaaccgtctcctggatacaataccctccggatgacgtcatcgaccctttcgaatccgagttctcctctcatttcttctcttcgatcgatcacctcggaggtcctgagaagccacgaacgatcgaagagacagttaagcatgaggctcaagccatggctcctcctaagtttagatcctcggttataacagtcggaccgagtcattgcggcagcaaccagtcaacaaatattcatcaggccactacacttccggtttctatgagtgatagaagcaagaacgtcgaagaaagacttgacacttcgtcaggtggctcctccggttgcagctatggaaggaacaacaaagaaaccgttagtggaacaagtgtaaccattgaccgtaaaagaaaacatgttatggatgctgatcaagaatctgtgtctcaatcagatataggtttgacctcaaccgatgatcaaaccatgggtaacaaatcgagccaacggtcaggatctactcgaagaagccgtgcagctgaagttcataatctctcagaaaggaggaggagagatcggatcaatgaaagaatgaaagctcttcaagaactcatacctcactgcagcagaacagataaagcttcgatattggatgaagcaattgattacttaaaatcacttcaaatgcaactccaagtgatgtggatgggaagtggaatggcggcggcggcagcagcagcagcaagtccgatgatgtttcccggggtacaatcatctccatacattaatcagatggctatgcaaagtcagatgcaattgtctcaattcccggttatgaaccggtccgctccgcagaaccatcccggtttagtatgtcaaaacccggtacagttgcagctccaagcacagaaccaaatcttatcggagcagctcgctaggtacatgggcgggattccccagatgccgccggcgggaaatcagaccgtgcaacaacaaccagcggacatgttgggatttggatctccggcgggaccgcaaagtcaactgtcggcaccggcgaccaccgacagtcttcatatgggtaaaataggctgacttggcatatagttttcctccgaaattattcttcttacagttggtgattgttatttatttttggtcgcctaagcaagcataaaagctaagtcaaatgtattatagagatctaataagttagtctcatacttataacttatttttaaacagttgaattatagtatcaatcaagtgttggga

SEQ ID NO: 84319 - protein, 442 aa, Arabidopsis thaliana
  peptide (1)..(442): Ceres Seq. ID no. 12674439
  misc_feature (257)..(306): Pfam Name: Helix-loop-helix DNA-binding domain Pfam Description: Helix-loop-helix DNA-binding domain
  misc_feature (1)..(442): Homolog of NCBI NO: 30694919 NR Description: bHLH protein family [Arabidopsis thaliana]
  misc_feature (1)..(442): Homolog of NCBI NO: 30694924 NR Description: bHLH protein family [Arabidopsis thaliana]
  misc_feature (1)..(442): Homolog of NCBI NO: 20127070 NR Description: putative bHLH transcription factor [Arabidopsis
  misc_feature (1)..(288): Homolog of NCBI NO: 19698849 NR Description: putative protein [Arabidopsis thaliana]
  misc_feature (8)..(434): Homolog of NCBI NO: 25408828 NR Description: hypothetical protein At2g43010 [imported] -
  misc_feature (8)..(434): Homolog of NCBI NO: 30689218 NR Description: transcription factor (BHLH9) -related
  misc_feature (8)..(434): Homolog of NCBI NO: 30689224 NR Description: transcription factor (BHLH9) -related
  misc_feature (8)..(266): Homolog of NCBI NO: 20197630 NR Description: expressed protein [Arabidopsis thaliana]
  misc_feature (8)..(266): Homolog of NCBI NO: 13430618 NR Description: unknown protein [Arabidopsis thaliana]
  misc_feature (110)..(366): Homolog of NCBI NO: 34899612 NR Description: putative phytochrome interacting factor 4 [Oryza
MEQVFADWNFEDNFHMSTNKRSIRPEDELVELLWRDGQVVLQSQARREPSVQVQTHKQETLRKPNNIFLDNQETVQKPNYAALDDQETVSWIQYPPDDVIDPFESEFSSHFFSSIDHLGGPEKPRTIEETVKHEAQAMAPPKFRSSVITVGPSHCGSNQSTNIHQATTLPVSMSDRSKNVEERLDTSSGGSSGCSYGRNNKETVSGTSVTIDRKRKHVMDADQESVSQSDIGLTSTDDQTMGNKSSQRSGSTRRSRAAEVHNLSERRRRDRINERMKALQELIPHCSRTDKASILDEAIDYLKSLQMQLQVMWMGSGMAAAAAAAASPMMFPGVQSSPYINQMAMQSQMQLSQFPVMNRSAPQNHPGLVCQNPVQLQLQAQNQILSEQLARYMGGIPQMPPAGNQTVQQQPADMLGFGSPAGPQSQLSAPATTDSLHMGKIG

SEQ ID NO: 84320 - protein, 427 aa, Arabidopsis thaliana
  peptide (1)..(427): Ceres Seq. ID no. 12674440
  misc_feature (242)..(291): Pfam Name: Helix-loop-helix DNA-binding domain Pfam Description: Helix-loop-helix DNA-binding domain
  misc_feature (1)..(427): Homolog of NCBI NO: 30694919 NR Description: bHLH protein family [Arabidopsis thaliana]
  misc_feature (1)..(427): Homolog of NCBI NO: 30694924 NR Description: bHLH protein family [Arabidopsis thaliana]
  misc_feature (1)..(427): Homolog of NCBI NO: 20127070 NR Description: putative bHLH transcription factor [Arabidopsis
  misc_feature (1)..(273): Homolog of NCBI NO: 19698849 NR Description: putative protein [Arabidopsis thaliana]
  misc_feature (1)..(419): Homolog of NCBI NO: 25408828 NR Description: hypothetical protein At2g43010 [imported] -
  misc_feature (1)..(419): Homolog of NCBI NO: 30689218 NR Description: transcription factor (BHLH9) -related
  misc_feature (1)..(419): Homolog of NCBI NO: 30689224 NR Description: transcription factor (BHLH9) -related
  misc_feature (1)..(251): Homolog of NCBI NO: 20197630 NR Description: expressed protein [Arabidopsis thaliana]
  misc_feature (1)..(251): Homolog of NCBI NO: 13430618 NR Description: unknown protein [Arabidopsis thaliana]
  misc_feature (95)..(351): Homolog of NCBI NO: 34899612 NR Description: putative phytochrome interacting factor 4 [Oryza
MSTNKRSIRPEDELVELLWRDGQVVLQSQARREPSVQVQTHKQETLRKPNNIFLDNQETVQKPNYAALDDQETVSWIQYPPDDVIDPFESEFSSHFFSSIDHLGGPEKPRTIEETVKHEAQAMAPPKFRSSVITVGPSHCGSNQSTNIHQATTLPVSMSDRSKNVEERLDTSSGGSSGCSYGRNNKETVSGTSVTIDRKRKHVMDADQESVSQSDIGLTSTDDQTMGNKSSQRSGSTRRSRAAEVHNLSERRRRDRINERMKALQELIPHCSRTDKASILDEAIDYLKSLQMQLQVMWMGSGMAAAAAAAASPMMFPGVQSSPYINQMAMQSQMQLSQFPVMNRSAPQNHPGLVCQNPVQLQLQAQNQILSEQLARYMGGIPQMPPAGNQTVQQQPADMLGFGSPAGPQSQLSAPATTDSLHMGKIG

SEQ ID NO: 84321 - protein, 305 aa, Arabidopsis thaliana
  peptide (1)..(305): Ceres Seq. ID no. 12674441
  misc_feature (120)..(169): Pfam Name: Helix-loop-helix DNA-binding domain Pfam Description: Helix-loop-helix DNA-binding domain
  misc_feature (1)..(305): Homolog of NCBI NO: 30694919 NR Description: bHLH protein family [Arabidopsis thaliana]
  misc_feature (1)..(305): Homolog of NCBI NO: 30694924 NR Description: bHLH protein family [Arabidopsis thaliana]
  misc_feature (1)..(305): Homolog of NCBI NO: 20127070 NR Description: putative bHLH transcription factor [Arabidopsis
  misc_feature (1)..(151): Homolog of NCBI NO: 19698849 NR Description: putative protein [Arabidopsis thaliana]
  misc_feature (1)..(297): Homolog of NCBI NO: 25408828 NR Description: hypothetical protein At2g43010 [imported] -
  misc_feature (1)..(297): Homolog of NCBI NO: 30689218 NR Description: transcription factor (BHLH9) -related
  misc_feature (1)..(297): Homolog of NCBI NO: 30689224 NR Description: transcription factor (BHLH9) -related
  misc_feature (1)..(129): Homolog of NCBI NO: 20197630 NR Description: expressed protein [Arabidopsis thaliana]
  misc_feature (1)..(129): Homolog of NCBI NO: 13430618 NR Description: unknown protein [Arabidopsis thaliana]
  misc_feature (1)..(229): Homolog of NCBI NO: 34899612 NR Description: putative phytochrome interacting factor 4 [Oryza
MAPPKFRSSVITVGPSHCGSNQSTNIHQATTLPVSMSDRSKNVEERLDTSSGGSSGCSYGRNNKETVSGTSVTIDRKRKHVMDADQESVSQSDIGLTSTDDQTMGNKSSQRSGSTRRSRAAEVHNLSERRRRDRINERMKALQELIPHCSRTDKASILDEAIDYLKSLQMQLQVMWMGSGMAAAAAAAASPMMFPGVQSSPYINQMAMQSQMQLSQFPVMNRSAPQNHPGLVCQNPVQLQLQAQNQILSEQLARYMGGIPQMPPAGNQTVQQQPADMLGFGSPAGPQSQLSAPATTDSLHMGKIG

SEQ ID NO: 84322 - DNA, 966 bp, Arabidopsis thaliana
  misc_feature (1)..(966): Ceres Seq. ID no. 12674442
  misc_feature: MA Experiment ID: 108434 Result: Down-regulated in Transcription
  misc_feature: MA Experiment 108434 PARAMETER Experiment Name: At_Root_Tips_cDNA_P Parameter: Tissue Value: Root Tips
  misc_feature: MA Experiment ID: 108464 Result: Up-regulated in Transcription
  misc_feature: MA Experiment 108464 PARAMETER Experiment Name: At_Germinating_Seeds_cDNA_P Parameter: Age (day) Value: 4 vs. 0
  misc_feature: MA Experiment 108464 PARAMETER Experiment Name: At_Germinating_Seeds_cDNA_P Parameter: Tissue Value: Germinating Seeds
  misc_feature: MA Experiment ID: 108573 Result: Up-regulated in Transcription
  misc_feature: MA Experiment 108573 PARAMETER Experiment Name: At_Drought_cDNA_P Parameter: Timepoint (hr) Value: 6
  misc_feature: MA Experiment 108573 PARAMETER Experiment Name: At_Drought_cDNA_P Parameter: Tissue Value: Aerial
  misc_feature: MA Experiment 108573 PARAMETER Experiment Name: At_Drought_cDNA_P Parameter: Treatment Value: Drought vs. No Drought
  misc_feature: MA Experiment ID: 108577 Result: Down-regulated in Transcription
  misc_feature: MA Experiment 108577 PARAMETER Experiment Name: At_42deg_Heat_cDNA_P Parameter: Temperature (deg C) Value: 42 vs. 22
  misc_feature: MA Experiment 108577 PARAMETER Experiment Name: At_42deg_Heat_cDNA_P Parameter: Timepoint (hr) Value: 6
  misc_feature: MA Experiment 108577 PARAMETER Experiment Name: At_42deg_Heat_cDNA_P Parameter: Tissue Value: Aerial
  misc_feature: MA Experiment ID: 108595 Result: Up-regulated in Transcription
  misc_feature: MA Experiment 108595 PARAMETER Experiment Name: At_Ler-pi_Ovule_cDNA_P Parameter: Plant Line Value: null
  misc_feature: MA Experiment ID: 20000179 Result: Up-regulated in Transcription
  misc_feature: MA Experiment 20000179 PARAMETER Experiment Name: At_Germinating_Seeds_P Parameter: Age (hr) Value: 6 vs. 0
  misc_feature: MA Experiment 20000179 PARAMETER Experiment Name: At_Germinating_Seeds_P Parameter: Tissue Value: Germinating Seeds
  misc_feature: MA Experiment ID: 20000180 Result: Up-regulated in Transcription
  misc_feature: MA Experiment 20000180 PARAMETER Experiment Name: At_Germinating_Seeds_P Parameter: Age (hr) Value: 24 vs. 0
  misc_feature: MA Experiment 20000180 PARAMETER Experiment Name: At_Germinating_Seeds_P Parameter: Tissue Value: Germinating Seeds
  misc_feature: MA Experiment ID: 20000185 Result: Up-regulated in Transcription
  misc_feature: MA Experiment 20000185 PARAMETER Experiment Name: At_Roots__P Parameter: Age (day) Value: 7 vs. 21
  misc_feature: MA Experiment 20000185 PARAMETER Experiment Name: At_Roots__P Parameter: Organism Value: A. thaliana
  misc_feature: MA Experiment 20000185 PARAMETER Experiment Name: At_Roots__P Parameter: Tissue Value: Roots vs. Whole Plant
  misc_feature: MA Experiment ID: 20000234 Result: Down-regulated in Transcription
  misc_feature: MA Experiment 20000234 PARAMETER Experiment Name: At_Siliques_P Parameter: Age (day) Value: 21
  misc_feature: MA Experiment 20000234 PARAMETER Experiment Name: At_Siliques_P Parameter: Organism Value: A. thaliana
  misc_feature: MA Experiment 20000234 PARAMETER Experiment Name: At_Siliques_P Parameter: Plant Line Value: WS
  misc_feature: MA Experiment 20000234 PARAMETER Experiment Name: At_Siliques_P Parameter: Tissue Value: Less Than 5mm Siliques vs. Whole Plant
  misc_feature: MA Experiment ID: 20000235 Result: Down-regulated in Transcription
  misc_feature: MA Experiment 20000235 PARAMETER Experiment Name: At_Siliques_P Parameter: Age (day) Value: 21
  misc_feature: MA Experiment 20000235 PARAMETER Experiment Name: At_Siliques_P Parameter: Organism Value: A. thaliana
  misc_feature: MA Experiment 20000235 PARAMETER Experiment Name: At_Siliques_P Parameter: Plant Line Value: WS
  misc_feature: MA Experiment 20000235 PARAMETER Experiment Name: At_Siliques_P Parameter: Tissue Value: 5-10mm Siliques vs. Whole Plant
  misc_feature: MA Experiment ID: 20000265 Result: Down-regulated in Transcription
  misc_feature: MA Experiment 20000265 PARAMETER Experiment Name: At_Open_Flower_P Parameter: Age (day) Value: 21
  misc_feature: MA Experiment 20000265 PARAMETER Experiment Name: At_Open_Flower_P Parameter: Plant Line Value: WS
  misc_feature: MA Experiment 20000265 PARAMETER Experiment Name: At_Open_Flower_P Parameter: Tissue Value: Closed Flower vs. Whole Plant
  misc_feature: MA Experiment ID: 20000286 Result: Down-regulated in Transcription
  misc_feature: MA Experiment 20000286 PARAMETER Experiment Name: At_Open_Flower_P Parameter: Age (day) Value: 21
  misc_feature: MA Experiment 20000286 PARAMETER Experiment Name: At_Open_Flower_P Parameter: Plant Line Value: WS
  misc_feature: MA Experiment 20000286 PARAMETER Experiment Name: At_Open_Flower_P Parameter: Tissue Value: Half Open vs. Whole Plant
  misc_feature: MA Experiment ID: 20000438 Result: Down-regulated in Transcription
  misc_feature: MA Experiment 20000438 PARAMETER Experiment Name: At_Shoots__P Parameter: Age (day) Value: 14
  misc_feature: MA Experiment 20000438 PARAMETER Experiment Name: At_Shoots__P Parameter: Tissue Value: Shoots vs. Whole Plant
  misc_feature: MA Experiment ID: 20000439 Result: Up-regulated in Transcription
  misc_feature: MA Experiment 20000439 PARAMETER Experiment Name: At_Roots__P Parameter: Age (day) Value: 14 vs. 21
  misc_feature: MA Experiment 20000439 PARAMETER Experiment Name: At_Roots__P Parameter: Organism Value: A. thaliana
  misc_feature: MA Experiment 20000439 PARAMETER Experiment Name: At_Roots__P Parameter: Tissue Value: Roots vs. Whole Plant
  misc_feature: MA Experiment ID: 20000495 Result: Up-regulated in Transcription
  misc_feature: MA Experiment 20000495 PARAMETER Experiment Name: At_Guard_Cells_P Parameter: Harvest Date Value: 8/2/2002
  misc_feature: MA Experiment 20000495 PARAMETER Experiment Name: At_Guard_Cells_P Parameter: Organism Value: A. thaliana
  misc_feature: MA Experiment 20000495 PARAMETER Experiment Name: At_Guard_Cells_P Parameter: Tissue Value: Guard Cells vs. Leaves
  misc_feature: MA Experiment ID: 20001451 Result: Up-regulated in Transcription
  misc_feature: MA Experiment 20001451 PARAMETER Experiment Name: At_Far-red-induction_P Parameter: Age (day) Value: 7
  misc_feature: MA Experiment 20001451 PARAMETER Experiment Name: At_Far-red-induction_P Parameter: Light Value: Far-red vs. White
  misc_feature: MA Experiment 20001451 PARAMETER Experiment Name: At_Far-red-induction_P Parameter: Organism Value: A. thaliana
  misc_feature: MA Experiment 20001451 PARAMETER Experiment Name: At_Far-red-induction_P Parameter: Plant Line Value: Columbia
  misc_feature: MA Experiment 20001451 PARAMETER Experiment Name: At_Far-red-induction_P Parameter: Timepoint (hr) Value: 24
  misc_feature: MA Experiment 20001451 PARAMETER Experiment Name: At_Far-red-induction_P Parameter: Tissue Value: Whole Plant
atgcatcgtagagcagcaattcaagaatcggatgacgaagaagatgagacttacaacgacgtcgttcctgaatctccttcttcttgtgaagactcaaagatctcaaaaccaactccaaagaaaaggaggaacgtagagaagagagttgtctcagttccgatagctgacgtggaaggatctaagagcagaggcgaagtatatccaccgtccgattcatgggcctggagaaagtacggacaaaaaccgatcaaaggctcgccttatcccaggggatattacagatgtagtagctcaaaaggatgtccggcgaggaagcaggtggagagaagccgtgtggacccttctaagcttatgattacttacgcctgcgaccacaatcaccctttcccttcctcctccgctaacaccaaatcccaccaccgctcctccgtcgtcctcaaaaccgcaaagaaagaggaagaatacgaagaggaggaagaagaactaaccgtcaccgccgcagaggaaccaccggcgggacttgatctaagccacgtagactcaccgttgctattaggcggctgctacagcgaaatcggagagttcgggtggttctacgacgcgtcgatctcatcatcatctggttcttcgaatttcctcgacgtaactctagagagaggtttttcagtaggccaagaggaagatgagtctttgttcggtgatctcggtgatttacctgattgcgcctccgtgttccgccgtgggactgttgcgacggaggagcaacatcgaagatgtgattttggcgccattcctttctgtgatagttctagatgagtttgtgtgtgtagccaaaaccaaaagaaaaaaacacaatttttttattttccactgtaaaggtgtatcaatggtggattcatttttttaaaaaaggaaacccaaataataaatttaatatcatttgagagaattcaagtacaattaaag

SEQ ID NO: 84323 - protein, 271 aa, Arabidopsis thaliana
  peptide (1)..(271): Ceres Seq. ID no. 12674443
  misc_feature (69)..(129): Pfam Name: WRKY DNA -binding domain Pfam Description: WRKY DNA -binding domain
  misc_feature (1)..(271): Homolog of NCBI NO: 22331854 NR Description: WRKY family transcription factor; protein id: supported by cDNA: gi_15991735 [Arabidopsis thaliana]
  misc_feature (1)..(271): Homolog of NCBI NO: 30694863 NR Description: WRKY family transcription factor [Arabidopsis
  misc_feature (91)..(271): Homolog of NCBI NO: 11357269 NR Description: DNA-binding WRKY-like protein - Arabidopsis
  misc_feature (1)..(91): Homolog of NCBI NO: 11357269 NR Description: DNA-binding WRKY-like protein - Arabidopsis
  misc_feature (14)..(250): Homolog of NCBI NO: 22329838 NR Description: WRKY family transcription factor; protein id: supported by cDNA: gi_17980955 [Arabidopsis thaliana]
  misc_feature (22)..(218): Homolog of NCBI NO: 34910854 NR Description: P0435H01.23 [Oryza sativa (japonica
  misc_feature (224)..(247): Homolog of NCBI NO: 34910854 NR Description: P0435H01.23 [Oryza sativa (japonica
  misc_feature (25)..(171): Homolog of NCBI NO: 34909540 NR Description: P0481E12.40 [Oryza sativa (japonica
  misc_feature (40)..(140): Homolog of NCBI NO: 38567968 NR Description: OSJNBa0093F12.9 [Oryza sativa (japonica
  misc_feature (41)..(162): Homolog of NCBI NO: 29126352 NR Description: putative DNA -binding protein [Oryza sativa
MHRRAAIQESDDEEDETYNDVVPESPSSCEDSKISKPTPKKRRNVEKRVVSVPIADVEGSKSRGEVYPPSDSWAWRKYGQKPIKGSPYPRGYYRCSSSKGCPARKQVERSRVDPSKLMITYACDHNHPFPSSSANTKSHHRSSVVLKTAKKEEEYEEEEEELTVTAAEEPPAGLDLSHVDSPLLLGGCYSEIGEFGWFYDASISSSSGSSNFLDVTLERGFSVGQEEDESLFGDLGDLPDCASVFRRGTVATEEQHRRCDFGAIPFCDSSR

SEQ ID NO: 84324 - protein, 154 aa, Arabidopsis thaliana; identical to SEQ ID NO: 38751
  peptide (1)..(154): Ceres Seq. ID no. 12674444
  misc_feature (1)..(154): Homolog of NCBI NO: 22331854 NR Description: WRKY family transcription factor; protein id: supported by cDNA: gi_15991735 [Arabidopsis thaliana]
  misc_feature (1)..(154): Homolog of NCBI NO: 30694863 NR Description: WRKY family transcription factor [Arabidopsis
  misc_feature (1)..(154): Homolog of NCBI NO: 11357269 NR Description: DNA-binding WRKY-like protein - Arabidopsis
  misc_feature (1)..(133): Homolog of NCBI NO: 22329838 NR Description: WRKY family transcription factor; protein id: supported by cDNA: gi_17980955 [Arabidopsis thaliana]
  misc_feature (1)..(101): Homolog of NCBI NO: 34910854 NR Description: P0435H01.23 [Oryza sativa (japonica
  misc_feature (107)..(130): Homolog of NCBI NO: 34910854 NR Description: P0435H01.23 [Oryza sativa (japonica
  misc_feature (1)..(54): Homolog of NCBI NO: 34909540 NR Description: P0481E12.40 [Oryza sativa (japonica
  misc_feature (1)..(23): Homolog of NCBI NO: 38567968 NR Description: OSJNBa0093F12.9 [Oryza sativa (japonica
  misc_feature (1)..(45): Homolog of NCBI NO: 29126352 NR Description: putative DNA -binding protein [Oryza sativa
  misc_feature (1)..(27): Homolog of NCBI NO: 15226838 NR Description: WRKY family transcription factor; protein id: supported by cDNA: gi_15384228 [Arabidopsis thaliana]

SEQ ID NO: 84325 - DNA, 582 bp, Arabidopsis thaliana
  misc_feature (1)..(582): Ceres Seq. ID no. 12674469
  misc_feature: MA Experiment ID: 108569 Result: Down-regulated in Transcription
  misc_feature: MA Experiment 108569 PARAMETER Experiment Name: At_0.001%_MeJA__cDNA_P Parameter: Timepoint (hr) Value: 6
  misc_feature: MA Experiment 108569 PARAMETER Experiment Name: At_0.001%_MeJA__cDNA_P Parameter: Tissue Value: Aerial
  misc_feature: MA Experiment 108569 PARAMETER Experiment Name: At_0.001%_MeJA__cDNA_P Parameter: Treatment Value: 0.001% MeJA vs. No Treatment
  misc_feature: MA Experiment ID: 108577 Result: Up-regulated in Transcription
  misc_feature: MA Experiment 108577 PARAMETER Experiment Name: At_42deg_Heat_cDNA_P Parameter: Temperature (deg C) Value: 42 vs. 22
  misc_feature: MA Experiment 108577 PARAMETER Experiment Name: At_42deg_Heat_cDNA_P Parameter: Timepoint (hr) Value: 6
  misc_feature: MA Experiment 108577 PARAMETER Experiment Name: At_42deg_Heat_cDNA_P Parameter: Tissue Value: Aerial
  misc_feature: MA Experiment ID: 20000227 Result: Down-regulated in Transcription
  misc_feature: MA Experiment 20000227 PARAMETER Experiment Name: At_Root-Tips-vs-Tops_P Parameter: Tissue Value: Root Tips vs. Root Tops
  misc_feature: MA Experiment ID: 20000234 Result: Down-regulated in Transcription
  misc_feature: MA Experiment 20000234 PARAMETER Experiment Name: At_Siliques_P Parameter: Age (day) Value: 21
  misc_feature: MA Experiment 20000234 PARAMETER Experiment Name: At_Siliques_P Parameter: Organism Value: A. thaliana
  misc_feature: MA Experiment 20000234 PARAMETER Experiment Name: At_Siliques_P Parameter: Plant Line Value: WS
  misc_feature: MA Experiment 20000234 PARAMETER Experiment Name: At_Siliques_P Parameter: Tissue Value: Less Than 5mm Siliques vs. Whole Plant
  misc_feature: MA Experiment ID: 20000438 Result: Down-regulated in Transcription
  misc_feature: MA Experiment 20000438 PARAMETER Experiment Name: At_Shoots__P Parameter: Age (day) Value: 14
  misc_feature: MA Experiment 20000438 PARAMETER Experiment Name: At_Shoots__P Parameter: Tissue Value: Shoots vs. Whole Plant
  misc_feature: MA Experiment ID: 20000495 Result: Down-regulated in Transcription
  misc_feature: MA Experiment 20000495 PARAMETER Experiment Name: At_Guard_Cells_P Parameter: Harvest Date Value: 8/2/2002
  misc_feature: MA Experiment 20000495 PARAMETER Experiment Name: At_Guard_Cells_P Parameter: Organism Value: A. thaliana
  misc_feature: MA Experiment 20000495 PARAMETER Experiment Name: At_Guard_Cells_P Parameter: Tissue Value: Guard Cells vs. Leaves
  misc_feature: MA Experiment ID: 20000794 Result: Up-regulated in Transcription
  misc_feature: MA Experiment 20000794 PARAMETER Experiment Name: At_Petals_P Parameter: Age (day) Value: 23-25 days
  misc_feature: MA Experiment 20000794 PARAMETER Experiment Name: At_Petals_P Parameter: Plant Line Value: WS
  misc_feature: MA Experiment 20000794 PARAMETER Experiment Name: At_Petals_P Parameter: Tissue Value: Petals vs. Whole plant
  misc_feature: MA Experiment ID: 20001451 Result: Down-regulated in Transcription
  misc_feature: MA Experiment 20001451 PARAMETER Experiment Name: At_Far-red-induction_P Parameter: Age (day) Value: 7
  misc_feature: MA Experiment 20001451 PARAMETER Experiment Name: At_Far-red-induction_P Parameter: Light Value: Far-red vs. White
  misc_feature: MA Experiment 20001451 PARAMETER Experiment Name: At_Far-red-induction_P Parameter: Organism Value: A. thaliana
  misc_feature: MA Experiment 20001451 PARAMETER Experiment Name: At_Far-red-induction_P Parameter: Plant Line Value: Columbia
  misc_feature: MA Experiment 20001451 PARAMETER Experiment Name: At_Far-red-induction_P Parameter: Timepoint (hr) Value: 24
  misc_feature: MA Experiment 20001451 PARAMETER Experiment Name: At_Far-red-induction_P Parameter: Tissue Value: Whole Plant
  misc_feature: MA Experiment ID: 20001560 Result: Down-regulated in Transcription
  misc_feature: MA Experiment 20001560 PARAMETER Experiment Name: At_Drought_Soil_Dry_P Parameter: Age (day) Value: 28
  misc_feature: MA Experiment 20001560 PARAMETER Experiment Name: At_Drought_Soil_Dry_P Parameter: Organism Value: A. thaliana
  misc_feature: MA Experiment 20001560 PARAMETER Experiment Name: At_Drought_Soil_Dry_P Parameter: Plant Line Value: WS
  misc_feature: MA Experiment 20001560 PARAMETER Experiment Name: At_Drought_Soil_Dry_P Parameter: Post Timepoint (hr) Value: None
  misc_feature: MA Experiment 20001560 PARAMETER Experiment Name: At_Drought_Soil_Dry_P Parameter: Post-Treatment Value: None
  misc_feature: MA Experiment 20001560 PARAMETER Experiment Name: At_Drought_Soil_Dry_P Parameter: Timepoint (day) Value: 14
  misc_feature: MA Experiment 20001560 PARAMETER Experiment Name: At_Drought_Soil_Dry_P Parameter: Treatment Value: Drought vs. No Drought
tcaattaacataaccttcgccgtcgatgaagctttcccttcaattcccactaccttcagcgtcgcaacgaaacaacactacgacgtaaaaccaatccaccatgaagtttatgacggagaaaggaagatatacgacatcagccaccagtacacgccggagttgccggtttgggagtcttcagaaggactagggaactttcttagacttgccgtgagtatgaagaatggatccgatgctaatatctcgaagatggaactatctgttcactctggaactcatgttgatgcaccaggccatttccatgaccattattatgagtctggttttgatactgattcacttgatcttcaaatccttaatggtaaacatttttggaactcttttttttttttttttaagtagctagtgatcgtttttgaaattggtttctgtgaatttaatttataggtcctgctttattggttgatgttccaagagataagaacatttcaggtttgttgagagttttctaacattgaaatttttacaaaatcttcattaaatgtttgttacaaaatttttgtgtaatgatttggttgttgt

SEQ ID NO: 84326 - protein, 133 aa, Arabidopsis thaliana
  peptide (1)..(133): Ceres Seq. ID no. 12674470
  misc_feature (43)..(121): Pfam Name: Putative cyclase Pfam Description: Putative cyclase
  misc_feature (1)..(121): Homolog of NCBI NO: 15219416 NR Description: hypothetical protein; protein id: At1g44542.1 thaliana] >gi|13876507|gb|AAK43483.1|AC084807_8 hypothetical
  misc_feature (28)..(121): Homolog of NCBI NO: 7486287 NR Description: hypothetical protein F28A23.60 - Arabidopsis >gi|2911044|emb|CAA17554.1| putative protein [Arabidopsis >gi|7270368|emb|CAB80135.1| putative protein [Arabidopsis
  misc_feature (28)..(121): Homolog of NCBI NO: 18418393 NR Description: putative protein; protein id: At4g34180.1, by cDNA: 8686., supported by cDNA: gi_14335097, supported by gi_16226602 [Arabidopsis thaliana] >gi|14335098|gb|AAK59828.1|
  misc_feature (1)..(121): Homolog of NCBI NO: 7486023 NR Description: hypothetical protein F23E12.220 - Arabidopsis >gi|3080428|emb|CAA18747.1| putative protein [Arabidopsis >gi|7270474|emb|CAB80239.1| putative protein [Arabidopsis
  misc_feature (1)..(121): Homolog of NCBI NO: 18418598 NR Description: putative protein; protein id: At4g35220.1, by cDNA: 1368., supported by cDNA: gi_13937203, supported by gi_18491126 [Arabidopsis thaliana]
  misc_feature (11)..(121): Homolog of NCBI NO: 35215089 NR Description: hypothetical protein [Oryza sativa (japonica
SINITFAVDEAFPSIPTTFSVATKQHYDVKPIHHEVYDGERKIYDISHQYTPELPVWESSEGLGNFLRLAVSMKNGSDANISKMELSVHSGTHVDAPGHFHDHYYESGFDTDSLDLQILNGKHFWNSFFFFFK

SEQ ID NO: 84327 - DNA, 1458 bp, Arabidopsis thaliana
  misc_feature (1)..(1458): Ceres Seq. ID no. 12674515
  misc_feature: MA Experiment ID: 108434 Result: Up-regulated in Transcription
  misc_feature: MA Experiment 108434 PARAMETER Experiment Name: At_Root_Tips_cDNA_P Parameter: Tissue Value: Root Tips
  misc_feature: MA Experiment ID: 108435 Result: Up-regulated in Transcription
  misc_feature: MA Experiment 108435 PARAMETER Experiment Name: At_stm_Mutants_cDNA_P Parameter: Plant Line Value: wt Landsburg vs stm
  misc_feature: MA Experiment 108435 PARAMETER Experiment Name: At_stm_Mutants_cDNA_P Parameter: Tissue Value: Shoot Apical Meristem Region
  misc_feature: MA Experiment ID: 108462 Result: Down-regulated in Transcription
  misc_feature: MA Experiment 108462 PARAMETER Experiment Name: At_Germinating_Seeds_cDNA_P Parameter: Age (day) Value: 2 vs. 0
  misc_feature: MA Experiment 108462 PARAMETER Experiment Name: At_Germinating_Seeds_cDNA_P Parameter: Tissue Value: Germinating Seeds
  misc_feature: MA Experiment ID: 108463 Result: Down-regulated in Transcription
  misc_feature: MA Experiment 108463 PARAMETER Experiment Name: At_Germinating_Seeds_cDNA_P Parameter: Age (day) Value: 3 vs. 0
  misc_feature: MA Experiment 108463 PARAMETER Experiment Name: At_Germinating_Seeds_cDNA_P Parameter: Tissue Value: Germinating Seeds
  misc_feature: MA Experiment ID: 108464 Result: Down-regulated in Transcription
  misc_feature: MA Experiment 108464 PARAMETER Experiment Name: At_Germinating_Seeds_cDNA_P Parameter: Age (day) Value: 4 vs. 0
  misc_feature: MA Experiment 108464 PARAMETER Experiment Name: At_Germinating_Seeds_cDNA_P Parameter: Tissue Value: Germinating Seeds
  misc_feature: MA Experiment ID: 20000111 Result: Down-regulated in Transcription
  misc_feature: MA Experiment 20000111 PARAMETER Experiment Name: At_42deg_Heat_cDNA_P Parameter: Temperature (deg C) Value: 42 vs. 22
  misc_feature: MA Experiment 20000111 PARAMETER Experiment Name: At_42deg_Heat_cDNA_P Parameter: Timepoint (hr) Value: 6
  misc_feature: MA Experiment 20000111 PARAMETER Experiment Name: At_42deg_Heat_cDNA_P Parameter: Tissue Value: Aerial
  misc_feature: MA Experiment ID: 20000113 Result: Down-regulated in Transcription
  misc_feature: MA Experiment 20000113 PARAMETER Experiment Name: At_42deg_Heat_cDNA_P Parameter: Temperature (deg C) Value: 42 vs. 22
  misc_feature: MA Experiment 20000113 PARAMETER Experiment Name: At_42deg_Heat_cDNA_P Parameter: Timepoint (hr) Value: 8
  misc_feature: MA Experiment 20000113 PARAMETER Experiment Name: At_42deg_Heat_cDNA_P Parameter: Tissue Value: Aerial
  misc_feature: MA Experiment ID: 20000171 Result: Down-regulated in Transcription
  misc_feature: MA Experiment 20000171 PARAMETER Experiment Name: At_42deg_Heat_P Parameter: Age (day) Value: 14
  misc_feature: MA Experiment 20000171 PARAMETER Experiment Name: At_42deg_Heat_P Parameter: Organism Value: A. thaliana
  misc_feature: MA Experiment 20000171 PARAMETER Experiment Name: At_42deg_Heat_P Parameter: Plant Line Value: WS
  misc_feature: MA Experiment 20000171 PARAMETER Experiment Name: At_42deg_Heat_P Parameter: Temperature (deg C) Value: 42 vs. 22
  misc_feature: MA Experiment 20000171 PARAMETER Experiment Name: At_42deg_Heat_P Parameter: Timepoint (hr) Value: 1
  misc_feature: MA Experiment 20000171 PARAMETER Experiment Name: At_42deg_Heat_P Parameter: Tissue Value: Aerial
  misc_feature: MA Experiment ID: 20000173 Result: Down-regulated in Transcription
  misc_feature: MA Experiment 20000173 PARAMETER Experiment Name: At_42deg_Heat_P Parameter: Age (day) Value: 14
  misc_feature: MA Experiment 20000173 PARAMETER Experiment Name: At_42deg_Heat_P Parameter: Organism Value: A. thaliana
  misc_feature: MA Experiment 20000173 PARAMETER Experiment Name: At_42deg_Heat_P Parameter: Plant Line Value: WS
  misc_feature: MA Experiment 20000173 PARAMETER Experiment Name: At_42deg_Heat_P Parameter: Temperature (deg C) Value: 42 vs. 22
  misc_feature: MA Experiment 20000173 PARAMETER Experiment Name: At_42deg_Heat_P Parameter: Timepoint (hr) Value: 6
  misc_feature: MA Experiment 20000173 PARAMETER Experiment Name: At_42deg_Heat_P Parameter: Tissue Value: Aerial
aaaaatttcgaaatcggaaaatttacacagagaagcgccatgacctaaaaatctcaaaacttccccaacaaaaatggcgcttttactcaacccatttccttttacctaccttgtacattaccccttttctcaaatctcactttcccactgaaataaccccatggcggagaatcagaactgtgcgaggatgacgagagcggcggcgaaacgaaaagcgtcgtccatggcgttagacgaaaacccagttagtaagaagagagttgttctcggagagcttccgaatatgtccaatgtcgttgctgtacccaatcaagaaagagagacccttaaggctaaaacaagtgttaatacctcgaagaggcagatgaagaaggctttgatgattcctgaagctagcgtactaatcgaatcgagatctgttgatcctcagatgtgtgagccttttgctagtgatatttgtgcttatctccgtgaaatggaggggaagccgaaacatagaccactacctgattatattgaaaaggttcagagtgatttaactccacacatgagagcggttttggtggattggttagtggaggttgctgaggagtacaagcttgtttcggatacgctttatctcactatctcctatgttgatagattcttgtctgtgaagcctattaacaggcagaagcttcagcttgtgggagtttctgcaatgcttattgcgtcgaaatatgaagagataggtcctcctaaagttgaagatttttgttacattacggataatacatttactaaacaagaagtggtgtcgatggaggcggatatacttcttgctctgcagtttgaattaggaagcccaaccatcaaaacattcctaagacggtttacacgggttgcacaagaagatttcaaagactcacaattgcagatagagttcctttgttgctatctatcagaattgagtatgttagattacacctgtgtgaagtatttgccatctcttttgtctgcttcagctgtatttcttgcccggttcatcatccgtccaaaacaacatccttggaatcaaatgctagaagaatacacaaagtacaaagcagctgatctacaagtgtgcgtgggtatcatacatgacttgtatctaagcagaagaggaaacactctagaagctgttagaaataagtacaagcaacacaagtacaagtgcgttgcgaccatgcctgtttcaccggagctacctcttgctttctttgaagatattaccattagaggaatggcgtaaaagaagcttgaagcttatgtattggaagtgttagttacctgaattttgggttgtatatatctgttagaatggcagattagtattgagtattatctcttttagcgtatgttcaatgatttttgctaacactagttaagaaacttttttttttttgcttgaccattttttcaatggtttattagattttt

SEQ ID NO: 84328 - protein, 369 aa, Arabidopsis thaliana; identical to SEQ ID NO: 23843
  peptide (1)..(369): Ceres Seq. ID no. 12674516
  misc_feature (229)..(356): Pfam Name: Cyclin, C-terminal domain Pfam Description: Cyclin, C-terminal domain
  misc_feature (1)..(369): Homolog of NCBI NO: 15220147 NR Description: Cyclin A3;4; protein id: At1g47230.1, supported
  misc_feature (1)..(365): Homolog of NCBI NO: 30694019 NR Description: cyclin family [Arabidopsis thaliana]
  misc_feature (3)..(365): Homolog of NCBI NO: 15239172 NR Description: Cyclin A3;1; protein id: At5g43080.1 [Arabidopsis
  misc_feature (1)..(363): Homolog of NCBI NO: 7438513 NR Description: cyclin A-type (clone 59) - common tobacco
  misc_feature (1)..(363): Homolog of NCBI NO: 7438516 NR Description: cyclin A-type - Madagascar periwinkle
  misc_feature (1)..(361): Homolog of NCBI NO: 7242793 NR Description: cyclin A3.1 [Pisum sativum]
  misc_feature (82)..(363): Homolog of NCBI NO: 15220145 NR Description: Cyclin A3;3; protein id: At1g47220.1 [Arabidopsis
  misc_feature (1)..(363): Homolog of NCBI NO: 40538955 NR Description: putative A-type cyclin [Oryza sativa (japonica
  misc_feature (1)..(309): Homolog of NCBI NO: 7438512 NR Description: cyclin A-type (clone 13) - common tobacco

SEQ ID NO: 84329 - protein, 360 aa, Arabidopsis thaliana; identical to SEQ ID NO: 23844
  peptide (1)..(360): Ceres Seq. ID no. 12674517
  misc_feature (220)..(347): Pfam Name: Cyclin, C-terminal domain Pfam Description: Cyclin, C-terminal domain
  misc_feature (1)..(360): Homolog of NCBI NO: 15220147 NR Description: Cyclin A3;4; protein id: At1g47230.1, supported
  misc_feature (1)..(356): Homolog of NCBI NO: 30694019 NR Description: cyclin family [Arabidopsis thaliana]
  misc_feature (1)..(356): Homolog of NCBI NO: 15239172 NR Description: Cyclin A3;1; protein id: At5g43080.1 [Arabidopsis
  misc_feature (1)..(354): Homolog of NCBI NO: 7438513 NR Description: cyclin A-type (clone 59) - common tobacco
  misc_feature (1)..(354): Homolog of NCBI NO: 7438516 NR Description: cyclin A-type - Madagascar periwinkle
  misc_feature (1)..(352): Homolog of NCBI NO: 7242793 NR Description: cyclin A3.1 [Pisum sativum]
  misc_feature (73)..(354): Homolog of NCBI NO: 15220145 NR Description: Cyclin A3;3; protein id: At1g47220.1 [Arabidopsis
  misc_feature (1)..(354): Homolog of NCBI NO: 40538955 NR Description: putative A-type cyclin [Oryza sativa (japonica
  misc_feature (1)..(300): Homolog of NCBI NO: 7438512 NR Description: cyclin A-type (clone 13) - common tobacco

SEQ ID NO: 84330 - protein, 348 aa, Arabidopsis thaliana; identical to SEQ ID NO: 23845
  peptide (1)..(348): Ceres Seq. ID no. 12674518
  misc_feature (208)..(335): Pfam Name: Cyclin, C-terminal domain Pfam Description: Cyclin, C-terminal domain
  misc_feature (1)..(348): Homolog of NCBI NO: 15220147 NR Description: Cyclin A3;4; protein id: At1g47230.1, supported
  misc_feature (1)..(344): Homolog of NCBI NO: 30694019 NR Description: cyclin family [Arabidopsis thaliana]
  misc_feature (1)..(344): Homolog of NCBI NO: 15239172 NR Description: Cyclin A3;1; protein id: At5g43080.1 [Arabidopsis
  misc_feature (1)..(342): Homolog of NCBI NO: 7438513 NR Description: cyclin A-type (clone 59) - common tobacco
  misc_feature (1)..(342): Homolog of NCBI NO: 7438516 NR Description: cyclin A-type - Madagascar periwinkle
  misc_feature (1)..(340): Homolog of NCBI NO: 7242793 NR Description: cyclin A3.1 [Pisum sativum]
  misc_feature (61)..(342): Homolog of NCBI NO: 15220145 NR Description: Cyclin A3;3; protein id: At1g47220.1 [Arabidopsis
  misc_feature (1)..(342): Homolog of NCBI NO: 40538955 NR Description: putative A-type cyclin [Oryza sativa (japonica
  misc_feature (1)..(288): Homolog of NCBI NO: 7438512 NR Description: cyclin A-type (clone 13) - common tobacco

SEQ ID NO: 84331 - DNA, 1285 bp, Arabidopsis thaliana
  misc_feature (1)..(1285): Ceres Seq. ID no. 12674550
  misc_feature: MA Experiment ID: 20001451 Result: Down-regulated in Transcription
  misc_feature: MA Experiment 20001451 PARAMETER Experiment Name: At_Far-red-induction_P Parameter: Age (day) Value: 7
  misc_feature: MA Experiment 20001451 PARAMETER Experiment Name: At_Far-red-induction_P Parameter: Light Value: Far-red vs. White
  misc_feature: MA Experiment 20001451 PARAMETER Experiment Name: At_Far-red-induction_P Parameter: Organism Value: A. thaliana
  misc_feature: MA Experiment 20001451 PARAMETER Experiment Name: At_Far-red-induction_P Parameter: Plant Line Value: Columbia
  misc_feature: MA Experiment 20001451 PARAMETER Experiment Name: At_Far-red-induction_P Parameter: Timepoint (hr) Value: 24
  misc_feature: MA Experiment 20001451 PARAMETER Experiment Name: At_Far-red-induction_P Parameter: Tissue Value: Whole Plant
accgttttggtcaatcctttgaatctctcctaataaaaccctaaaagatcatcatcatcatcgtcgtcgtcgtcccgctcaatggatactcgtcgcggagctcttgcggttcctaaagtccgtcgagtaggtttcttcacatcaatcgagccgcctccagaatcatcattacaacgaccaaatcgaagccaatccggtccagtagatgcaaccacctcttcttctcctctctccgattcaccttccggtaacttaatttctccggtcttaattccaccgtcgcgtcaccattccgacaatttaacctctcgcgttgctgctgctgctgctgctcctgtgcccgtccctggacctgccgctttccgccgatacttaactcctgaacggactcttcttcacgttggtagttacaatcctccggattcgcttctcgggacatcatcaccctcgagtaacggagggctttctgaggattcggcttctctgtttgggttccaacggagtgattcgacgaaattatcagcaagcttacctaatggaggctttgatttgactctagctgttagagctcctcaggaatctgaaaccaaaattgcgaccacgtctgcttctcaagggaaaaagaagatcgccgaagtttctggaaagagtgagtctgcgaccacaaaaccccagaaggaaaaggaaccaaaagcattgaaagataaaaccactaaagcagaaagacgtgccatccaagaggcacaacgggcagcaaaagctgctgcaaaaggcgaaggaagcaggcgtgcagatgagtctggtagagctaatcctggcaaggctgccataaagccccaaccaaagaaagaaagacttcccgtcacgtcctctgtttctgaaaaaacagctgtagcagtagaaaaagagaagaggatggatgtccctcagacacaaatgcagtatgatgataaaagccgagtggataaagctaagaggcgagctgtggttgaacagaccgagagcaagaacaaagttgaattatttctccatcttcctcaatacgaacgcagcaatcagcttcccaatttaagctccaattttttcacactcgattccatacaccatgcagtctataaggtgggtttgcaacatttggctggagatatatctggggacaatgcacgatgtattgccatgctccaagcatttcaagaagctatagaagattacagtacacctcctatgaaagacctgaccatggacttgacagccaagataaacggttatgtttcattcttgatag

SEQ ID NO: 84332 - protein, 401 aa, Arabidopsis thaliana; identical to SEQ ID NO: 23368
  peptide (1)..(401): Ceres Seq. ID no. 12674551
  misc_feature (215)..(400): Pfam Name: Initiation factor 2 subunit family Pfam Description: Initiation factor 2 subunit family
  misc_feature (187)..(400): Homolog of NCBI NO: 15222019 NR Description: hypothetical protein; protein id: At1g48970.1
  misc_feature (1)..(187): Homolog of NCBI NO: 15222019 NR Description: hypothetical protein; protein id: At1g48970.1
  misc_feature (45)..(400): Homolog of NCBI NO: 15240967 NR Description: putative protein; protein id: At5g38640.1, by cDNA: gi_17064893 [Arabidopsis thaliana] contains similarity to guanine nucleotide exchange
  misc_feature (119)..(400): Homolog of NCBI NO: 6012058 NR Description: guanine nucleotide exchange factor [Homo sapiens]
  misc_feature (119)..(400): Homolog of NCBI NO: 6010114 NR Description: guanine nucleotide exchange factor (long isoform)
  misc_feature (119)..(400): Homolog of NCBI NO: 529428 NR Description: guanine nucleotide exchange factor, eIF-2B, delta
  misc_feature (119)..(400): Homolog of NCBI NO: 1083344 NR Description: guanine nucleotide exchange factor eIF-2B delta
  misc_feature (140)..(400): Homolog of NCBI NO: 26986532 NR Description: eukaryotic translation initiation factor 2B,
  misc_feature (165)..(400): Homolog of NCBI NO: 33337571 NR Description: EIF-2B-delta-like protein [Homo sapiens]
  misc_feature (140)..(400): Homolog of NCBI NO: 6563202 NR Description: translation initiation factor eIF-2b delta

SEQ ID NO: 84333 - DNA, 559 bp, Arabidopsis thaliana
  misc_feature (1)..(559): Ceres Seq. ID no. 12674619
  misc_feature: MA Experiment ID: 108434 Result: Down-regulated in Transcription
  misc_feature: MA Experiment 108434 PARAMETER Experiment Name: At_Root_Tips_cDNA_P Parameter: Tissue Value: Root Tips
  misc_feature: MA Experiment ID: 108435 Result: Up-regulated in Transcription
  misc_feature: MA Experiment 108435 PARAMETER Experiment Name: At_stm_Mutants_cDNA_P Parameter: Plant Line Value: wt Landsburg vs stm
  misc_feature: MA Experiment 108435 PARAMETER Experiment Name: At_stm_Mutants_cDNA_P Parameter: Tissue Value: Shoot Apical Meristem Region
  misc_feature: MA Experiment ID: 108576 Result: Up-regulated in Transcription
  misc_feature: MA Experiment 108576 PARAMETER Experiment Name: At_42deg_Heat_cDNA_P Parameter: Temperature (deg C) Value: 42 vs. 22
  misc_feature: MA Experiment 108576 PARAMETER Experiment Name: At_42deg_Heat_cDNA_P Parameter: Timepoint (hr) Value: 1
  misc_feature: MA Experiment 108576 PARAMETER Experiment Name: At_42deg_Heat_cDNA_P Parameter: Tissue Value: Aerial
  misc_feature: MA Experiment ID: 108594 Result: Down-regulated in Transcription
  misc_feature: MA Experiment 108594 PARAMETER Experiment Name: At_Ler-rhl_Root_cDNA_P Parameter: Plant Line Value: null
  misc_feature: MA Experiment ID: 108609 Result: Up-regulated in Transcription
  misc_feature: MA Experiment 108609 PARAMETER Experiment Name: At_100uM_ABA_cDNA_P Parameter: Timepoint (hr) Value: 24
  misc_feature: MA Experiment 108609 PARAMETER Experiment Name: At_100uM_ABA_cDNA_P Parameter: Tissue Value: Aerial
  misc_feature: MA Experiment 108609 PARAMETER Experiment Name: At_100uM_ABA_cDNA_P Parameter: Treatment Value: 100uM ABA vs. No Treatment
  misc_feature: MA Experiment ID: 20000088 Result: Up-regulated in Transcription
  misc_feature: MA Experiment 20000088 PARAMETER Experiment Name: At_100uM_ABA_Mutants_cDNA_P Parameter: Plant Line Value: Landsberg
  misc_feature: MA Experiment 20000088 PARAMETER Experiment Name: At_100uM_ABA_Mutants_cDNA_P Parameter: Timepoint (hr) Value: 6
  misc_feature: MA Experiment 20000088 PARAMETER Experiment Name: At_100uM_ABA_Mutants_cDNA_P Parameter: Tissue Value: Aerial
  misc_feature: MA Experiment 20000088 PARAMETER Experiment Name: At_100uM_ABA_Mutants_cDNA_P Parameter: Treatment Value: 100uM ABA vs. No Treatment
  misc_feature: MA Experiment ID: 20000090 Result: Up-regulated in Transcription
  misc_feature: MA Experiment ID: 20000112 Result: Up-regulated in Transcription
  misc_feature: MA Experiment 20000112 PARAMETER Experiment Name: At_42deg_Heat_cDNA_P Parameter: Temperature (deg C) Value: 42 vs. 22
  misc_feature: MA Experiment 20000112 PARAMETER Experiment Name: At_42deg_Heat_cDNA_P Parameter: Timepoint (hr) Value: 2
  misc_feature: MA Experiment 20000112 PARAMETER Experiment Name: At_42deg_Heat_cDNA_P Parameter: Tissue Value: Aerial
  misc_feature: MA Experiment ID: 20000171 Result: Up-regulated in Transcription
  misc_feature: MA Experiment 20000171 PARAMETER Experiment Name: At_42deg_Heat_P Parameter: Age (day) Value: 14
  misc_feature: MA Experiment 20000171 PARAMETER Experiment Name: At_42deg_Heat_P Parameter: Organism Value: A. thaliana
  misc_feature: MA Experiment 20000171 PARAMETER Experiment Name: At_42deg_Heat_P Parameter: Plant Line Value: WS
  misc_feature: MA Experiment 20000171 PARAMETER Experiment Name: At_42deg_Heat_P Parameter: Temperature (deg C) Value: 42 vs. 22
  misc_feature: MA Experiment 20000171 PARAMETER Experiment Name: At_42deg_Heat_P Parameter: Timepoint (hr) Value: 1
  misc_feature: MA Experiment 20000171 PARAMETER Experiment Name: At_42deg_Heat_P Parameter: Tissue Value: Aerial
  misc_feature: MA Experiment ID: 20000184 Result: Up-regulated in Transcription
  misc_feature: MA Experiment 20000184 PARAMETER Experiment Name: At_Shoots__P Parameter: Age (day) Value: 7
  misc_feature: MA Experiment 20000184 PARAMETER Experiment Name: At_Shoots__P Parameter: Tissue Value: Shoots vs. Whole Plant
  misc_feature: MA Experiment ID: 20000185 Result: Up-regulated in Transcription
  misc_feature: MA Experiment 20000185 PARAMETER Experiment Name: At_Roots__P Parameter: Age (day) Value: 7 vs. 21
  misc_feature: MA Experiment 20000185 PARAMETER Experiment Name: At_Roots__P Parameter: Organism Value: A. thaliana
  misc_feature: MA Experiment 20000185 PARAMETER Experiment Name: At_Roots__P Parameter: Tissue Value: Roots vs. Whole Plant
  misc_feature: MA Experiment ID: 20000234 Result: Down-regulated in Transcription
  misc_feature: MA Experiment 20000234 PARAMETER Experiment Name: At_Siliques_P Parameter: Age (day) Value: 21
  misc_feature: MA Experiment 20000234 PARAMETER Experiment Name: At_Siliques_P Parameter: Organism Value: A. thaliana
  misc_feature: MA Experiment 20000234 PARAMETER Experiment Name: At_Siliques_P Parameter: Plant Line Value: WS
  misc_feature: MA Experiment 20000234 PARAMETER Experiment Name: At_Siliques_P Parameter: Tissue Value: Less Than 5mm Siliques vs. Whole Plant
  misc_feature: MA Experiment ID: 20000235 Result: Down-regulated in Transcription
  misc_feature: MA Experiment 20000235 PARAMETER Experiment Name: At_Siliques_P Parameter: Age (day) Value: 21
  misc_feature: MA Experiment 20000235 PARAMETER Experiment Name: At_Siliques_P Parameter: Organism Value: A. thaliana
  misc_feature: MA Experiment 20000235 PARAMETER Experiment Name: At_Siliques_P Parameter: Plant Line Value: WS
  misc_feature: MA Experiment 20000235 PARAMETER Experiment Name: At_Siliques_P Parameter: Tissue Value: 5-10mm Siliques vs. Whole Plant
  misc_feature: MA Experiment ID: 20000269 Result: Down-regulated in Transcription
  misc_feature: MA Experiment 20000269 PARAMETER Experiment Name: At_1mM_KNO3_L-vs-H_Roots_P Parameter: Age (day) Value: 7,10,12
  misc_feature: MA Experiment 20000269 PARAMETER Experiment Name: At_1mM_KNO3_L-vs-H_Roots_P Parameter: Organism Value: A. thaliana
  misc_feature: MA Experiment 20000269 PARAMETER Experiment Name: At_1mM_KNO3_L-vs-H_Roots_P Parameter: Plant Line Value: WS
  misc_feature: MA Experiment 20000269 PARAMETER Experiment Name: At_1mM_KNO3_L-vs-H_Roots_P Parameter: Timepoint (day) Value: 7,10,12
  misc_feature: MA Experiment 20000269 PARAMETER Experiment Name: At_1mM_KNO3_L-vs-H_Roots_P Parameter: Tissue Value: Roots
  misc_feature: MA Experiment 20000269 PARAMETER Experiment Name: At_1mM_KNO3_L-vs-H_Roots_P Parameter: Treatment Value: 1mM KNO3 vs. 50mM KNO3
  misc_feature: MA Experiment ID: 20000438 Result: Up-regulated in Transcription
  misc_feature: MA Experiment 20000438 PARAMETER Experiment Name: At_Shoots__P Parameter: Age (day) Value: 14
  misc_feature: MA Experiment 20000438 PARAMETER Experiment Name: At_Shoots__P Parameter: Tissue Value: Shoots vs. Whole Plant
  misc_feature: MA Experiment ID: 20000439 Result: Up-regulated in Transcription
  misc_feature: MA Experiment 20000439 PARAMETER Experiment Name: At_Roots__P Parameter: Age (day) Value: 14 vs. 21
  misc_feature: MA Experiment 20000439 PARAMETER Experiment Name: At_Roots__P Parameter: Organism Value: A. thaliana
  misc_feature: MA Experiment 20000439 PARAMETER Experiment Name: At_Roots__P Parameter: Tissue Value: Roots vs. Whole Plant
  misc_feature: MA Experiment ID: 20000451 Result: Down-regulated in Transcription
  misc_feature: MA Experiment 20000451 PARAMETER Experiment Name: At_CS6879_Shoots-Roots_P Parameter: Age (day) Value: 14
  misc_feature: MA Experiment 20000451 PARAMETER Experiment Name: At_CS6879_Shoots-Roots_P Parameter: Organism Value: A. thaliana
  misc_feature: MA Experiment 20000451 PARAMETER Experiment Name: At_CS6879_Shoots-Roots_P Parameter: Plant Line Value: CS6879 vs. WS
  misc_feature: MA Experiment 20000451 PARAMETER Experiment Name: At_CS6879_Shoots-Roots_P Parameter: Tissue Value: Roots
  misc_feature: MA Experiment ID: 20000452 Result: Down-regulated in Transcription
  misc_feature: MA Experiment 20000452 PARAMETER Experiment Name: At_CS6879_Shoots-Roots_P Parameter: Age (day) Value: 14
  misc_feature: MA Experiment 20000452 PARAMETER Experiment Name: At_CS6879_Shoots-Roots_P Parameter: Organism Value: A. thaliana
  misc_feature: MA Experiment 20000452 PARAMETER Experiment Name: At_CS6879_Shoots-Roots_P Parameter: Plant Line Value: CS6879 vs. WS
  misc_feature: MA Experiment 20000452 PARAMETER Experiment Name: At_CS6879_Shoots-Roots_P Parameter: Tissue Value: Shoots
  misc_feature: MA Experiment ID: 20000453 Result: Up-regulated in Transcription
  misc_feature: MA Experiment 20000453 PARAMETER Experiment Name: At_100uM_ABA_P Parameter: Age (day) Value: 15
  misc_feature: MA Experiment 20000453 PARAMETER Experiment Name: At_100uM_ABA_P Parameter: Organism Value: A. thaliana
  misc_feature: MA Experiment 20000453 PARAMETER Experiment Name: At_100uM_ABA_P Parameter: Plant Line Value: WS
  misc_feature: MA Experiment 20000453 PARAMETER Experiment Name: At_100uM_ABA_P Parameter: Timepoint (hr) Value: 24
  misc_feature: MA Experiment 20000453 PARAMETER Experiment Name: At_100uM_ABA_P Parameter: Tissue Value: Aerial
  misc_feature: MA Experiment 20000453 PARAMETER Experiment Name: At_100uM_ABA_P Parameter: Treatment Value: 100uM ABA vs. No Treatment
  misc_feature: MA Experiment ID: 20000455 Result: Up-regulated in Transcription
  misc_feature: MA Experiment 20000455 PARAMETER Experiment Name: At_100uM_ABA_P Parameter: Age (day) Value: 16
  misc_feature: MA Experiment 20000455 PARAMETER Experiment Name: At_100uM_ABA_P Parameter: Organism Value: A. thaliana
  misc_feature: MA Experiment 20000455 PARAMETER Experiment Name: At_100uM_ABA_P Parameter: Plant Line Value: WS
  misc_feature: MA Experiment 20000455 PARAMETER Experiment Name: At_100uM_ABA_P Parameter: Timepoint (hr) Value: 48
  misc_feature: MA Experiment 20000455 PARAMETER Experiment Name: At_100uM_ABA_P Parameter: Tissue Value: Aerial
  misc_feature: MA Experiment 20000455 PARAMETER Experiment Name: At_100uM_ABA_P Parameter: Treatment Value: 100uM ABA vs. No Treatment
  misc_feature: MA Experiment ID: 20000495 Result: Up-regulated in Transcription
  misc_feature: MA Experiment 20000495 PARAMETER Experiment Name: At_Guard_Cells_P Parameter: Harvest Date Value: 8/2/2002
  misc_feature: MA Experiment 20000495 PARAMETER Experiment Name: At_Guard_Cells_P Parameter: Organism Value: A. thaliana
  misc_feature: MA Experiment 20000495 PARAMETER Experiment Name: At_Guard_Cells_P Parameter: Tissue Value: Guard Cells vs. Leaves
  misc_feature: MA Experiment ID: 20000709 Result: Up-regulated in Transcription
  misc_feature: MA Experiment 20000709 PARAMETER Experiment Name: At_15mM_NH4NO3_L-to-H_P Parameter: Age (hr) Value: 14
  misc_feature: MA Experiment 20000709 PARAMETER Experiment Name: At_15mM_NH4NO3_L-to-H_P Parameter: Organism Value: A. thaliana
  misc_feature: MA Experiment 20000709 PARAMETER Experiment Name: At_15mM_NH4NO3_L-to-H_P Parameter: Plant Line Value: WS
  misc_feature: MA Experiment 20000709 PARAMETER Experiment Name: At_15mM_NH4NO3_L-to-H_P Parameter: Timepoint (hr) Value: 4
  misc_feature: MA Experiment 20000709 PARAMETER Experiment Name: At_15mM_NH4NO3_L-to-H_P Parameter: Tissue Value: Aerial
  misc_feature: MA Experiment 20000709 PARAMETER Experiment Name: At_15mM_NH4NO3_L-to-H_P Parameter: Treatment Value: 15mM NH4NO3 vs. 30mM Mannitol
  misc_feature: MA Experiment ID: 20001554 Result: Up-regulated in Transcription
  misc_feature: MA Experiment 20001554 PARAMETER Experiment Name: At_Drought_Soil_Dry_P Parameter: Age (day) Value: 21
  misc_feature: MA Experiment 20001554 PARAMETER Experiment Name: At_Drought_Soil_Dry_P Parameter: Organism Value: A. thaliana
  misc_feature: MA Experiment 20001554 PARAMETER Experiment Name: At_Drought_Soil_Dry_P Parameter: Plant Line Value: WS
  misc_feature: MA Experiment 20001554 PARAMETER Experiment Name: At_Drought_Soil_Dry_P Parameter: Post Timepoint (hr) Value: None
  misc_feature: MA Experiment 20001554 PARAMETER Experiment Name: At_Drought_Soil_Dry_P Parameter: Post-Treatment Value: None
  misc_feature: MA Experiment 20001554 PARAMETER Experiment Name: At_Drought_Soil_Dry_P Parameter: Timepoint (day) Value: 7
  misc_feature: MA Experiment 20001554 PARAMETER Experiment Name: At_Drought_Soil_Dry_P Parameter: Treatment Value: Drought vs. No Drought
  misc_feature: MA Experiment ID: 20001555 Result: Up-regulated in Transcription
  misc_feature: MA Experiment 20001555 PARAMETER Experiment Name: At_Drought_Soil_Dry_P Parameter: Age (day) Value: 24
  misc_feature: MA Experiment 20001555 PARAMETER Experiment Name: At_Drought_Soil_Dry_P Parameter: Organism Value: A. thaliana
  misc_feature: MA Experiment 20001555 PARAMETER Experiment Name: At_Drought_Soil_Dry_P Parameter: Plant Line Value: WS
  misc_feature: MA Experiment 20001555 PARAMETER Experiment Name: At_Drought_Soil_Dry_P Parameter: Post Timepoint (hr) Value: None
  misc_feature: MA Experiment 20001555 PARAMETER Experiment Name: At_Drought_Soil_Dry_P Parameter: Post-Treatment Value: None
  misc_feature: MA Experiment 20001555 PARAMETER Experiment Name: At_Drought_Soil_Dry_P Parameter: Timepoint (day) Value: 10
  misc_feature: MA Experiment 20001555 PARAMETER Experiment Name: At_Drought_Soil_Dry_P Parameter: Treatment Value: Drought vs. No Drought
  misc_feature: MA Experiment ID: 20001558 Result: Down-regulated in Transcription
  misc_feature: MA Experiment 20001558 PARAMETER Experiment Name: At_Drought_Soil_Dry_P Parameter: Age (day) Value: 27
  misc_feature: MA Experiment 20001558 PARAMETER Experiment Name: At_Drought_Soil_Dry_P Parameter: Organism Value: A. thaliana
  misc_feature: MA Experiment 20001558 PARAMETER Experiment Name: At_Drought_Soil_Dry_P Parameter: Plant Line Value: WS
  misc_feature: MA Experiment 20001558 PARAMETER Experiment Name: At_Drought_Soil_Dry_P Parameter: Post Timepoint (hr) Value: 6
  misc_feature: MA Experiment 20001558 PARAMETER Experiment Name: At_Drought_Soil_Dry_P Parameter: Post-Treatment Value: Re-Water vs. No Drought
  misc_feature: MA Experiment 20001558 PARAMETER Experiment Name: At_Drought_Soil_Dry_P Parameter: Timepoint (day) Value: 13
  misc_feature: MA Experiment 20001558 PARAMETER Experiment Name: At_Drought_Soil_Dry_P Parameter: Treatment Value: Drought vs. No Drought
gcaaaaaatggcttccaaggctttgattctgttaggtctcttctcagttcttctcgtcgtctccgaagtgtctgccgcaaggcaatcgggcatggtgaagccagagagtgaggaaactgtgcaacctgaaggttatggcggtggccacggaggacatggtggtcacggagggggaggaggccacggacatggaggacacaacggaggagggggccacggacttgacggatacggaggaggtggaggacactatggaggaggtggaggacactacggaggaggtggaggacactacggaggaggtggaggacactacggaggaggtggtggaggaggatacggaggtggaggaggacaccacggaggaggaggccacgggctaaacgaacctgttcagactaagccgggtgtttaaaactatataatatcttcactaccatgcatgattgcatatatatatatacgcttatgtattatctatatgcctataaataaaccatggtgagtttgtaacgcagtgccttcagaaatgttcggaataaatttccataatattagt

SEQ ID NO: 84334 - protein, 137 aa, Arabidopsis thaliana
  peptide (1)..(137): Ceres Seq. ID no. 12674620
  misc_feature (40)..(136): Pfam Name: Herpesvirus latent membrane protein 1 (LMP1) Pfam Description: Herpesvirus latent membrane protein 1 (LMP1)
  misc_feature (3)..(137): Homolog of NCBI NO: 30678191 NR Description: glycine-rich protein [Arabidopsis thaliana]
  misc_feature (3)..(137): Homolog of NCBI NO: 15224540 NR Description: putative glycine-rich protein; protein id: supported by cDNA: 105261. [Arabidopsis thaliana]
  misc_feature (3)..(137): Homolog of NCBI NO: 21536606 NR Description: putative glycine-rich protein [Arabidopsis
  misc_feature (3)..(137): Homolog of NCBI NO: 15224547 NR Description: putative glycine-rich protein; protein id:
  misc_feature (3)..(137): Homolog of NCBI NO: 9957568 NR Description: antimicrobial peptide shep-GRP [Capsella
  misc_feature (3)..(126): Homolog of NCBI NO: 15224548 NR Description: putative glycine-rich protein; protein id: supported by cDNA: gi_17473738, supported by cDNA: gi_20148476
  misc_feature (3)..(124): Homolog of NCBI NO: 259447 NR Description: glycine-rich protein; atGRP [Arabidopsis thaliana]
  misc_feature (3)..(124): Homolog of NCBI NO: 81625 NR Description: glycine-rich protein 3 precursor - Arabidopsis
  misc_feature (5)..(126): Homolog of NCBI NO: 121644 NR Description: Glycine-rich cell wall structural protein
  misc_feature (6)..(126): Homolog of NCBI NO: 7488799 NR Description: dormancy-associated protein 2 - garden pea
QKMASKALILLGLFSVLLVVSEVSAARQSGMVKPESEETVQPEGYGGGHGGHGGHGGGGGHGHGGHNGGGGHGLDGYGGGGGHYGGGGGHYGGGGGHYGGGGGHYGGGGGGGYGGGGGHHGGGGHGLNEPVQTKPGV

SEQ ID NO: 84335 - protein, 135 aa, Arabidopsis thaliana
  peptide (1)..(135): Ceres Seq. ID no. 12674621
  misc_feature (38)..(134): Pfam Name: Herpesvirus latent membrane protein 1 (LMP1) Pfam Description: Herpesvirus latent membrane protein 1 (LMP1)
  misc_feature (1)..(135): Homolog of NCBI NO: 30678191 NR Description: glycine-rich protein [Arabidopsis thaliana]
  misc_feature (1)..(135): Homolog of NCBI NO: 15224540 NR Description: putative glycine-rich protein; protein id: supported by cDNA: 105261. [Arabidopsis thaliana]
  misc_feature (1)..(135): Homolog of NCBI NO: 21536606 NR Description: putative glycine-rich protein [Arabidopsis
  misc_feature (1)..(135): Homolog of NCBI NO: 15224547 NR Description: putative glycine-rich protein; protein id:
  misc_feature (1)..(135): Homolog of NCBI NO: 9957568 NR Description: antimicrobial peptide shep-GRP [Capsella
  misc_feature (1)..(124): Homolog of NCBI NO: 15224548 NR Description: putative glycine-rich protein; protein id: supported by cDNA: gi_17473738, supported by cDNA: gi_20148476
  misc_feature (1)..(122): Homolog of NCBI NO: 259447 NR Description: glycine-rich protein; atGRP [Arabidopsis thaliana]
  misc_feature (1)..(122): Homolog of NCBI NO: 81625 NR Description: glycine-rich protein 3 precursor - Arabidopsis
  misc_feature (3)..(124): Homolog of NCBI NO: 121644 NR Description: Glycine-rich cell wall structural protein
  misc_feature (4)..(124): Homolog of NCBI NO: 7488799 NR Description: dormancy-associated protein 2 - garden pea
MASKALILLGLFSVLLVVSEVSAARQSGMVKPESEETVQPEGYGGGHGGHGGHGGGGGHGHGGHNGGGGHGLDGYGGGGGHYGGGGGHYGGGGGHYGGGGGHYGGGGGGGYGGGGGHHGGGGHGLNEPVQTKPGV

SEQ ID NO: 84336 - protein, 107 aa, Arabidopsis thaliana
  peptide (1)..(107): Ceres Seq. ID no. 12674622
  misc_feature (10)..(106): Pfam Name: Herpesvirus latent membrane protein 1 (LMP1) Pfam Description: Herpesvirus latent membrane protein 1 (LMP1)
  misc_feature (1)..(107): Homolog of NCBI NO: 30678191 NR Description: glycine-rich protein [Arabidopsis thaliana]
  misc_feature (1)..(107): Homolog of NCBI NO: 15224540 NR Description: putative glycine-rich protein; protein id: supported by cDNA: 105261. [Arabidopsis thaliana]
  misc_feature (1)..(107): Homolog of NCBI NO: 21536606 NR Description: putative glycine-rich protein [Arabidopsis
  misc_feature (1)..(107): Homolog of NCBI NO: 15224547 NR Description: putative glycine-rich protein; protein id:
  misc_feature (1)..(107): Homolog of NCBI NO: 9957568 NR Description: antimicrobial peptide shep-GRP [Capsella
  misc_feature (1)..(96): Homolog of NCBI NO: 15224548 NR Description: putative glycine-rich protein; protein id: supported by cDNA: gi_17473738, supported by cDNA: gi_20148476
  misc_feature (1)..(94): Homolog of NCBI NO: 259447 NR Description: glycine-rich protein; atGRP [Arabidopsis thaliana]
  misc_feature (1)..(94): Homolog of NCBI NO: 81625 NR Description: glycine-rich protein 3 precursor - Arabidopsis
  misc_feature (1)..(96): Homolog of NCBI NO: 121644 NR Description: Glycine-rich cell wall structural protein
  misc_feature (1)..(96): Homolog of NCBI NO: 7488799 NR Description: dormancy-associated protein 2 - garden pea
MVKPESEETVQPEGYGGGHGGHGGHGGGGGHGHGGHNGGGGHGLDGYGGGGGHYGGGGGHYGGGGGHYGGGGGHYGGGGGGGYGGGGGHHGGGGHGLNEPVQTKPGV

SEQ ID NO: 84337 - DNA, 549 bp, Arabidopsis thaliana
  misc_feature (1)..(549): Ceres Seq. ID no. 12674643
  misc_feature: MA Experiment ID: 108434 Result: Down-regulated in Transcription
  misc_feature: MA Experiment 108434 PARAMETER Experiment Name: At_Root_Tips_cDNA_P Parameter: Tissue Value: Root Tips
  misc_feature: MA Experiment ID: 108595 Result: Up-regulated in Transcription
  misc_feature: MA Experiment 108595 PARAMETER Experiment Name: At_Ler-pi_Ovule_cDNA_P Parameter: Plant Line Value: null
  misc_feature: MA Experiment ID: 20000171 Result: Up-regulated in Transcription
  misc_feature: MA Experiment 20000171 PARAMETER Experiment Name: At_42deg_Heat_P Parameter: Age (day) Value: 14
  misc_feature: MA Experiment 20000171 PARAMETER Experiment Name: At_42deg_Heat_P Parameter: Organism Value: A. thaliana
  misc_feature: MA Experiment 20000171 PARAMETER Experiment Name: At_42deg_Heat_P Parameter: Plant Line Value: WS
  misc_feature: MA Experiment 20000171 PARAMETER Experiment Name: At_42deg_Heat_P Parameter: Temperature (deg C) Value: 42 vs. 22
  misc_feature: MA Experiment 20000171 PARAMETER Experiment Name: At_42deg_Heat_P Parameter: Timepoint (hr) Value: 1
  misc_feature: MA Experiment 20000171 PARAMETER Experiment Name: At_42deg_Heat_P Parameter: Tissue Value: Aerial
  misc_feature: MA Experiment ID: 20000184 Result: Up-regulated in Transcription
  misc_feature: MA Experiment 20000184 PARAMETER Experiment Name: At_Shoots__P Parameter: Age (day) Value: 7
  misc_feature: MA Experiment 20000184 PARAMETER Experiment Name: At_Shoots__P Parameter: Tissue Value: Shoots vs. Whole Plant
  misc_feature: MA Experiment ID: 20000185 Result: Up-regulated in Transcription
  misc_feature: MA Experiment 20000185 PARAMETER Experiment Name: At_Roots__P Parameter: Age (day) Value: 7 vs. 21
  misc_feature: MA Experiment 20000185 PARAMETER Experiment Name: At_Roots__P Parameter: Organism Value: A. thaliana
  misc_feature: MA Experiment 20000185 PARAMETER Experiment Name: At_Roots__P Parameter: Tissue Value: Roots vs. Whole Plant
  misc_feature: MA Experiment ID: 20000234 Result: Down-regulated in Transcription
  misc_feature: MA Experiment 20000234 PARAMETER Experiment Name: At_Siliques_P Parameter: Age (day) Value: 21
  misc_feature: MA Experiment 20000234 PARAMETER Experiment Name: At_Siliques_P Parameter: Organism Value: A. thaliana
  misc_feature: MA Experiment 20000234 PARAMETER Experiment Name: At_Siliques_P Parameter: Plant Line Value: WS
  misc_feature: MA Experiment 20000234 PARAMETER Experiment Name: At_Siliques_P Parameter: Tissue Value: Less Than 5mm Siliques vs. Whole Plant
  misc_feature: MA Experiment ID: 20000235 Result: Down-regulated in Transcription
  misc_feature: MA Experiment 20000235 PARAMETER Experiment Name: At_Siliques_P Parameter: Age (day) Value: 21
  misc_feature: MA Experiment 20000235 PARAMETER Experiment Name: At_Siliques_P Parameter: Organism Value: A. thaliana
  misc_feature: MA Experiment 20000235 PARAMETER Experiment Name: At_Siliques_P Parameter: Plant Line Value: WS
  misc_feature: MA Experiment 20000235 PARAMETER Experiment Name: At_Siliques_P Parameter: Tissue Value: 5-10mm Siliques vs. Whole Plant
  misc_feature: MA Experiment ID: 20000269 Result: Down-regulated in Transcription
  misc_feature: MA Experiment 20000269 PARAMETER Experiment Name: At_1mM_KNO3_L-vs-H_Roots_P Parameter: Age (day) Value: 7,10,12
  misc_feature: MA Experiment 20000269 PARAMETER Experiment Name: At_1mM_KNO3_L-vs-H_Roots_P Parameter: Organism Value: A. thaliana
  misc_feature: MA Experiment 20000269 PARAMETER Experiment Name: At_1mM_KNO3_L-vs-H_Roots_P Parameter: Plant Line Value: WS
  misc_feature: MA Experiment 20000269 PARAMETER Experiment Name: At_1mM_KNO3_L-vs-H_Roots_P Parameter: Timepoint (day) Value: 7,10,12
  misc_feature: MA Experiment 20000269 PARAMETER Experiment Name: At_1mM_KNO3_L-vs-H_Roots_P Parameter: Tissue Value: Roots
  misc_feature: MA Experiment 20000269 PARAMETER Experiment Name: At_1mM_KNO3_L-vs-H_Roots_P Parameter: Treatment Value: 1mM KNO3 vs. 50mM KNO3
  misc_feature: MA Experiment ID: 20000438 Result: Up-regulated in Transcription
  misc_feature: MA Experiment 20000438 PARAMETER Experiment Name: At_Shoots__P Parameter: Age (day) Value: 14
  misc_feature: MA Experiment 20000438 PARAMETER Experiment Name: At_Shoots__P Parameter: Tissue Value: Shoots vs. Whole Plant
  misc_feature: MA Experiment ID: 20000439 Result: Up-regulated in Transcription
  misc_feature: MA Experiment 20000439 PARAMETER Experiment Name: At_Roots__P Parameter: Age (day) Value: 14 vs. 21
  misc_feature: MA Experiment 20000439 PARAMETER Experiment Name: At_Roots__P Parameter: Organism Value: A. thaliana
  misc_feature: MA Experiment 20000439 PARAMETER Experiment Name: At_Roots__P Parameter: Tissue Value: Roots vs. Whole Plant
  misc_feature: MA Experiment ID: 20000451 Result: Down-regulated in Transcription
  misc_feature: MA Experiment 20000451 PARAMETER Experiment Name: At_CS6879_Shoots-Roots_P Parameter: Age (day) Value: 14
  misc_feature: MA Experiment 20000451 PARAMETER Experiment Name: At_CS6879_Shoots-Roots_P Parameter: Organism Value: A. thaliana
  misc_feature: MA Experiment 20000451 PARAMETER Experiment Name: At_CS6879_Shoots-Roots_P Parameter: Plant Line Value: CS6879 vs. WS
  misc_feature: MA Experiment 20000451 PARAMETER Experiment Name: At_CS6879_Shoots-Roots_P Parameter: Tissue Value: Roots
  misc_feature: MA Experiment ID: 20000452 Result: Down-regulated in Transcription
  misc_feature: MA Experiment 20000452 PARAMETER Experiment Name: At_CS6879_Shoots-Roots_P Parameter: Age (day) Value: 14
  misc_feature: MA Experiment 20000452 PARAMETER Experiment Name: At_CS6879_Shoots-Roots_P Parameter: Organism Value: A. thaliana
  misc_feature: MA Experiment 20000452 PARAMETER Experiment Name: At_CS6879_Shoots-Roots_P Parameter: Plant Line Value: CS6879 vs. WS
  misc_feature: MA Experiment 20000452 PARAMETER Experiment Name: At_CS6879_Shoots-Roots_P Parameter: Tissue Value: Shoots
  misc_feature: MA Experiment ID: 20000453 Result: Up-regulated in Transcription
  misc_feature: MA Experiment 20000453 PARAMETER Experiment Name: At_100uM_ABA_P Parameter: Age (day) Value: 15
  misc_feature: MA Experiment 20000453 PARAMETER Experiment Name: At_100uM_ABA_P Parameter: Organism Value: A. thaliana
  misc_feature: MA Experiment 20000453 PARAMETER Experiment Name: At_100uM_ABA_P Parameter: Plant Line Value: WS
  misc_feature: MA Experiment 20000453 PARAMETER Experiment Name: At_100uM_ABA_P Parameter: Timepoint (hr) Value: 24
  misc_feature: MA Experiment 20000453 PARAMETER Experiment Name: At_100uM_ABA_P Parameter: Tissue Value: Aerial
  misc_feature: MA Experiment 20000453 PARAMETER Experiment Name: At_100uM_ABA_P Parameter: Treatment Value: 100uM ABA vs. No Treatment
  misc_feature: MA Experiment ID: 20000455 Result: Up-regulated in Transcription
  misc_feature: MA Experiment 20000455 PARAMETER Experiment Name: At_100uM_ABA_P Parameter: Age (day) Value: 16
  misc_feature: MA Experiment 20000455 PARAMETER Experiment Name: At_100uM_ABA_P Parameter: Organism Value: A. thaliana
  misc_feature: MA Experiment 20000455 PARAMETER Experiment Name: At_100uM_ABA_P Parameter: Plant Line Value: WS
  misc_feature: MA Experiment 20000455 PARAMETER Experiment Name: At_100uM_ABA_P Parameter: Timepoint (hr) Value: 48
  misc_feature: MA Experiment 20000455 PARAMETER Experiment Name: At_100uM_ABA_P Parameter: Tissue Value: Aerial
  misc_feature: MA Experiment 20000455 PARAMETER Experiment Name: At_100uM_ABA_P Parameter: Treatment Value: 100uM ABA vs. No Treatment
  misc_feature: MA Experiment ID: 20000495 Result: Up-regulated in Transcription
  misc_feature: MA Experiment 20000495 PARAMETER Experiment Name: At_Guard_Cells_P Parameter: Harvest Date Value: 8/2/2002
  misc_feature: MA Experiment 20000495 PARAMETER Experiment Name: At_Guard_Cells_P Parameter: Organism Value: A. thaliana
  misc_feature: MA Experiment 20000495 PARAMETER Experiment Name: At_Guard_Cells_P Parameter: Tissue Value: Guard Cells vs. Leaves
  misc_feature: MA Experiment ID: 20000709 Result: Up-regulated in Transcription
  misc_feature: MA Experiment 20000709 PARAMETER Experiment Name: At_15mM_NH4NO3_L-to-H_P Parameter: Age (hr) Value: 14
  misc_feature: MA Experiment 20000709 PARAMETER Experiment Name: At_15mM_NH4NO3_L-to-H_P Parameter: Organism Value: A. thaliana
  misc_feature: MA Experiment 20000709 PARAMETER Experiment Name: At_15mM_NH4NO3_L-to-H_P Parameter: Plant Line Value: WS
  misc_feature: MA Experiment 20000709 PARAMETER Experiment Name: At_15mM_NH4NO3_L-to-H_P Parameter: Timepoint (hr) Value: 4
  misc_feature: MA Experiment 20000709 PARAMETER Experiment Name: At_15mM_NH4NO3_L-to-H_P Parameter: Tissue Value: Aerial
  misc_feature: MA Experiment 20000709 PARAMETER Experiment Name: At_15mM_NH4NO3_L-to-H_P Parameter: Treatment Value: 15mM NH4NO3 vs. 30mM Mannitol
  misc_feature: MA Experiment ID: 20001554 Result: Up-regulated in Transcription
  misc_feature: MA Experiment 20001554 PARAMETER Experiment Name: At_Drought_Soil_Dry_P Parameter: Age (day) Value: 21
  misc_feature: MA Experiment 20001554 PARAMETER Experiment Name: At_Drought_Soil_Dry_P Parameter: Organism Value: A. thaliana
  misc_feature: MA Experiment 20001554 PARAMETER Experiment Name: At_Drought_Soil_Dry_P Parameter: Plant Line Value: WS
  misc_feature: MA Experiment 20001554 PARAMETER Experiment Name: At_Drought_Soil_Dry_P Parameter: Post Timepoint (hr) Value: None
  misc_feature: MA Experiment 20001554 PARAMETER Experiment Name: At_Drought_Soil_Dry_P Parameter: Post-Treatment Value: None
  misc_feature: MA Experiment 20001554 PARAMETER Experiment Name: At_Drought_Soil_Dry_P Parameter: Timepoint (day) Value: 7
  misc_feature: MA Experiment 20001554 PARAMETER Experiment Name: At_Drought_Soil_Dry_P Parameter: Treatment Value: Drought vs. No Drought
  misc_feature: MA Experiment ID: 20001555 Result: Up-regulated in Transcription
  misc_feature: MA Experiment 20001555 PARAMETER Experiment Name: At_Drought_Soil_Dry_P Parameter: Age (day) Value: 24
  misc_feature: MA Experiment 20001555 PARAMETER Experiment Name: At_Drought_Soil_Dry_P Parameter: Organism Value: A. thaliana
  misc_feature: MA Experiment 20001555 PARAMETER Experiment Name: At_Drought_Soil_Dry_P Parameter: Plant Line Value: WS
  misc_feature: MA Experiment 20001555 PARAMETER Experiment Name: At_Drought_Soil_Dry_P Parameter: Post Timepoint (hr) Value: None
  misc_feature: MA Experiment 20001555 PARAMETER Experiment Name: At_Drought_Soil_Dry_P Parameter: Post-Treatment Value: None
  misc_feature: MA Experiment 20001555 PARAMETER Experiment Name: At_Drought_Soil_Dry_P Parameter: Timepoint (day) Value: 10
  misc_feature: MA Experiment 20001555 PARAMETER Experiment Name: At_Drought_Soil_Dry_P Parameter: Treatment Value: Drought vs. No Drought
  misc_feature: MA Experiment ID: 20001558 Result: Down-regulated in Transcription
  misc_feature: MA Experiment 20001558 PARAMETER Experiment Name: At_Drought_Soil_Dry_P Parameter: Age (day) Value: 27
  misc_feature: MA Experiment 20001558 PARAMETER Experiment Name: At_Drought_Soil_Dry_P Parameter: Organism Value: A. thaliana
  misc_feature: MA Experiment 20001558 PARAMETER Experiment Name: At_Drought_Soil_Dry_P Parameter: Plant Line Value: WS
  misc_feature: MA Experiment 20001558 PARAMETER Experiment Name: At_Drought_Soil_Dry_P Parameter: Post Timepoint (hr) Value: 6
  misc_feature: MA Experiment 20001558 PARAMETER Experiment Name: At_Drought_Soil_Dry_P Parameter: Post-Treatment Value: Re-Water vs. No Drought
  misc_feature: MA Experiment 20001558 PARAMETER Experiment Name: At_Drought_Soil_Dry_P Parameter: Timepoint (day) Value: 13
  misc_feature: MA Experiment 20001558 PARAMETER Experiment Name: At_Drought_Soil_Dry_P Parameter: Treatment Value: Drought vs. No Drought
atcacttacttaacatactaagagagttattagaacttgcaaaaaatggcttccaaggctttgattctgttaggtctcttctcagttcttctcgtcgtctccgaagtgtctgccgcaaggcaatcgggcatggtgaagccagagagtgaggaaactgtgcaacctgaaggttatggcggtggccacggaggacatggtggtcacggagggggaggaggccacggacatggaggacacaacggaggagggggccacggacttgacggatacggaggaggtggaggacactatggaggaggtggaggacactacggaggaggtggaggacactacggaggaggtggaggacactacggaggaggaggccacgggctaaacgaacctgttcagactaagccgggtgtttaaaactatataatatcttcactaccatgcatgattgcatatatatatatacgcttatgtattatctatatgcctataaataaaccatggtgagtttgtaacgcagtgccttcagaaatgttcggaataaatttccataatatt

SEQ ID NO: 84338 - protein, 120 aa, Arabidopsis thaliana
  peptide (1)..(120): Ceres Seq. ID no. 12674644
  misc_feature (38)..(111): Pfam Name: Herpesvirus latent membrane protein 1 (LMP1) Pfam Description: Herpesvirus latent membrane protein 1 (LMP1)
  misc_feature (1)..(120): Homolog of NCBI NO: 15224540 NR Description: putative glycine-rich protein; protein id: supported by cDNA: 105261. [Arabidopsis thaliana]
  misc_feature (1)..(120): Homolog of NCBI NO: 21536606 NR Description: putative glycine-rich protein [Arabidopsis
  misc_feature (1)..(107): Homolog of NCBI NO: 30678191 NR Description: glycine-rich protein [Arabidopsis thaliana]
  misc_feature (1)..(120): Homolog of NCBI NO: 15224547 NR Description: putative glycine-rich protein; protein id:
  misc_feature (1)..(120): Homolog of NCBI NO: 9957568 NR Description: antimicrobial peptide shep-GRP [Capsella
  misc_feature (42)..(120): Homolog of NCBI NO: 30678191 NR Description: glycine-rich protein [Arabidopsis thaliana]
  misc_feature (1)..(109): Homolog of NCBI NO: 15224548 NR Description: putative glycine-rich protein; protein id: supported by cDNA: gi_17473738, supported by cDNA: gi_20148476
  misc_feature (1)..(107): Homolog of NCBI NO: 259447 NR Description: glycine-rich protein; atGRP [Arabidopsis thaliana]
  misc_feature (1)..(107): Homolog of NCBI NO: 81625 NR Description: glycine-rich protein 3 precursor - Arabidopsis
  misc_feature (1)..(119): Homolog of NCBI NO: 18266043 NR Description: glycine-rich protein [Brassica oleracea]
MASKALILLGLFSVLLVVSEVSAARQSGMVKPESEETVQPEGYGGGHGGHGGHGGGGGHGHGGHNGGGGHGLDGYGGGGGHYGGGGGHYGGGGGHYGGGGGHYGGGGHGLNEPVQTKPGV

SEQ ID NO: 84339 - protein, 92 aa, Arabidopsis thaliana
  peptide (1)..(92): Ceres Seq. ID no. 12674645
  misc_feature (10)..(83): Pfam Name: Herpesvirus latent membrane protein 1 (LMP1) Pfam Description: Herpesvirus latent membrane protein 1 (LMP1)
  misc_feature (1)..(92): Homolog of NCBI NO: 15224540 NR Description: putative glycine-rich protein; protein id: supported by cDNA: 105261. [Arabidopsis thaliana]
  misc_feature (1)..(92): Homolog of NCBI NO: 21536606 NR Description: putative glycine-rich protein [Arabidopsis
  misc_feature (1)..(79): Homolog of NCBI NO: 30678191 NR Description: glycine-rich protein [Arabidopsis thaliana]
  misc_feature (1)..(92): Homolog of NCBI NO: 15224547 NR Description: putative glycine-rich protein; protein id:
  misc_feature (1)..(92): Homolog of NCBI NO: 9957568 NR Description: antimicrobial peptide shep-GRP [Capsella
  misc_feature (14)..(92): Homolog of NCBI NO: 30678191 NR Description: glycine-rich protein [Arabidopsis thaliana]
  misc_feature (1)..(81): Homolog of NCBI NO: 15224548 NR Description: putative glycine-rich protein; protein id: supported by cDNA: gi_17473738, supported by cDNA: gi_20148476
  misc_feature (1)..(79): Homolog of NCBI NO: 259447 NR Description: glycine-rich protein; atGRP [Arabidopsis thaliana]
  misc_feature (1)..(79): Homolog of NCBI NO: 81625 NR Description: glycine-rich protein 3 precursor - Arabidopsis
  misc_feature (1)..(91): Homolog of NCBI NO: 18266043 NR Description: glycine-rich protein [Brassica oleracea]
MVKPESEETVQPEGYGGGHGGHGGHGGGGGHGHGGHNGGGGHGLDGYGGGGGHYGGGGGHYGGGGGHYGGGGGHYGGGGHGLNEPVQTKPGV

SEQ ID NO: 84340 - protein, 67 aa, Arabidopsis thaliana
  peptide (1)..(67): Ceres Seq. ID no. 12674646
  misc_feature (1)..(66): Pfam Name: Transferrin binding protein-like solute binding protein Pfam Description: Transferrin binding protein-like solute binding
MAVATEDMVVTEGEEATDMEDTTEEGATDLTDTEEVEDTMEEVEDTTEEVEDTTEEVEDTTEEEATG

SEQ ID NO: 84341 - DNA, 952 bp, Arabidopsis thaliana
  misc_feature (1)..(952): Ceres Seq. ID no. 12674651
  misc_feature: MA Experiment ID: 108434 Result: Down-regulated in Transcription
  misc_feature: MA Experiment 108434 PARAMETER Experiment Name: At_Root_Tips_cDNA_P Parameter: Tissue Value: Root Tips
  misc_feature: MA Experiment ID: 108435 Result: Down-regulated in Transcription
  misc_feature: MA Experiment 108435 PARAMETER Experiment Name: At_stm_Mutants_cDNA_P Parameter: Plant Line Value: wt Landsburg vs stm
  misc_feature: MA Experiment 108435 PARAMETER Experiment Name: At_stm_Mutants_cDNA_P Parameter: Tissue Value: Shoot Apical Meristem Region
  misc_feature: MA Experiment ID: 108469 Result: Up-regulated in Transcription
  misc_feature: MA Experiment ID: 108576 Result: Up-regulated in Transcription
  misc_feature: MA Experiment 108576 PARAMETER Experiment Name: At_42deg_Heat_cDNA_P Parameter: Temperature (deg C) Value: 42 vs. 22
  misc_feature: MA Experiment 108576 PARAMETER Experiment Name: At_42deg_Heat_cDNA_P Parameter: Timepoint (hr) Value: 1
  misc_feature: MA Experiment 108576 PARAMETER Experiment Name: At_42deg_Heat_cDNA_P Parameter: Tissue Value: Aerial
  misc_feature: MA Experiment ID: 108577 Result: Up-regulated in Transcription
  misc_feature: MA Experiment 108577 PARAMETER Experiment Name: At_42deg_Heat_cDNA_P Parameter: Temperature (deg C) Value: 42 vs. 22
  misc_feature: MA Experiment 108577 PARAMETER Experiment Name: At_42deg_Heat_cDNA_P Parameter: Timepoint (hr) Value: 6
  misc_feature: MA Experiment 108577 PARAMETER Experiment Name: At_42deg_Heat_cDNA_P Parameter: Tissue Value: Aerial
  misc_feature: MA Experiment ID: 108594 Result: Down-regulated in Transcription
  misc_feature: MA Experiment 108594 PARAMETER Experiment Name: At_Ler-rhl_Root_cDNA_P Parameter: Plant Line Value: null
  misc_feature: MA Experiment ID: 20000069 Result: Up-regulated in Transcription
  misc_feature: MA Experiment 20000069 PARAMETER Experiment Name: At_100uM_ABA_Mutants_cDNA_P Parameter: Plant Line Value: CS23
  misc_feature: MA Experiment 20000069 PARAMETER Experiment Name: At_100uM_ABA_Mutants_cDNA_P Parameter: Timepoint (hr) Value: 6
  misc_feature: MA Experiment 20000069 PARAMETER Experiment Name: At_100uM_ABA_Mutants_cDNA_P Parameter: Tissue Value: Aerial
  misc_feature: MA Experiment 20000069 PARAMETER Experiment Name: At_100uM_ABA_Mutants_cDNA_P Parameter: Treatment Value: 100uM ABA vs. No Treatment
  misc_feature: MA Experiment ID: 20000070 Result: Up-regulated in Transcription
  misc_feature: MA Experiment 20000070 PARAMETER Experiment Name: At_100uM_ABA_Mutants_cDNA_P Parameter: Plant Line Value: CS24
  misc_feature: MA Experiment 20000070 PARAMETER Experiment Name: At_100uM_ABA_Mutants_cDNA_P Parameter: Timepoint (hr) Value: 6
  misc_feature: MA Experiment 20000070 PARAMETER Experiment Name: At_100uM_ABA_Mutants_cDNA_P Parameter: Tissue Value: Aerial
  misc_feature: MA Experiment 20000070 PARAMETER Experiment Name: At_100uM_ABA_Mutants_cDNA_P Parameter: Treatment Value: 100uM ABA vs. No Treatment
  misc_feature: MA Experiment ID: 20000071 Result: Up-regulated in Transcription
  misc_feature: MA Experiment 20000071 PARAMETER Experiment Name: At_100uM_ABA_Mutants_cDNA_P Parameter: Plant Line Value: CS8104
  misc_feature: MA Experiment 20000071 PARAMETER Experiment Name: At_100uM_ABA_Mutants_cDNA_P Parameter: Timepoint (hr) Value: 6
  misc_feature: MA Experiment 20000071 PARAMETER Experiment Name: At_100uM_ABA_Mutants_cDNA_P Parameter: Tissue Value: Aerial
  misc_feature: MA Experiment 20000071 PARAMETER Experiment Name: At_100uM_ABA_Mutants_cDNA_P Parameter: Treatment Value: 100uM ABA vs. No Treatment
  misc_feature: MA Experiment ID: 20000072 Result: Up-regulated in Transcription
  misc_feature: MA Experiment 20000072 PARAMETER Experiment Name: At_100uM_ABA_Mutants_cDNA_P Parameter: Plant Line Value: CS8105
  misc_feature: MA Experiment 20000072 PARAMETER Experiment Name: At_100uM_ABA_Mutants_cDNA_P Parameter: Timepoint (hr) Value: 6
  misc_feature: MA Experiment 20000072 PARAMETER Experiment Name: At_100uM_ABA_Mutants_cDNA_P Parameter: Tissue Value: Aerial
  misc_feature: MA Experiment 20000072 PARAMETER Experiment Name: At_100uM_ABA_Mutants_cDNA_P Parameter: Treatment Value: 100uM ABA vs. No Treatment
  misc_feature: MA Experiment ID: 20000086 Result: Up-regulated in Transcription
  misc_feature: MA Experiment 20000086 PARAMETER Experiment Name: At_100uM_ABA_Mutants_cDNA_P Parameter: Plant Line Value: CS22
  misc_feature: MA Experiment 20000086 PARAMETER Experiment Name: At_100uM_ABA_Mutants_cDNA_P Parameter: Timepoint (hr) Value: 6
  misc_feature: MA Experiment 20000086 PARAMETER Experiment Name: At_100uM_ABA_Mutants_cDNA_P Parameter: Tissue Value: Aerial
  misc_feature: MA Experiment 20000086 PARAMETER Experiment Name: At_100uM_ABA_Mutants_cDNA_P Parameter: Treatment Value: 100uM ABA vs. No Treatment
  misc_feature: MA Experiment ID: 20000087 Result: Up-regulated in Transcription
  misc_feature: MA Experiment 20000087 PARAMETER Experiment Name: At_100uM_ABA_Mutants_cDNA_P Parameter: Plant Line Value: WS
  misc_feature: MA Experiment 20000087 PARAMETER Experiment Name: At_100uM_ABA_Mutants_cDNA_P Parameter: Timepoint (hr) Value: 6
  misc_feature: MA Experiment 20000087 PARAMETER Experiment Name: At_100uM_ABA_Mutants_cDNA_P Parameter: Tissue Value: Aerial
  misc_feature: MA Experiment 20000087 PARAMETER Experiment Name: At_100uM_ABA_Mutants_cDNA_P Parameter: Treatment Value: 100uM ABA vs. No Treatment
  misc_feature: MA Experiment ID: 20000088 Result: Up-regulated in Transcription
  misc_feature: MA Experiment 20000088 PARAMETER Experiment Name: At_100uM_ABA_Mutants_cDNA_P Parameter: Plant Line Value: Landsberg
  misc_feature: MA Experiment 20000088 PARAMETER Experiment Name: At_100uM_ABA_Mutants_cDNA_P Parameter: Timepoint (hr) Value: 6
  misc_feature: MA Experiment 20000088 PARAMETER Experiment Name: At_100uM_ABA_Mutants_cDNA_P Parameter: Tissue Value: Aerial
  misc_feature: MA Experiment 20000088 PARAMETER Experiment Name: At_100uM_ABA_Mutants_cDNA_P Parameter: Treatment Value: 100uM ABA vs. No Treatment
  misc_feature: MA Experiment ID: 20000089 Result: Up-regulated in Transcription
  misc_feature: MA Experiment ID: 20000090 Result: Up-regulated in Transcription
  misc_feature: MA Experiment ID: 20000093 Result: Up-regulated in Transcription
  misc_feature: MA Experiment 20000093 PARAMETER Experiment Name: At_42deg_Heat_cDNA_P Parameter: Temperature (deg C) Value: 42 vs. 22
  misc_feature: MA Experiment 20000093 PARAMETER Experiment Name: At_42deg_Heat_cDNA_P Parameter: Timepoint (hr) Value: 0.5
  misc_feature: MA Experiment 20000093 PARAMETER Experiment Name: At_42deg_Heat_cDNA_P Parameter: Tissue Value: Aerial
  misc_feature: MA Experiment ID: 20000111 Result: Up-regulated in Transcription
  misc_feature: MA Experiment 20000111 PARAMETER Experiment Name: At_42deg_Heat_cDNA_P Parameter: Temperature (deg C) Value: 42 vs. 22
  misc_feature: MA Experiment 20000111 PARAMETER Experiment Name: At_42deg_Heat_cDNA_P Parameter: Timepoint (hr) Value: 6
  misc_feature: MA Experiment 20000111 PARAMETER Experiment Name: At_42deg_Heat_cDNA_P Parameter: Tissue Value: Aerial
  misc_feature: MA Experiment ID: 20000112 Result: Up-regulated in Transcription
  misc_feature: MA Experiment 20000112 PARAMETER Experiment Name: At_42deg_Heat_cDNA_P Parameter: Temperature (deg C) Value: 42 vs. 22
  misc_feature: MA Experiment 20000112 PARAMETER Experiment Name: At_42deg_Heat_cDNA_P Parameter: Timepoint (hr) Value: 2
  misc_feature: MA Experiment 20000112 PARAMETER Experiment Name: At_42deg_Heat_cDNA_P Parameter: Tissue Value: Aerial
  misc_feature: MA Experiment ID: 20000113 Result: Up-regulated in Transcription
  misc_feature: MA Experiment 20000113 PARAMETER Experiment Name: At_42deg_Heat_cDNA_P Parameter: Temperature (deg C) Value: 42 vs. 22
  misc_feature: MA Experiment 20000113 PARAMETER Experiment Name: At_42deg_Heat_cDNA_P Parameter: Timepoint (hr) Value: 8
  misc_feature: MA Experiment 20000113 PARAMETER Experiment Name: At_42deg_Heat_cDNA_P Parameter: Tissue Value: Aerial
  misc_feature: MA Experiment ID: 20000117 Result: Up-regulated in Transcription
  misc_feature: MA Experiment 20000117 PARAMETER Experiment Name: At_100uM_ABA_Mutants_cDNA_P Parameter: Plant Line Value: Columbia
  misc_feature: MA Experiment 20000117 PARAMETER Experiment Name: At_100uM_ABA_Mutants_cDNA_P Parameter: Timepoint (hr) Value: 6
  misc_feature: MA Experiment 20000117 PARAMETER Experiment Name: At_100uM_ABA_Mutants_cDNA_P Parameter: Tissue Value: Aerial
  misc_feature: MA Experiment 20000117 PARAMETER Experiment Name: At_100uM_ABA_Mutants_cDNA_P Parameter: Treatment Value: 100uM ABA vs. No Treatment
  misc_feature: MA Experiment ID: 20000144 Result: Up-regulated in Transcription
  misc_feature: MA Experiment 20000144 PARAMETER Experiment Name: At_42deg_Heat_cDNA_P Parameter: Temperature (deg C) Value: 42 vs. 22
  misc_feature: MA Experiment 20000144 PARAMETER Experiment Name: At_42deg_Heat_cDNA_P Parameter: Timepoint (hr) Value: 1
  misc_feature: MA Experiment 20000144 PARAMETER Experiment Name: At_42deg_Heat_cDNA_P Parameter: Tissue Value: Aerial
  misc_feature: MA Experiment ID: 20000171 Result: Up-regulated in Transcription
  misc_feature: MA Experiment 20000171 PARAMETER Experiment Name: At_42deg_Heat_P Parameter: Age (day) Value: 14
  misc_feature: MA Experiment 20000171 PARAMETER Experiment Name: At_42deg_Heat_P Parameter: Organism Value: A. thaliana
  misc_feature: MA Experiment 20000171 PARAMETER Experiment Name: At_42deg_Heat_P Parameter: Plant Line Value: WS
  misc_feature: MA Experiment 20000171 PARAMETER Experiment Name: At_42deg_Heat_P Parameter: Temperature (deg C) Value: 42 vs. 22
  misc_feature: MA Experiment 20000171 PARAMETER Experiment Name: At_42deg_Heat_P Parameter: Timepoint (hr) Value: 1
  misc_feature: MA Experiment 20000171 PARAMETER Experiment Name: At_42deg_Heat_P Parameter: Tissue Value: Aerial
  misc_feature: MA Experiment ID: 20000173 Result: Up-regulated in Transcription
  misc_feature: MA Experiment 20000173 PARAMETER Experiment Name: At_42deg_Heat_P Parameter: Age (day) Value: 14
  misc_feature: MA Experiment 20000173 PARAMETER Experiment Name: At_42deg_Heat_P Parameter: Organism Value: A. thaliana
  misc_feature: MA Experiment 20000173 PARAMETER Experiment Name: At_42deg_Heat_P Parameter: Plant Line Value: WS
  misc_feature: MA Experiment 20000173 PARAMETER Experiment Name: At_42deg_Heat_P Parameter: Temperature (deg C) Value: 42 vs. 22
  misc_feature: MA Experiment 20000173 PARAMETER Experiment Name: At_42deg_Heat_P Parameter: Timepoint (hr) Value: 6
  misc_feature: MA Experiment 20000173 PARAMETER Experiment Name: At_42deg_Heat_P Parameter: Tissue Value: Aerial
  misc_feature: MA Experiment ID: 20000182 Result: Up-regulated in Transcription
  misc_feature: MA Experiment 20000182 PARAMETER Experiment Name: At_2mM_SA_P Parameter: Age (day) Value: 14
  misc_feature: MA Experiment 20000182 PARAMETER Experiment Name: At_2mM_SA_P Parameter: Organism Value: A. thaliana
  misc_feature: MA Experiment 20000182 PARAMETER Experiment Name: At_2mM_SA_P Parameter: Plant Line Value: WS
  misc_feature: MA Experiment 20000182 PARAMETER Experiment Name: At_2mM_SA_P Parameter: Timepoint (hr) Value: 6
  misc_feature: MA Experiment 20000182 PARAMETER Experiment Name: At_2mM_SA_P Parameter: Tissue Value: Aerial
  misc_feature: MA Experiment 20000182 PARAMETER Experiment Name: At_2mM_SA_P Parameter: Treatment Value: 2mM SA vs. No Treatment
  misc_feature: MA Experiment ID: 20000185 Result: Up-regulated in Transcription
  misc_feature: MA Experiment 20000185 PARAMETER Experiment Name: At_Roots__P Parameter: Age (day) Value: 7 vs. 21
  misc_feature: MA Experiment 20000185 PARAMETER Experiment Name: At_Roots__P Parameter: Organism Value: A. thaliana
  misc_feature: MA Experiment 20000185 PARAMETER Experiment Name: At_Roots__P Parameter: Tissue Value: Roots vs. Whole Plant
  misc_feature: MA Experiment ID: 20000234 Result: Down-regulated in Transcription
  misc_feature: MA Experiment 20000234 PARAMETER Experiment Name: At_Siliques_P Parameter: Age (day) Value: 21
  misc_feature: MA Experiment 20000234 PARAMETER Experiment Name: At_Siliques_P Parameter: Organism Value: A. thaliana
  misc_feature: MA Experiment 20000234 PARAMETER Experiment Name: At_Siliques_P Parameter: Plant Line Value: WS
  misc_feature: MA Experiment 20000234 PARAMETER Experiment Name: At_Siliques_P Parameter: Tissue Value: Less Than 5mm Siliques vs. Whole Plant
  misc_feature: MA Experiment ID: 20000235 Result: Down-regulated in Transcription
  misc_feature: MA Experiment 20000235 PARAMETER Experiment Name: At_Siliques_P Parameter: Age (day) Value: 21
  misc_feature: MA Experiment 20000235 PARAMETER Experiment Name: At_Siliques_P Parameter: Organism Value: A. thaliana
  misc_feature: MA Experiment 20000235 PARAMETER Experiment Name: At_Siliques_P Parameter: Plant Line Value: WS
  misc_feature: MA Experiment 20000235 PARAMETER Experiment Name: At_Siliques_P Parameter: Tissue Value: 5-10mm Siliques vs. Whole Plant
  misc_feature: MA Experiment ID: 20000286 Result: Down-regulated in Transcription
  misc_feature: MA Experiment 20000286 PARAMETER Experiment Name: At_Open_Flower_P Parameter: Age (day) Value: 21
  misc_feature: MA Experiment 20000286 PARAMETER Experiment Name: At_Open_Flower_P Parameter: Plant Line Value: WS
  misc_feature: MA Experiment 20000286 PARAMETER Experiment Name: At_Open_Flower_P Parameter: Tissue Value: Half Open vs. Whole Plant
  misc_feature: MA Experiment ID: 20000709 Result: Up-regulated in Transcription
  misc_feature: MA Experiment 20000709 PARAMETER Experiment Name: At_15mM_NH4NO3_L-to-H_P Parameter: Age (hr) Value: 14
  misc_feature: MA Experiment 20000709 PARAMETER Experiment Name: At_15mM_NH4NO3_L-to-H_P Parameter: Organism Value: A. thaliana
  misc_feature: MA Experiment 20000709 PARAMETER Experiment Name: At_15mM_NH4NO3_L-to-H_P Parameter: Plant Line Value: WS
  misc_feature: MA Experiment 20000709 PARAMETER Experiment Name: At_15mM_NH4NO3_L-to-H_P Parameter: Timepoint (hr) Value: 4
  misc_feature: MA Experiment 20000709 PARAMETER Experiment Name: At_15mM_NH4NO3_L-to-H_P Parameter: Tissue Value: Aerial
  misc_feature: MA Experiment 20000709 PARAMETER Experiment Name: At_15mM_NH4NO3_L-to-H_P Parameter: Treatment Value: 15mM NH4NO3 vs. 30mM Mannitol
  misc_feature: MA Experiment ID: 20000794 Result: Down-regulated in Transcription
  misc_feature: MA Experiment 20000794 PARAMETER Experiment Name: At_Petals_P Parameter: Age (day) Value: 23-25 days
  misc_feature: MA Experiment 20000794 PARAMETER Experiment Name: At_Petals_P Parameter: Plant Line Value: WS
  misc_feature: MA Experiment 20000794 PARAMETER Experiment Name: At_Petals_P Parameter: Tissue Value: Petals vs. Whole plant
  misc_feature: MA Experiment ID: 20001450 Result: Down-regulated in Transcription
  misc_feature: MA Experiment 20001450 PARAMETER Experiment Name: At_Far-red-induction_P Parameter: Age (day) Value: 7
  misc_feature: MA Experiment 20001450 PARAMETER Experiment Name: At_Far-red-induction_P Parameter: Light Value: Far-red vs. White
  misc_feature: MA Experiment 20001450 PARAMETER Experiment Name: At_Far-red-induction_P Parameter: Organism Value: A. thaliana
  misc_feature: MA Experiment 20001450 PARAMETER Experiment Name: At_Far-red-induction_P Parameter: Plant Line Value: Columbia
  misc_feature: MA Experiment 20001450 PARAMETER Experiment Name: At_Far-red-induction_P Parameter: Timepoint (hr) Value: 8
  misc_feature: MA Experiment 20001450 PARAMETER Experiment Name: At_Far-red-induction_P Parameter: Tissue Value: Whole Plant
  misc_feature: MA Experiment ID: 20001451 Result: Down-regulated in Transcription
  misc_feature: MA Experiment 20001451 PARAMETER Experiment Name: At_Far-red-induction_P Parameter: Age (day) Value: 7
  misc_feature: MA Experiment 20001451 PARAMETER Experiment Name: At_Far-red-induction_P Parameter: Light Value: Far-red vs. White
  misc_feature: MA Experiment 20001451 PARAMETER Experiment Name: At_Far-red-induction_P Parameter: Organism Value: A. thaliana
  misc_feature: MA Experiment 20001451 PARAMETER Experiment Name: At_Far-red-induction_P Parameter: Plant Line Value: Columbia
  misc_feature: MA Experiment 20001451 PARAMETER Experiment Name: At_Far-red-induction_P Parameter: Timepoint (hr) Value: 24
  misc_feature: MA Experiment 20001451 PARAMETER Experiment Name: At_Far-red-induction_P Parameter: Tissue Value: Whole Plant
  misc_feature: MA Experiment ID: 20001557 Result: Up-regulated in Transcription
  misc_feature: MA Experiment 20001557 PARAMETER Experiment Name: At_Drought_Soil_Dry_P Parameter: Age (day) Value: 27
  misc_feature: MA Experiment 20001557 PARAMETER Experiment Name: At_Drought_Soil_Dry_P Parameter: Organism Value: A. thaliana
  misc_feature: MA Experiment 20001557 PARAMETER Experiment Name: At_Drought_Soil_Dry_P Parameter: Plant Line Value: WS
  misc_feature: MA Experiment 20001557 PARAMETER Experiment Name: At_Drought_Soil_Dry_P Parameter: Post Timepoint (hr) Value: 3
  misc_feature: MA Experiment 20001557 PARAMETER Experiment Name: At_Drought_Soil_Dry_P Parameter: Post-Treatment Value: Re-Water vs. No Drought
  misc_feature: MA Experiment 20001557 PARAMETER Experiment Name: At_Drought_Soil_Dry_P Parameter: Timepoint (day) Value: 13
  misc_feature: MA Experiment 20001557 PARAMETER Experiment Name: At_Drought_Soil_Dry_P Parameter: Treatment Value: Drought vs. No Drought
cgagaaagacgaacacttacaaaaaaaaatctctttgtgagctttagcgatcgtaacaatggcgaacgaggtgattcttcttgatttctggccgagtatgttcgggatgaggacaaggatcgcattgagggagaaaggtgttgaatttgagtacagagaagaagatctaaggaacaagagtcctttgcttctccagatgaatccgattcacaagaagattcctgttctcatccacaatggtaaaccggttaacgaatctatcatccaggttcagtacattgacgaggtctggtctcacaagaaccctattcttccttctgatccttacctgagagctcaagctaggttctgggctgatttcattgacaagaagctgtatgatgctcagaggaaggtgtgggcgacaaagggtgaggaacaagaggcagggaagaaggatttcattgagatactcaagactcttgaatctgagcttggagacaaaccttactttagtggcgatgactttggctatgtagacattgcgttgattggattctacacatggtttccagcatacgagaagtttgctaacttcagtatcgaatctgaggttccgaaactgattgcttgggttaagaagtgtttgcagagggagagcgtggctaagtccttgcctgatcctgagaaggttactgaattcgtctctgagctcaggaagaaatttgtacctgagtaaatatgtttctcttgtcatatggttcggacttaagatgctctctgttttactttcgtgtgttgtctttcttaaataatgcagagcatctgtgaggtggtttgagtgtagagaatgtatgtctttgctgtagcagattcctgtgttttctggatttaatggcttgtcctagtttttatgcattgtaactatgagtttaattaatgatcgttaatctataatgattattaatttgtt

SEQ ID NO: 84342 - protein, 219 aa, Arabidopsis thaliana; identical to SEQ ID NO: 21639
  peptide (1)..(219): Ceres Seq. ID no. 12674652
  misc_feature (1)..(219): Homolog of NCBI NO: 18411929 NR Description: glutathione transferase, putative; protein id: supported by cDNA: 30759., supported by cDNA: gi_14326476
  misc_feature (1)..(219): Homolog of NCBI NO: 21592644 NR Description: glutathione transferase, putative [Arabidopsis
  misc_feature (1)..(219): Homolog of NCBI NO: 8052534 NR Description: F3F9.11 [Arabidopsis thaliana]
  misc_feature (1)..(215): Homolog of NCBI NO: 15220041 NR Description: glutathione transferase, putative; protein id: [Arabidopsis thaliana] >gi|25313212|pir||H86307 probable
  misc_feature (1)..(216): Homolog of NCBI NO: 1346215 NR Description: PROBABLE GLUTATHIONE S-TRANSFERASE PARC
  misc_feature (1)..(216): Homolog of NCBI NO: 416652 NR Description: PROBABLE GLUTATHIONE S-TRANSFERASE (AUXIN-INDUCED
  misc_feature (1)..(214): Homolog of NCBI NO: 7447307 NR Description: glutathione transferase (EC 2.5.1.18) - papaya
  misc_feature (1)..(216): Homolog of NCBI NO: 100302 NR Description: auxin-induced protein (clone pCNT107) - common
  misc_feature (1)..(214): Homolog of NCBI NO: 15218311 NR Description: glutathione transferase, putative; protein id: supported by cDNA: 30680. [Arabidopsis thaliana]

SEQ ID NO: 84343 - protein, 206 aa, Arabidopsis thaliana; identical to SEQ ID NO: 21640
  peptide (1)..(206): Ceres Seq. ID no. 12674653
  misc_feature (1)..(206): Homolog of NCBI NO: 18411929 NR Description: glutathione transferase, putative; protein id: supported by cDNA: 30759., supported by cDNA: gi_14326476
  misc_feature (1)..(206): Homolog of NCBI NO: 21592644 NR Description: glutathione transferase, putative [Arabidopsis
  misc_feature (1)..(206): Homolog of NCBI NO: 8052534 NR Description: F3F9.11 [Arabidopsis thaliana]
  misc_feature (1)..(202): Homolog of NCBI NO: 15220041 NR Description: glutathione transferase, putative; protein id: [Arabidopsis thaliana] >gi|25313212|pir||H86307 probable
  misc_feature (1)..(203): Homolog of NCBI NO: 1346215 NR Description: PROBABLE GLUTATHIONE S-TRANSFERASE PARC
  misc_feature (1)..(203): Homolog of NCBI NO: 416652 NR Description: PROBABLE GLUTATHIONE S-TRANSFERASE (AUXIN-INDUCED
  misc_feature (1)..(201): Homolog of NCBI NO: 7447307 NR Description: glutathione transferase (EC 2.5.1.18) - papaya
  misc_feature (1)..(203): Homolog of NCBI NO: 100302 NR Description: auxin-induced protein (clone pCNT107) - common
  misc_feature (1)..(201): Homolog of NCBI NO: 15218311 NR Description: glutathione transferase, putative; protein id: supported by cDNA: 30680. [Arabidopsis thaliana]

SEQ ID NO: 84344 - protein, 203 aa, Arabidopsis thaliana; identical to SEQ ID NO: 21641
  peptide (1)..(203): Ceres Seq. ID no. 12674654
  misc_feature (1)..(203): Homolog of NCBI NO: 18411929 NR Description: glutathione transferase, putative; protein id: supported by cDNA: 30759., supported by cDNA: gi_14326476
  misc_feature (1)..(203): Homolog of NCBI NO: 21592644 NR Description: glutathione transferase, putative [Arabidopsis
  misc_feature (1)..(203): Homolog of NCBI NO: 8052534 NR Description: F3F9.11 [Arabidopsis thaliana]
  misc_feature (1)..(199): Homolog of NCBI NO: 15220041 NR Description: glutathione transferase, putative; protein id: [Arabidopsis thaliana] >gi|25313212|pir||H86307 probable
  misc_feature (1)..(200): Homolog of NCBI NO: 1346215 NR Description: PROBABLE GLUTATHIONE S-TRANSFERASE PARC
  misc_feature (1)..(200): Homolog of NCBI NO: 416652 NR Description: PROBABLE GLUTATHIONE S-TRANSFERASE (AUXIN-INDUCED
  misc_feature (1)..(198): Homolog of NCBI NO: 7447307 NR Description: glutathione transferase (EC 2.5.1.18) - papaya
  misc_feature (1)..(200): Homolog of NCBI NO: 100302 NR Description: auxin-induced protein (clone pCNT107) - common
  misc_feature (1)..(198): Homolog of NCBI NO: 15218311 NR Description: glutathione transferase, putative; protein id: supported by cDNA: 30680. [Arabidopsis thaliana]

SEQ ID NO: 84345 - DNA, 1238 bp, Arabidopsis thaliana
  misc_feature (1)..(1238): Ceres Seq. ID no. 12674724
  misc_feature: MA Experiment ID: 108435 Result: Down-regulated in Transcription
  misc_feature: MA Experiment 108435 PARAMETER Experiment Name: At_stm_Mutants_cDNA_P Parameter: Plant Line Value: wt Landsburg vs stm
  misc_feature: MA Experiment 108435 PARAMETER Experiment Name: At_stm_Mutants_cDNA_P Parameter: Tissue Value: Shoot Apical Meristem Region
  misc_feature: MA Experiment ID: 108464 Result: Up-regulated in Transcription
  misc_feature: MA Experiment 108464 PARAMETER Experiment Name: At_Germinating_Seeds_cDNA_P Parameter: Age (day) Value: 4 vs. 0
  misc_feature: MA Experiment 108464 PARAMETER Experiment Name: At_Germinating_Seeds_cDNA_P Parameter: Tissue Value: Germinating Seeds
  misc_feature: MA Experiment ID: 108579 Result: Up-regulated in Transcription
  misc_feature: MA Experiment 108579 PARAMETER Experiment Name: At_4deg_Cold_cDNA_P Parameter: Temperature (deg C) Value: 4 vs. 22
  misc_feature: MA Experiment 108579 PARAMETER Experiment Name: At_4deg_Cold_cDNA_P Parameter: Timepoint (hr) Value: 6
  misc_feature: MA Experiment 108579 PARAMETER Experiment Name: At_4deg_Cold_cDNA_P Parameter: Tissue Value: Aerial
  misc_feature: MA Experiment ID: 108595 Result: Down-regulated in Transcription
  misc_feature: MA Experiment 108595 PARAMETER Experiment Name: At_Ler-pi_Ovule_cDNA_P Parameter: Plant Line Value: null
  misc_feature: MA Experiment ID: 20000180 Result: Up-regulated in Transcription
  misc_feature: MA Experiment 20000180 PARAMETER Experiment Name: At_Germinating_Seeds_P Parameter: Age (hr) Value: 24 vs. 0
  misc_feature: MA Experiment 20000180 PARAMETER Experiment Name: At_Germinating_Seeds_P Parameter: Tissue Value: Germinating Seeds
  misc_feature: MA Experiment ID: 20000184 Result: Up-regulated in Transcription
  misc_feature: MA Experiment 20000184 PARAMETER Experiment Name: At_Shoots__P Parameter: Age (day) Value: 7
  misc_feature: MA Experiment 20000184 PARAMETER Experiment Name: At_Shoots__P Parameter: Tissue Value: Shoots vs. Whole Plant
  misc_feature: MA Experiment ID: 20000185 Result: Down-regulated in Transcription
  misc_feature: MA Experiment 20000185 PARAMETER Experiment Name: At_Roots__P Parameter: Age (day) Value: 7 vs. 21
  misc_feature: MA Experiment 20000185 PARAMETER Experiment Name: At_Roots__P Parameter: Organism Value: A. thaliana
  misc_feature: MA Experiment 20000185 PARAMETER Experiment Name: At_Roots__P Parameter: Tissue Value: Roots vs. Whole Plant
  misc_feature: MA Experiment ID: 20000224 Result: Up-regulated in Transcription
  misc_feature: MA Experiment ID: 20000439 Result: Down-regulated in Transcription
  misc_feature: MA Experiment 20000439 PARAMETER Experiment Name: At_Roots__P Parameter: Age (day) Value: 14 vs. 21
  misc_feature: MA Experiment 20000439 PARAMETER Experiment Name: At_Roots__P Parameter: Organism Value: A. thaliana
  misc_feature: MA Experiment 20000439 PARAMETER Experiment Name: At_Roots__P Parameter: Tissue Value: Roots vs. Whole Plant
  misc_feature: MA Experiment ID: 20001248 Result: Down-regulated in Transcription
  misc_feature: MA Experiment 20001248 PARAMETER Experiment Name: At_Far-red-induction_P Parameter: Age (day) Value: 7
  misc_feature: MA Experiment 20001248 PARAMETER Experiment Name: At_Far-red-induction_P Parameter: Light Value: Far-red vs. White
  misc_feature: MA Experiment 20001248 PARAMETER Experiment Name: At_Far-red-induction_P Parameter: Organism Value: A. thaliana
  misc_feature: MA Experiment 20001248 PARAMETER Experiment Name: At_Far-red-induction_P Parameter: Plant Line Value: Columbia
  misc_feature: MA Experiment 20001248 PARAMETER Experiment Name: At_Far-red-induction_P Parameter: Timepoint (hr) Value: 4
  misc_feature: MA Experiment 20001248 PARAMETER Experiment Name: At_Far-red-induction_P Parameter: Tissue Value: Whole Plant
  misc_feature: MA Experiment ID: 20001450 Result: Down-regulated in Transcription
  misc_feature: MA Experiment 20001450 PARAMETER Experiment Name: At_Far-red-induction_P Parameter: Age (day) Value: 7
  misc_feature: MA Experiment 20001450 PARAMETER Experiment Name: At_Far-red-induction_P Parameter: Light Value: Far-red vs. White
  misc_feature: MA Experiment 20001450 PARAMETER Experiment Name: At_Far-red-induction_P Parameter: Organism Value: A. thaliana
  misc_feature: MA Experiment 20001450 PARAMETER Experiment Name: At_Far-red-induction_P Parameter: Plant Line Value: Columbia
  misc_feature: MA Experiment 20001450 PARAMETER Experiment Name: At_Far-red-induction_P Parameter: Timepoint (hr) Value: 8
  misc_feature: MA Experiment 20001450 PARAMETER Experiment Name: At_Far-red-induction_P Parameter: Tissue Value: Whole Plant
aaaaaacgagcagctgtttatcttccaacaaagcttcttcgtgcatcttcgctcttctcaactcgtcatcctctccctctgattctcttaagtcgccttgaaaaattaagacaaaacaacaacaaaagaacaagagaagctctaaaatccagcagctatggcgtttcttctccccaatctctctccttctttccttcttccgaccggaaaatcactcaaagagaaacccatttccaaccaagctttatcatcatcatcatcatcgtccaatagctacgagtttgaagaagatagtctctctccactttctctctttagcgtccaggctcctcctcctgttcgaggtgcgcaggttaagaccaaaccaagtgcgcaggataagtaccagcacggcagcaaagatgacttctacatcaatctcggtttagctgtacgtacccttcgcgaagatttgcctctcctcttcaccaaagatctcaattacgacatttacagggatgatataacattagtggatccaatgaacacgttctctgggattgacaactacaaattgatcttctgggcacttagatttcatggcaagattctcttcagggatatctcacttgagatcttcagggtttggcaaccatcagagaacatgattctcatcaggtggaatcttaaaggtgtacctagagtcccatgggaggcaaagggagagtttcagggtacttctcgctataaactcgaccgaaatggcaaaatctatgagcataaggtcgataacttggccttcaacttccctcaccagctcaaacctgccacttctgttttggatatggtcaccgcttgccctgcaagtcccaatccaactttcatgtttggcgccatggattcatactcatcttcttggattgagttctacaaagcagtgcaaaggacactagacaagcaagaagagcaaatgcttgtgcaagaccatttcgtcccatgctcataatgccattaggtcacactcaggtgtatatatatatactgttacattgaagatacaatacatatatctatgtgtgcaggcatatgcatatgagtagatgtggttgacttagatatcaaagagggtagggaaccaagaatactcatgagcttgtacaacttgcctattgaatgtaaacagaattccttacagttgttttgttatgtaaaacacattgatgatttgtctttacgatcaagcgaaattatatcccttg

SEQ ID NO: 84346 - protein, 275 aa, Arabidopsis thaliana; identical to SEQ ID NO: 35228
  peptide (1)..(275): Ceres Seq. ID no. 12674725
  misc_feature (1)..(275): Homolog of NCBI NO: 18412399 NR Description: expressed protein; protein id: At1g79510.1, by cDNA: 21947., supported by cDNA: gi_13194785, supported by gi_13878082, supported by cDNA: gi_17104752 [Arabidopsis
  misc_feature (1)..(275): Homolog of NCBI NO: 15219209 NR Description: unknown protein; protein id: At1g16320.1,
  misc_feature (1)..(261): Homolog of NCBI NO: 38347356 NR Description: OSJNBa0070C17.17 [Oryza sativa (japonica
  misc_feature (73)..(238): Homolog of NCBI NO: 18407008 NR Description: Expressed protein; protein id: At2g46220.1, by cDNA: gi_13605751, supported by cDNA: gi_15215834, supported cDNA: gi_16226513, supported by cDNA: gi_20147418 [Arabidopsis
  misc_feature (73)..(202): Homolog of NCBI NO: 25408977 NR Description: hypothetical protein At2g46220 [imported] -
  misc_feature (47)..(203): Homolog of NCBI NO: 34904098 NR Description: unnamed protein product [Oryza sativa (japonica group)] >gi|7573630|dbj|BAA94539.1| unnamed protein product
  misc_feature (92)..(201): Homolog of NCBI NO: 23126421 NR Description: hypothetical protein [Nostoc punctiforme]
  misc_feature (92)..(201): Homolog of NCBI NO: 23040676 NR Description: hypothetical protein [Trichodesmium erythraeum
  misc_feature (86)..(201): Homolog of NCBI NO: 17228448 NR Description: hypothetical protein [Nostoc sp. PCC 7120]
  misc_feature (88)..(201): Homolog of NCBI NO: 37522054 NR Description: hypothetical protein glr2485 [Gloeobacter

SEQ ID NO: 84347 - protein, 154 aa, Arabidopsis thaliana; identical to SEQ ID NO: 35229
  peptide (1)..(154): Ceres Seq. ID no. 12674726
  misc_feature (1)..(154): Homolog of NCBI NO: 18412399 NR Description: expressed protein; protein id: At1g79510.1, by cDNA: 21947., supported by cDNA: gi_13194785, supported by gi_13878082, supported by cDNA: gi_17104752 [Arabidopsis
  misc_feature (1)..(154): Homolog of NCBI NO: 15219209 NR Description: unknown protein; protein id: At1g16320.1,
  misc_feature (1)..(140): Homolog of NCBI NO: 38347356 NR Description: OSJNBa0070C17.17 [Oryza sativa (japonica
  misc_feature (1)..(117): Homolog of NCBI NO: 18407008 NR Description: Expressed protein; protein id: At2g46220.1, by cDNA: gi_13605751, supported by cDNA: gi_15215834, supported cDNA: gi_16226513, supported by cDNA: gi_20147418 [Arabidopsis
  misc_feature (1)..(81): Homolog of NCBI NO: 25408977 NR Description: hypothetical protein At2g46220 [imported] -
  misc_feature (1)..(82): Homolog of NCBI NO: 34904098 NR Description: unnamed protein product [Oryza sativa (japonica group)] >gi|7573630|dbj|BAA94539.1| unnamed protein product
  misc_feature (1)..(80): Homolog of NCBI NO: 23126421 NR Description: hypothetical protein [Nostoc punctiforme]
  misc_feature (1)..(80): Homolog of NCBI NO: 23040676 NR Description: hypothetical protein [Trichodesmium erythraeum
  misc_feature (1)..(80): Homolog of NCBI NO: 17228448 NR Description: hypothetical protein [Nostoc sp. PCC 7120]
  misc_feature (1)..(80): Homolog of NCBI NO: 37522054 NR Description: hypothetical protein glr2485 [Gloeobacter

SEQ ID NO: 84348 - DNA, 2501 bp, Arabidopsis thaliana
  misc_feature (1)..(2501): Ceres Seq. ID no. 12674735
  misc_feature: MA Experiment ID: 20000173 Result: Down-regulated in Transcription
  misc_feature: MA Experiment 20000173 PARAMETER Experiment Name: At_42deg_Heat_P Parameter: Age (day) Value: 14
  misc_feature: MA Experiment 20000173 PARAMETER Experiment Name: At_42deg_Heat_P Parameter: Organism Value: A. thaliana
  misc_feature: MA Experiment 20000173 PARAMETER Experiment Name: At_42deg_Heat_P Parameter: Plant Line Value: WS
  misc_feature: MA Experiment 20000173 PARAMETER Experiment Name: At_42deg_Heat_P Parameter: Temperature (deg C) Value: 42 vs. 22
  misc_feature: MA Experiment 20000173 PARAMETER Experiment Name: At_42deg_Heat_P Parameter: Timepoint (hr) Value: 6
  misc_feature: MA Experiment 20000173 PARAMETER Experiment Name: At_42deg_Heat_P Parameter: Tissue Value: Aerial
  misc_feature: MA Experiment ID: 20000184 Result: Down-regulated in Transcription
  misc_feature: MA Experiment 20000184 PARAMETER Experiment Name: At_Shoots__P Parameter: Age (day) Value: 7
  misc_feature: MA Experiment 20000184 PARAMETER Experiment Name: At_Shoots__P Parameter: Tissue Value: Shoots vs. Whole Plant
  misc_feature: MA Experiment ID: 20000234 Result: Up-regulated in Transcription
  misc_feature: MA Experiment 20000234 PARAMETER Experiment Name: At_Siliques_P Parameter: Age (day) Value: 21
  misc_feature: MA Experiment 20000234 PARAMETER Experiment Name: At_Siliques_P Parameter: Organism Value: A. thaliana
  misc_feature: MA Experiment 20000234 PARAMETER Experiment Name: At_Siliques_P Parameter: Plant Line Value: WS
  misc_feature: MA Experiment 20000234 PARAMETER Experiment Name: At_Siliques_P Parameter: Tissue Value: Less Than 5mm Siliques vs. Whole Plant
  misc_feature: MA Experiment ID: 20000235 Result: Up-regulated in Transcription
  misc_feature: MA Experiment 20000235 PARAMETER Experiment Name: At_Siliques_P Parameter: Age (day) Value: 21
  misc_feature: MA Experiment 20000235 PARAMETER Experiment Name: At_Siliques_P Parameter: Organism Value: A. thaliana
  misc_feature: MA Experiment 20000235 PARAMETER Experiment Name: At_Siliques_P Parameter: Plant Line Value: WS
  misc_feature: MA Experiment 20000235 PARAMETER Experiment Name: At_Siliques_P Parameter: Tissue Value: 5-10mm Siliques vs. Whole Plant
  misc_feature: MA Experiment ID: 20000264 Result: Up-regulated in Transcription
  misc_feature: MA Experiment 20000264 PARAMETER Experiment Name: At_Open_Flower_P Parameter: Age (day) Value: 21
  misc_feature: MA Experiment 20000264 PARAMETER Experiment Name: At_Open_Flower_P Parameter: Plant Line Value: WS
  misc_feature: MA Experiment 20000264 PARAMETER Experiment Name: At_Open_Flower_P Parameter: Tissue Value: Open Flower vs. Whole Plant
  misc_feature: MA Experiment ID: 20000265 Result: Up-regulated in Transcription
  misc_feature: MA Experiment 20000265 PARAMETER Experiment Name: At_Open_Flower_P Parameter: Age (day) Value: 21
  misc_feature: MA Experiment 20000265 PARAMETER Experiment Name: At_Open_Flower_P Parameter: Plant Line Value: WS
  misc_feature: MA Experiment 20000265 PARAMETER Experiment Name: At_Open_Flower_P Parameter: Tissue Value: Closed Flower vs. Whole Plant
  misc_feature: MA Experiment ID: 20000286 Result: Up-regulated in Transcription
  misc_feature: MA Experiment 20000286 PARAMETER Experiment Name: At_Open_Flower_P Parameter: Age (day) Value: 21
  misc_feature: MA Experiment 20000286 PARAMETER Experiment Name: At_Open_Flower_P Parameter: Plant Line Value: WS
  misc_feature: MA Experiment 20000286 PARAMETER Experiment Name: At_Open_Flower_P Parameter: Tissue Value: Half Open vs. Whole Plant
  misc_feature: MA Experiment ID: 20000439 Result: Up-regulated in Transcription
  misc_feature: MA Experiment 20000439 PARAMETER Experiment Name: At_Roots__P Parameter: Age (day) Value: 14 vs. 21
  misc_feature: MA Experiment 20000439 PARAMETER Experiment Name: At_Roots__P Parameter: Organism Value: A. thaliana
  misc_feature: MA Experiment 20000439 PARAMETER Experiment Name: At_Roots__P Parameter: Tissue Value: Roots vs. Whole Plant
  misc_feature: MA Experiment ID: 20000794 Result: Up-regulated in Transcription
  misc_feature: MA Experiment 20000794 PARAMETER Experiment Name: At_Petals_P Parameter: Age (day) Value: 23-25 days
  misc_feature: MA Experiment 20000794 PARAMETER Experiment Name: At_Petals_P Parameter: Plant Line Value: WS
  misc_feature: MA Experiment 20000794 PARAMETER Experiment Name: At_Petals_P Parameter: Tissue Value: Petals vs. Whole plant
  misc_feature: MA Experiment ID: 20001451 Result: Down-regulated in Transcription
  misc_feature: MA Experiment 20001451 PARAMETER Experiment Name: At_Far-red-induction_P Parameter: Age (day) Value: 7
  misc_feature: MA Experiment 20001451 PARAMETER Experiment Name: At_Far-red-induction_P Parameter: Light Value: Far-red vs. White
  misc_feature: MA Experiment 20001451 PARAMETER Experiment Name: At_Far-red-induction_P Parameter: Organism Value: A. thaliana
  misc_feature: MA Experiment 20001451 PARAMETER Experiment Name: At_Far-red-induction_P Parameter: Plant Line Value: Columbia
  misc_feature: MA Experiment 20001451 PARAMETER Experiment Name: At_Far-red-induction_P Parameter: Timepoint (hr) Value: 24
  misc_feature: MA Experiment 20001451 PARAMETER Experiment Name: At_Far-red-induction_P Parameter: Tissue Value: Whole Plant
acagtcacggagatagatagtaagagagagctatggcggaggagcacttcgacgttctgactaaatccggtgagaagaccggtgtgtccaaacccaggggagaggttcacagagatggagattaccatcgtgctgttcatgtctggatttttgtggagactactcaacagctacttctccaacttcgatctgatgataaagattcttggcctggtcaatgggacatctctagtgctggccatatatcagctggtgatacatcgcttctatctgcacagcgggagcttgaggaagagcttggcgtaaaactcccaaaggatgcatttgaaaagatcttcgtttttctgcaggaatgtgtcacaaacgatggcaaattcataaataatgagttcaatgatgtgtatcttgttactattctgcatccaatcccattagaagcctttactcttcaaaaagaggaagtctctgctgtaaagtacgtaccttacgaagaatacagaaactttctgtctaaggaagatcctgcttatgtgccatatgatgttaatggagagtatggaaaactatttgacataatcagacagaggtgccaagtgaacactgaggcccgtagtttatctctgcagaagcaactccagagatattctccagtcaccctcgaagccaagttgacagaactttctgaagcagatcagaaagcgttgggtctaattgtgaaggctgcaaaaattatggacgatatattctatgagcaggtttggaacagcaatccagccctaagagattggctgaaggatcatgccaatgcatcaaaactggacaaactaaaatgggattacttcacgatcaacaaaagtccatggtcgtctcttgatgaaaatgaagcattcttgagtactgcggattcagctgtaaagttgcttcctggagcaacaaaagccatagctggctggaagggtcttgaatatagagcagcctttccagtgactaaaccacctggtgccaatttctatcctcccgatatggataaaatggagttcaccttatggctcaatggccttacggaagagcaaaagcatgctgcaacaggatttttcagtgttataaaaaggcgaagtgaagctaatttagatgcttctgatcatcttgccagcagcacaaagaagttaccagactctaattccgatctgtatagtattccttattcagagatatatcgacctttcctcaagaaagcttctgaattcttgcagaaagctggggacttggtcagttcgccaagttgaagaagctactgcacagcaaagctgaagccttcctttcaaatgagtattatgagtcagacatcgcatggatggacttggattcaaagttagatattaccattggtccatatgagacgtacgaggatgaaatctttgggtataaggctacatttgaaaccttcatcggtattcgagatgataaagccacagctgatctgaaactctttggtgacaatctaaagctattggaagataatctcccgcttgagagtgtatacaaatcgacagatgtatctgctgctcctattcgggtcatccagttaatttacaattccggggatgtgaagggtcctcagactgttgcttacaatttgccaaacgatgaaaaaatcgtgaaggatagaggaacatcaatggttatgctcaagaacgtccaagaggcaaagtttgaacatattttaaagcctatagctgaaatcaccatcagcaaggaacagagaggattagttgattttgattctttcttcactcacaccatttgccatgaatgttgccatggcattggtccccataccataacccttcctggtggtcaaacctcaacagtgagaaaggaactacaagaagtccattctgcaatggaagaagcaaaggcagatatagttggtctttgggcactgaagtttctcatcactaaggggttgctttcaaagagtatggtggagagtatgtatgtttcgttcctagctggttgctttagatcgatccggtttggtctcacagaagctcatgggaaagggcaagccttgcaattcaactatttatatgaaaaaggagccttcgtgttccacgaggactctacattctcggttgatttcgctaagatcgaaggtgcagttgagagcctgagccatgagatactaactattcaaggaaaaggtgacaaaaacgcagcaacattgcttctaaataagtactgcactatcaccggaccattgaaaaccgctctggagaatctcgaacgcgttaaggtaccggtggatatatctccgacatttccattagcagaagcattgatgaactgaggaaagtttcagtttcagcaagactctggttttaacttttaataaataaataaaactcagatgatccatcatcataaaccaaatttgggatttaaaagagttatctgaatggtgttgtgttcttatcataataaagttgctacctttacat

SEQ ID NO: 84349 - protein, 417 aa, Arabidopsis thaliana
  peptide (1)..(417): Ceres Seq. ID no. 12674736
  misc_feature (31)..(174): Pfam Name: NUDIX domain Pfam Description: NUDIX domain
  misc_feature (1)..(107): Homolog of NCBI NO: 26450678 NR Description: unknown protein [Arabidopsis thaliana]
  misc_feature (4)..(169): Homolog of NCBI NO: 16802413 NR Description: similar to different proteins [Listeria EGD-e] >gi|27734607|sp|Q8Y9Z9|Y368_LISMO Putative Nudix hydrolase
  misc_feature (4)..(169): Homolog of NCBI NO: 16799464 NR Description: similar to different proteins [Listeria innocua]
  misc_feature (1)..(181): Homolog of NCBI NO: 15893737 NR Description: Hydrolase of MutT (Nudix) family [Clostridium
  misc_feature (4)..(169): Homolog of NCBI NO: 23112015 NR Description: hypothetical protein [Desulfitobacterium
  misc_feature (4)..(179): Homolog of NCBI NO: 23037506 NR Description: hypothetical protein [Oenococcus oeni MCW]
  misc_feature (20)..(162): Homolog of NCBI NO: 30020101 NR Description: Phosphohydrolase (MutT/nudix family protein) cereus ATCC 14579] >gi|29895651|gb|AAP08933.1| Phosphohydrolase
  misc_feature (21)..(92): Homolog of NCBI NO: 23475226 NR Description: hypothetical protein [Desulfovibrio desulfuricans
  misc_feature (3)..(91): Homolog of NCBI NO: 29349380 NR Description: putative NTP pyrophosphohydrolase [Bacteroides
  misc_feature (1)..(134): Homolog of NCBI NO: 30961859 NR Description: isopentenyl-diphosphate delta-isomerase
MAEEHFDVLTKSGEKTGVSKPRGEVHRDGDYHRAVHVWIFVETTQQLLLQLRSDDKDSWPGQWDISSAGHISAGDTSLLSAQRELEEELGVKLPKDAFEKIFVFLQECVTNDGKFINNEFNDVYLVTILHPIPLEAFTLQKEEVSAVKYVPYEEYRNFLSKEDPAYVPYDVNGEYGKLFDIIRQRCQVNTEARSLSLQKQLQRYSPVTLEAKLTELSEADQKALGLIVKAAKIMDDIFYEQVWNSNPALRDWLKDHANASKLDKLKWDYFTINKSPWSSLDENEAFLSTADSAVKLLPGATKAIAGWKGLEYRAAFPVTKPPGANFYPPDMDKMEFTLWLNGLTEEQKHAATGFFSVIKRRSEANLDASDHLASSTKKLPDSNSDLYSIPYSEIYRPFLKKASEFLQKAGDLVSSPS

SEQ ID NO: 84350 - protein, 331 aa, Arabidopsis thaliana
  peptide (1)..(331): Ceres Seq. ID no. 12674737
  misc_feature (1)..(331): Homolog of NCBI NO: 15912329 NR Description: At1g79690/F20B17_11 [Arabidopsis thaliana]
  misc_feature (1)..(321): Homolog of NCBI NO: 29347256 NR Description: putative dipeptidyl-peptidase III [Bacteroides
MDLDSKLDITIGPYETYEDEIFGYKATFETFIGIRDDKATADLKLFGDNLKLLEDNLPLESVYKSTDVSAAPIRVIQLIYNSGDVKGPQTVAYNLPNDEKIVKDRGTSMVMLKNVQEAKFEHILKPIAEITISKEQRGLVDFDSFFTHTICHECCHGIGPHTITLPGGQTSTVRKELQEVHSAMEEAKADIVGLWALKFLITKGLLSKSMVESMYVSFLAGCFRSIRFGLTEAHGKGQALQFNYLYEKGAFVFHEDSTFSVDFAKIEGAVESLSHEILTIQGKGDKNAATLLLNKYCTITGPLKTALENLERVKVPVDISPTFPLAEALMN

SEQ ID NO: 84351 - protein, 223 aa, Arabidopsis thaliana
  peptide (1)..(223): Ceres Seq. ID no. 12674738
  misc_feature (1)..(223): Homolog of NCBI NO: 15912329 NR Description: At1g79690/F20B17_11 [Arabidopsis thaliana]
  misc_feature (1)..(213): Homolog of NCBI NO: 29347256 NR Description: putative dipeptidyl-peptidase III [Bacteroides
MVMLKNVQEAKFEHILKPIAEITISKEQRGLVDFDSFFTHTICHECCHGIGPHTITLPGGQTSTVRKELQEVHSAMEEAKADIVGLWALKFLITKGLLSKSMVESMYVSFLAGCFRSIRFGLTEAHGKGQALQFNYLYEKGAFVFHEDSTFSVDFAKIEGAVESLSHEILTIQGKGDKNAATLLLNKYCTITGPLKTALENLERVKVPVDISPTFPLAEALMN

SEQ ID NO: 84352 - DNA, 1154 bp, Arabidopsis thaliana
  misc_feature (1)..(1154): Ceres Seq. ID no. 12674766
  misc_feature: MA Experiment ID: 108434 Result: Up-regulated in Transcription
  misc_feature: MA Experiment 108434 PARAMETER Experiment Name: At_Root_Tips_cDNA_P Parameter: Tissue Value: Root Tips
  misc_feature: MA Experiment ID: 108463 Result: Down-regulated in Transcription
  misc_feature: MA Experiment 108463 PARAMETER Experiment Name: At_Germinating_Seeds_cDNA_P Parameter: Age (day) Value: 3 vs. 0
  misc_feature: MA Experiment 108463 PARAMETER Experiment Name: At_Germinating_Seeds_cDNA_P Parameter: Tissue Value: Germinating Seeds
  misc_feature: MA Experiment ID: 108561 Result: Down-regulated in Transcription
  misc_feature: MA Experiment 108561 PARAMETER Experiment Name: At_100uM_ABA_cDNA_P Parameter: Timepoint (hr) Value: 6
  misc_feature: MA Experiment 108561 PARAMETER Experiment Name: At_100uM_ABA_cDNA_P Parameter: Tissue Value: Aerial
  misc_feature: MA Experiment 108561 PARAMETER Experiment Name: At_100uM_ABA_cDNA_P Parameter: Treatment Value: 100uM ABA vs. No Treatment
  misc_feature: MA Experiment ID: 108573 Result: Down-regulated in Transcription
  misc_feature: MA Experiment 108573 PARAMETER Experiment Name: At_Drought_cDNA_P Parameter: Timepoint (hr) Value: 6
  misc_feature: MA Experiment 108573 PARAMETER Experiment Name: At_Drought_cDNA_P Parameter: Tissue Value: Aerial
  misc_feature: MA Experiment 108573 PARAMETER Experiment Name: At_Drought_cDNA_P Parameter: Treatment Value: Drought vs. No Drought
  misc_feature: MA Experiment ID: 108576 Result: Down-regulated in Transcription
  misc_feature: MA Experiment 108576 PARAMETER Experiment Name: At_42deg_Heat_cDNA_P Parameter: Temperature (deg C) Value: 42 vs. 22
  misc_feature: MA Experiment 108576 PARAMETER Experiment Name: At_42deg_Heat_cDNA_P Parameter: Timepoint (hr) Value: 1
  misc_feature: MA Experiment 108576 PARAMETER Experiment Name: At_42deg_Heat_cDNA_P Parameter: Tissue Value: Aerial
  misc_feature: MA Experiment ID: 108577 Result: Down-regulated in Transcription
  misc_feature: MA Experiment 108577 PARAMETER Experiment Name: At_42deg_Heat_cDNA_P Parameter: Temperature (deg C) Value: 42 vs. 22
  misc_feature: MA Experiment 108577 PARAMETER Experiment Name: At_42deg_Heat_cDNA_P Parameter: Timepoint (hr) Value: 6
  misc_feature: MA Experiment 108577 PARAMETER Experiment Name: At_42deg_Heat_cDNA_P Parameter: Tissue Value: Aerial
  misc_feature: MA Experiment ID: 108579 Result: Up-regulated in Transcription
  misc_feature: MA Experiment 108579 PARAMETER Experiment Name: At_4deg_Cold_cDNA_P Parameter: Temperature (deg C) Value: 4 vs. 22
  misc_feature: MA Experiment 108579 PARAMETER Experiment Name: At_4deg_Cold_cDNA_P Parameter: Timepoint (hr) Value: 6
  misc_feature: MA Experiment 108579 PARAMETER Experiment Name: At_4deg_Cold_cDNA_P Parameter: Tissue Value: Aerial
  misc_feature: MA Experiment ID: 20000184 Result: Up-regulated in Transcription
  misc_feature: MA Experiment 20000184 PARAMETER Experiment Name: At_Shoots__P Parameter: Age (day) Value: 7
  misc_feature: MA Experiment 20000184 PARAMETER Experiment Name: At_Shoots__P Parameter: Tissue Value: Shoots vs. Whole Plant
  misc_feature: MA Experiment ID: 20000185 Result: Down-regulated in Transcription
  misc_feature: MA Experiment 20000185 PARAMETER Experiment Name: At_Roots__P Parameter: Age (day) Value: 7 vs. 21
  misc_feature: MA Experiment 20000185 PARAMETER Experiment Name: At_Roots__P Parameter: Organism Value: A. thaliana
  misc_feature: MA Experiment 20000185 PARAMETER Experiment Name: At_Roots__P Parameter: Tissue Value: Roots vs. Whole Plant
  misc_feature: MA Experiment ID: 20000214 Result: Up-regulated in Transcription
  misc_feature: MA Experiment 20000214 PARAMETER Experiment Name: At_4deg_Cold_P Parameter: Timepoint (hr) Value: 6
  misc_feature: MA Experiment ID: 20000234 Result: Up-regulated in Transcription
  misc_feature: MA Experiment 20000234 PARAMETER Experiment Name: At_Siliques_P Parameter: Age (day) Value: 21
  misc_feature: MA Experiment 20000234 PARAMETER Experiment Name: At_Siliques_P Parameter: Organism Value: A. thaliana
  misc_feature: MA Experiment 20000234 PARAMETER Experiment Name: At_Siliques_P Parameter: Plant Line Value: WS
  misc_feature: MA Experiment 20000234 PARAMETER Experiment Name: At_Siliques_P Parameter: Tissue Value: Less Than 5mm Siliques vs. Whole Plant
  misc_feature: MA Experiment ID: 20000235 Result: Up-regulated in Transcription
  misc_feature: MA Experiment 20000235 PARAMETER Experiment Name: At_Siliques_P Parameter: Age (day) Value: 21
  misc_feature: MA Experiment 20000235 PARAMETER Experiment Name: At_Siliques_P Parameter: Organism Value: A. thaliana
  misc_feature: MA Experiment 20000235 PARAMETER Experiment Name: At_Siliques_P Parameter: Plant Line Value: WS
  misc_feature: MA Experiment 20000235 PARAMETER Experiment Name: At_Siliques_P Parameter: Tissue Value: 5-10mm Siliques vs. Whole Plant
  misc_feature: MA Experiment ID: 20000264 Result: Up-regulated in Transcription
  misc_feature: MA Experiment 20000264 PARAMETER Experiment Name: At_Open_Flower_P Parameter: Age (day) Value: 21
  misc_feature: MA Experiment 20000264 PARAMETER Experiment Name: At_Open_Flower_P Parameter: Plant Line Value: WS
  misc_feature: MA Experiment 20000264 PARAMETER Experiment Name: At_Open_Flower_P Parameter: Tissue Value: Open Flower vs. Whole Plant
  misc_feature: MA Experiment ID: 20000265 Result: Up-regulated in Transcription
  misc_feature: MA Experiment 20000265 PARAMETER Experiment Name: At_Open_Flower_P Parameter: Age (day) Value: 21
  misc_feature: MA Experiment 20000265 PARAMETER Experiment Name: At_Open_Flower_P Parameter: Plant Line Value: WS
  misc_feature: MA Experiment 20000265 PARAMETER Experiment Name: At_Open_Flower_P Parameter: Tissue Value: Closed Flower vs. Whole Plant
  misc_feature: MA Experiment ID: 20000286 Result: Up-regulated in Transcription
  misc_feature: MA Experiment 20000286 PARAMETER Experiment Name: At_Open_Flower_P Parameter: Age (day) Value: 21
  misc_feature: MA Experiment 20000286 PARAMETER Experiment Name: At_Open_Flower_P Parameter: Plant Line Value: WS
  misc_feature: MA Experiment 20000286 PARAMETER Experiment Name: At_Open_Flower_P Parameter: Tissue Value: Half Open vs. Whole Plant
  misc_feature: MA Experiment ID: 20000438 Result: Up-regulated in Transcription
  misc_feature: MA Experiment 20000438 PARAMETER Experiment Name: At_Shoots__P Parameter: Age (day) Value: 14
  misc_feature: MA Experiment 20000438 PARAMETER Experiment Name: At_Shoots__P Parameter: Tissue Value: Shoots vs. Whole Plant
  misc_feature: MA Experiment ID: 20000439 Result: Down-regulated in Transcription
  misc_feature: MA Experiment 20000439 PARAMETER Experiment Name: At_Roots__P Parameter: Age (day) Value: 14 vs. 21
  misc_feature: MA Experiment 20000439 PARAMETER Experiment Name: At_Roots__P Parameter: Organism Value: A. thaliana
  misc_feature: MA Experiment 20000439 PARAMETER Experiment Name: At_Roots__P Parameter: Tissue Value: Roots vs. Whole Plant
  misc_feature: MA Experiment ID: 20000441 Result: Up-regulated in Transcription
  misc_feature: MA Experiment 20000441 PARAMETER Experiment Name: At_1uM_BR-BRZ__P Parameter: Tissue Value: Shoot Apices
  misc_feature: MA Experiment 20000441 PARAMETER Experiment Name: At_1uM_BR-BRZ__P Parameter: Treatment Value: 1uM BR vs. No Treatment
  misc_feature: MA Experiment ID: 20000451 Result: Up-regulated in Transcription
  misc_feature: MA Experiment 20000451 PARAMETER Experiment Name: At_CS6879_Shoots-Roots_P Parameter: Age (day) Value: 14
  misc_feature: MA Experiment 20000451 PARAMETER Experiment Name: At_CS6879_Shoots-Roots_P Parameter: Organism Value: A. thaliana
  misc_feature: MA Experiment 20000451 PARAMETER Experiment Name: At_CS6879_Shoots-Roots_P Parameter: Plant Line Value: CS6879 vs. WS
  misc_feature: MA Experiment 20000451 PARAMETER Experiment Name: At_CS6879_Shoots-Roots_P Parameter: Tissue Value: Roots
  misc_feature: MA Experiment ID: 20000495 Result: Up-regulated in Transcription
  misc_feature: MA Experiment 20000495 PARAMETER Experiment Name: At_Guard_Cells_P Parameter: Harvest Date Value: 8/2/2002
  misc_feature: MA Experiment 20000495 PARAMETER Experiment Name: At_Guard_Cells_P Parameter: Organism Value: A. thaliana
  misc_feature: MA Experiment 20000495 PARAMETER Experiment Name: At_Guard_Cells_P Parameter: Tissue Value: Guard Cells vs. Leaves
  misc_feature: MA Experiment ID: 20000573 Result: Up-regulated in Transcription
  misc_feature: MA Experiment 20000573 PARAMETER Experiment Name: At_100uM_ABA_Mutants__P Parameter: Organism Value: A. thaliana
  misc_feature: MA Experiment 20000573 PARAMETER Experiment Name: At_100uM_ABA_Mutants__P Parameter: Plant Line Value: CS22 vs. Ler wt
  misc_feature: MA Experiment 20000573 PARAMETER Experiment Name: At_100uM_ABA_Mutants__P Parameter: Timepoint (hr) Value: N/A
  misc_feature: MA Experiment 20000573 PARAMETER Experiment Name: At_100uM_ABA_Mutants__P Parameter: Tissue Value: Whole Plant
  misc_feature: MA Experiment 20000573 PARAMETER Experiment Name: At_100uM_ABA_Mutants__P Parameter: Treatment Value: None
  misc_feature: MA Experiment ID: 20000574 Result: Up-regulated in Transcription
  misc_feature: MA Experiment 20000574 PARAMETER Experiment Name: At_100uM_ABA_Mutants__P Parameter: Organism Value: A. thaliana
  misc_feature: MA Experiment 20000574 PARAMETER Experiment Name: At_100uM_ABA_Mutants__P Parameter: Plant Line Value: CS23 vs. Ler wt
  misc_feature: MA Experiment 20000574 PARAMETER Experiment Name: At_100uM_ABA_Mutants__P Parameter: Timepoint (hr) Value: N/A
  misc_feature: MA Experiment 20000574 PARAMETER Experiment Name: At_100uM_ABA_Mutants__P Parameter: Tissue Value: Whole Plant
  misc_feature: MA Experiment 20000574 PARAMETER Experiment Name: At_100uM_ABA_Mutants__P Parameter: Treatment Value: None
  misc_feature: MA Experiment ID: 20001555 Result: Down-regulated in Transcription
  misc_feature: MA Experiment 20001555 PARAMETER Experiment Name: At_Drought_Soil_Dry_P Parameter: Age (day) Value: 24
  misc_feature: MA Experiment 20001555 PARAMETER Experiment Name: At_Drought_Soil_Dry_P Parameter: Organism Value: A. thaliana
  misc_feature: MA Experiment 20001555 PARAMETER Experiment Name: At_Drought_Soil_Dry_P Parameter: Plant Line Value: WS
  misc_feature: MA Experiment 20001555 PARAMETER Experiment Name: At_Drought_Soil_Dry_P Parameter: Post Timepoint (hr) Value: None
  misc_feature: MA Experiment 20001555 PARAMETER Experiment Name: At_Drought_Soil_Dry_P Parameter: Post-Treatment Value: None
  misc_feature: MA Experiment 20001555 PARAMETER Experiment Name: At_Drought_Soil_Dry_P Parameter: Timepoint (day) Value: 10
  misc_feature: MA Experiment 20001555 PARAMETER Experiment Name: At_Drought_Soil_Dry_P Parameter: Treatment Value: Drought vs. No Drought
  misc_feature: MA Experiment ID: 20001557 Result: Up-regulated in Transcription
  misc_feature: MA Experiment 20001557 PARAMETER Experiment Name: At_Drought_Soil_Dry_P Parameter: Age (day) Value: 27
  misc_feature: MA Experiment 20001557 PARAMETER Experiment Name: At_Drought_Soil_Dry_P Parameter: Organism Value: A. thaliana
  misc_feature: MA Experiment 20001557 PARAMETER Experiment Name: At_Drought_Soil_Dry_P Parameter: Plant Line Value: WS
  misc_feature: MA Experiment 20001557 PARAMETER Experiment Name: At_Drought_Soil_Dry_P Parameter: Post Timepoint (hr) Value: 3
  misc_feature: MA Experiment 20001557 PARAMETER Experiment Name: At_Drought_Soil_Dry_P Parameter: Post-Treatment Value: Re-Water vs. No Drought
  misc_feature: MA Experiment 20001557 PARAMETER Experiment Name: At_Drought_Soil_Dry_P Parameter: Timepoint (day) Value: 13
  misc_feature: MA Experiment 20001557 PARAMETER Experiment Name: At_Drought_Soil_Dry_P Parameter: Treatment Value: Drought vs. No Drought
  misc_feature: MA Experiment ID: 20001558 Result: Up-regulated in Transcription
  misc_feature: MA Experiment 20001558 PARAMETER Experiment Name: At_Drought_Soil_Dry_P Parameter: Age (day) Value: 27
  misc_feature: MA Experiment 20001558 PARAMETER Experiment Name: At_Drought_Soil_Dry_P Parameter: Organism Value: A. thaliana
  misc_feature: MA Experiment 20001558 PARAMETER Experiment Name: At_Drought_Soil_Dry_P Parameter: Plant Line Value: WS
  misc_feature: MA Experiment 20001558 PARAMETER Experiment Name: At_Drought_Soil_Dry_P Parameter: Post Timepoint (hr) Value: 6
  misc_feature: MA Experiment 20001558 PARAMETER Experiment Name: At_Drought_Soil_Dry_P Parameter: Post-Treatment Value: Re-Water vs. No Drought
  misc_feature: MA Experiment 20001558 PARAMETER Experiment Name: At_Drought_Soil_Dry_P Parameter: Timepoint (day) Value: 13
  misc_feature: MA Experiment 20001558 PARAMETER Experiment Name: At_Drought_Soil_Dry_P Parameter: Treatment Value: Drought vs. No Drought
  misc_feature: MA Experiment ID: 20001560 Result: Up-regulated in Transcription
  misc_feature: MA Experiment 20001560 PARAMETER Experiment Name: At_Drought_Soil_Dry_P Parameter: Age (day) Value: 28
  misc_feature: MA Experiment 20001560 PARAMETER Experiment Name: At_Drought_Soil_Dry_P Parameter: Organism Value: A. thaliana
  misc_feature: MA Experiment 20001560 PARAMETER Experiment Name: At_Drought_Soil_Dry_P Parameter: Plant Line Value: WS
  misc_feature: MA Experiment 20001560 PARAMETER Experiment Name: At_Drought_Soil_Dry_P Parameter: Post Timepoint (hr) Value: None
  misc_feature: MA Experiment 20001560 PARAMETER Experiment Name: At_Drought_Soil_Dry_P Parameter: Post-Treatment Value: None
  misc_feature: MA Experiment 20001560 PARAMETER Experiment Name: At_Drought_Soil_Dry_P Parameter: Timepoint (day) Value: 14
  misc_feature: MA Experiment 20001560 PARAMETER Experiment Name: At_Drought_Soil_Dry_P Parameter: Treatment Value: Drought vs. No Drought
  misc_feature: MA Experiment ID: 20001904 Result: Down-regulated in Transcription
  misc_feature: MA Experiment 20001904 PARAMETER Experiment Name: At_Drought_Reproduction_P Parameter: Age (day) Value: 37
  misc_feature: MA Experiment 20001904 PARAMETER Experiment Name: At_Drought_Reproduction_P Parameter: Organism Value: A. thaliana
  misc_feature: MA Experiment 20001904 PARAMETER Experiment Name: At_Drought_Reproduction_P Parameter: Plant Line Value: WS
  misc_feature: MA Experiment 20001904 PARAMETER Experiment Name: At_Drought_Reproduction_P Parameter: Timepoint (day) Value: 7
  misc_feature: MA Experiment 20001904 PARAMETER Experiment Name: At_Drought_Reproduction_P Parameter: Tissue Value: Rosettes
  misc_feature: MA Experiment 20001904 PARAMETER Experiment Name: At_Drought_Reproduction_P Parameter: Treatment Value: Drought vs. No Drought
  misc_feature: MA Experiment ID: 20001905 Result: Down-regulated in Transcription
  misc_feature: MA Experiment 20001905 PARAMETER Experiment Name: At_Drought_Reproduction_P Parameter: Age (day) Value: 40
  misc_feature: MA Experiment 20001905 PARAMETER Experiment Name: At_Drought_Reproduction_P Parameter: Organism Value: A. thaliana
  misc_feature: MA Experiment 20001905 PARAMETER Experiment Name: At_Drought_Reproduction_P Parameter: Plant Line Value: WS
  misc_feature: MA Experiment 20001905 PARAMETER Experiment Name: At_Drought_Reproduction_P Parameter: Timepoint (day) Value: 10
  misc_feature: MA Experiment 20001905 PARAMETER Experiment Name: At_Drought_Reproduction_P Parameter: Tissue Value: Rosettes
  misc_feature: MA Experiment 20001905 PARAMETER Experiment Name: At_Drought_Reproduction_P Parameter: Treatment Value: Drought vs. No Drought
  misc_feature: MA Experiment ID: 20001906 Result: Down-regulated in Transcription
  misc_feature: MA Experiment 20001906 PARAMETER Experiment Name: At_Drought_Reproduction_P Parameter: Age (day) Value: 35
  misc_feature: MA Experiment 20001906 PARAMETER Experiment Name: At_Drought_Reproduction_P Parameter: Organism Value: A. thaliana
  misc_feature: MA Experiment 20001906 PARAMETER Experiment Name: At_Drought_Reproduction_P Parameter: Plant Line Value: WS
  misc_feature: MA Experiment 20001906 PARAMETER Experiment Name: At_Drought_Reproduction_P Parameter: Timepoint (day) Value: 5
  misc_feature: MA Experiment 20001906 PARAMETER Experiment Name: At_Drought_Reproduction_P Parameter: Tissue Value: Siliques
  misc_feature: MA Experiment 20001906 PARAMETER Experiment Name: At_Drought_Reproduction_P Parameter: Treatment Value: Drought vs. No Drought
gaaacccaaaccctcattccaaaaaatggggtctcgctctcaaaacctctcctttctcgtcctcctcctccttggcttcgttgccgtctcctatgcttgcgactgtacccctcctaaaccatcaccagcacctcacaaaccaccaaaacatccagtcaaaccgcctaaacctcctgccgtcaaaccacctaaaccaccggcagtaaaaccacctactccaaaacctcccaccgtgaaaccccatcctaaaccaccaaccaaacctcacccccacccaaaacctcccatcgtaaagccaccaaccaagcctcctccgtccacccctaaacctcccaccaaacctcccccgtccacacctaaacctcccacgaccaagcctcctccgtctactccgaaaccaccccaccacaagcctccgcctacaccatgcccaccaccaacaccaacgccgactccaccagttgtaacaccgccaacaccaaccccacccgtcataactccaccaacaccaaccccacccgtcgtaacaccgccaacgccaactccacccgtcattacaccaccaacaccaactccacccgtcattacaccaccaacaccaacaccacccgtcgtgacacctccaacaccaacaccacccgtagtaacaccaccaacaccaactcctcctacgcctattccagagacttgcccaattgacacgctgaagctaggcgcttgtgtggacgttcttggaggtttgattcacatcggacttggaaaaagccacgccaaggcagaatgttgtccggttttaggaggtttacttgacctagacgcagccgtttgtctatgtaccaccattaagctcaaacttctcaacatcgaccttgttctccccattgctcttgagcttcttctcgactgtggaaaaactccaccatctgacttcaaatgtcccgcttaatcgatgtagaacgttgagagtctctggacgactccaaaagtttcgtttcttcaagaaatttgttagtttcatgatctatttggtaatgggaggttaatctgcatatgtgcgacctttagttacatgtttcatttgatacaataaaaggcgttgtaatttgggtttgagatttcaatttctttgggctttcttgttatgttgtactttt

SEQ ID NO: 84353 - protein, 314 aa, Arabidopsis thaliana
  peptide (1)..(314): Ceres Seq. ID no. 12674767
  misc_feature (230)..(312): Pfam Name: Protease inhibitor/seed storage/LTP family Pfam Description: Protease inhibitor/seed storage/LTP family
  misc_feature (9)..(314): Homolog of NCBI NO: 25453525 NR Description: cell wall-plasma membrane linker protein homolog
  misc_feature (37)..(314): Homolog of NCBI NO: 11994732 NR Description: contains similarity to cell wall-plasma membrane
  misc_feature (37)..(314): Homolog of NCBI NO: 15233282 NR Description: unknown protein; protein id: At3g22120.1
  misc_feature (37)..(314): Homolog of NCBI NO: 7446482 NR Description: probable cell wall-plasma membrane linker protein
  misc_feature (1)..(299): Homolog of NCBI NO: 15233282 NR Description: unknown protein; protein id: At3g22120.1
  misc_feature (9)..(299): Homolog of NCBI NO: 11994732 NR Description: contains similarity to cell wall-plasma membrane
  misc_feature (9)..(234): Homolog of NCBI NO: 7446482 NR Description: probable cell wall-plasma membrane linker protein
  misc_feature (36)..(314): Homolog of NCBI NO: 19521 NR Description: proline rich protein [Lycopersicon esculentum]
  misc_feature (37)..(314): Homolog of NCBI NO: 1709767 NR Description: 36.4 KD PROLINE-RICH PROTEIN
  misc_feature (35)..(314): Homolog of NCBI NO: 1076501 NR Description: cell wall protein - alfalfa
KPKPSFQKMGSRSQNLSFLVLLLLGFVAVSYACDCTPPKPSPAPHKPPKHPVKPPKPPAVKPPKPPAVKPPTPKPPTVKPHPKPPTKPHPHPKPPIVKPPTKPPPSTPKPPTKPPPSTPKPPTTKPPPSTPKPPHHKPPPTPCPPPTPTPTPPVVTPPTPTPPVITPPTPTPPVVTPPTPTPPVITPPTPTPPVITPPTPTPPVVTPPTPTPPVVTPPTPTPPTPIPETCPIDTLKLGACVDVLGGLIHIGLGKSHAKAECCPVLGGLLDLDAAVCLCTTIKLKLLNIDLVLPIALELLLDCGKTPPSDFKCPA

SEQ ID NO: 84354 - protein, 306 aa, Arabidopsis thaliana
  peptide (1)..(306): Ceres Seq. ID no. 12674768
  misc_feature (222)..(304): Pfam Name: Protease inhibitor/seed storage/LTP family Pfam Description: Protease inhibitor/seed storage/LTP family
  misc_feature (1)..(306): Homolog of NCBI NO: 25453525 NR Description: cell wall-plasma membrane linker protein homolog
  misc_feature (29)..(306): Homolog of NCBI NO: 11994732 NR Description: contains similarity to cell wall-plasma membrane
  misc_feature (29)..(306): Homolog of NCBI NO: 15233282 NR Description: unknown protein; protein id: At3g22120.1
  misc_feature (29)..(306): Homolog of NCBI NO: 7446482 NR Description: probable cell wall-plasma membrane linker protein
  misc_feature (1)..(291): Homolog of NCBI NO: 15233282 NR Description: unknown protein; protein id: At3g22120.1
  misc_feature (1)..(291): Homolog of NCBI NO: 11994732 NR Description: contains similarity to cell wall-plasma membrane
  misc_feature (1)..(226): Homolog of NCBI NO: 7446482 NR Description: probable cell wall-plasma membrane linker protein
  misc_feature (28)..(306): Homolog of NCBI NO: 19521 NR Description: proline rich protein [Lycopersicon esculentum]
  misc_feature (29)..(306): Homolog of NCBI NO: 1709767 NR Description: 36.4 KD PROLINE-RICH PROTEIN
  misc_feature (27)..(306): Homolog of NCBI NO: 1076501 NR Description: cell wall protein - alfalfa
MGSRSQNLSFLVLLLLGFVAVSYACDCTPPKPSPAPHKPPKHPVKPPKPPAVKPPKPPAVKPPTPKPPTVKPHPKPPTKPHPHPKPPIVKPPTKPPPSTPKPPTKPPPSTPKPPTTKPPPSTPKPPHHKPPPTPCPPPTPTPTPPVVTPPTPTPPVITPPTPTPPVVTPPTPTPPVITPPTPTPPVITPPTPTPPVVTPPTPTPPVVTPPTPTPPTPIPETCPIDTLKLGACVDVLGGLIHIGLGKSHAKAECCPVLGGLLDLDAAVCLCTTIKLKLLNIDLVLPIALELLLDCGKTPPSDFKCPA

SEQ ID NO: 84355 - DNA, 1363 bp, Arabidopsis thaliana
  misc_feature (1)..(1363): Ceres Seq. ID no. 12674785
  misc_feature: MA Experiment ID: 108434 Result: Down-regulated in Transcription
  misc_feature: MA Experiment 108434 PARAMETER Experiment Name: At_Root_Tips_cDNA_P Parameter: Tissue Value: Root Tips
  misc_feature: MA Experiment ID: 108461 Result: Down-regulated in Transcription
  misc_feature: MA Experiment 108461 PARAMETER Experiment Name: At_Germinating_Seeds_cDNA_P Parameter: Age (day) Value: 1 vs. 0
  misc_feature: MA Experiment 108461 PARAMETER Experiment Name: At_Germinating_Seeds_cDNA_P Parameter: Tissue Value: Germinating Seeds
  misc_feature: MA Experiment ID: 108462 Result: Up-regulated in Transcription
  misc_feature: MA Experiment 108462 PARAMETER Experiment Name: At_Germinating_Seeds_cDNA_P Parameter: Age (day) Value: 2 vs. 0
  misc_feature: MA Experiment 108462 PARAMETER Experiment Name: At_Germinating_Seeds_cDNA_P Parameter: Tissue Value: Germinating Seeds
  misc_feature: MA Experiment ID: 108463 Result: Up-regulated in Transcription
  misc_feature: MA Experiment 108463 PARAMETER Experiment Name: At_Germinating_Seeds_cDNA_P Parameter: Age (day) Value: 3 vs. 0
  misc_feature: MA Experiment 108463 PARAMETER Experiment Name: At_Germinating_Seeds_cDNA_P Parameter: Tissue Value: Germinating Seeds
  misc_feature: MA Experiment ID: 108464 Result: Up-regulated in Transcription
  misc_feature: MA Experiment 108464 PARAMETER Experiment Name: At_Germinating_Seeds_cDNA_P Parameter: Age (day) Value: 4 vs. 0
  misc_feature: MA Experiment 108464 PARAMETER Experiment Name: At_Germinating_Seeds_cDNA_P Parameter: Tissue Value: Germinating Seeds
  misc_feature: MA Experiment ID: 108488 Result: Down-regulated in Transcription
  misc_feature: MA Experiment ID: 108501 Result: Down-regulated in Transcription
  misc_feature: MA Experiment 108501 PARAMETER Experiment Name: At_ap2_floral_buds_cDNA_P Parameter: Plant Line Value: ap2 (Ler.)
  misc_feature: MA Experiment 108501 PARAMETER Experiment Name: At_ap2_floral_buds_cDNA_P Parameter: Tissue Value: Closed Flower
  misc_feature: MA Experiment ID: 108569 Result: Up-regulated in Transcription
  misc_feature: MA Experiment 108569 PARAMETER Experiment Name: At_0.001%_MeJA__cDNA_P Parameter: Timepoint (hr) Value: 6
  misc_feature: MA Experiment 108569 PARAMETER Experiment Name: At_0.001%_MeJA__cDNA_P Parameter: Tissue Value: Aerial
  misc_feature: MA Experiment 108569 PARAMETER Experiment Name: At_0.001%_MeJA__cDNA_P Parameter: Treatment Value: 0.001% MeJA vs. No Treatment
  misc_feature: MA Experiment ID: 108573 Result: Up-regulated in Transcription
  misc_feature: MA Experiment 108573 PARAMETER Experiment Name: At_Drought_cDNA_P Parameter: Timepoint (hr) Value: 6
  misc_feature: MA Experiment 108573 PARAMETER Experiment Name: At_Drought_cDNA_P Parameter: Tissue Value: Aerial
  misc_feature: MA Experiment 108573 PARAMETER Experiment Name: At_Drought_cDNA_P Parameter: Treatment Value: Drought vs. No Drought
  misc_feature: MA Experiment ID: 108577 Result: Up-regulated in Transcription
  misc_feature: MA Experiment 108577 PARAMETER Experiment Name: At_42deg_Heat_cDNA_P Parameter: Temperature (deg C) Value: 42 vs. 22
  misc_feature: MA Experiment 108577 PARAMETER Experiment Name: At_42deg_Heat_cDNA_P Parameter: Timepoint (hr) Value: 6
  misc_feature: MA Experiment 108577 PARAMETER Experiment Name: At_42deg_Heat_cDNA_P Parameter: Tissue Value: Aerial
  misc_feature: MA Experiment ID: 108594 Result: Down-regulated in Transcription
  misc_feature: MA Experiment 108594 PARAMETER Experiment Name: At_Ler-rhl_Root_cDNA_P Parameter: Plant Line Value: null
  misc_feature: MA Experiment ID: 108595 Result: Up-regulated in Transcription
  misc_feature: MA Experiment 108595 PARAMETER Experiment Name: At_Ler-pi_Ovule_cDNA_P Parameter: Plant Line Value: null
  misc_feature: MA Experiment ID: 108609 Result: Up-regulated in Transcription
  misc_feature: MA Experiment 108609 PARAMETER Experiment Name: At_100uM_ABA_cDNA_P Parameter: Timepoint (hr) Value: 24
  misc_feature: MA Experiment 108609 PARAMETER Experiment Name: At_100uM_ABA_cDNA_P Parameter: Tissue Value: Aerial
  misc_feature: MA Experiment 108609 PARAMETER Experiment Name: At_100uM_ABA_cDNA_P Parameter: Treatment Value: 100uM ABA vs. No Treatment
  misc_feature: MA Experiment ID: 20000069 Result: Up-regulated in Transcription
  misc_feature: MA Experiment 20000069 PARAMETER Experiment Name: At_100uM_ABA_Mutants_cDNA_P Parameter: Plant Line Value: CS23
  misc_feature: MA Experiment 20000069 PARAMETER Experiment Name: At_100uM_ABA_Mutants_cDNA_P Parameter: Timepoint (hr) Value: 6
  misc_feature: MA Experiment 20000069 PARAMETER Experiment Name: At_100uM_ABA_Mutants_cDNA_P Parameter: Tissue Value: Aerial
  misc_feature: MA Experiment 20000069 PARAMETER Experiment Name: At_100uM_ABA_Mutants_cDNA_P Parameter: Treatment Value: 100uM ABA vs. No Treatment
  misc_feature: MA Experiment ID: 20000070 Result: Up-regulated in Transcription
  misc_feature: MA Experiment 20000070 PARAMETER Experiment Name: At_100uM_ABA_Mutants_cDNA_P Parameter: Plant Line Value: CS24
  misc_feature: MA Experiment 20000070 PARAMETER Experiment Name: At_100uM_ABA_Mutants_cDNA_P Parameter: Timepoint (hr) Value: 6
  misc_feature: MA Experiment 20000070 PARAMETER Experiment Name: At_100uM_ABA_Mutants_cDNA_P Parameter: Tissue Value: Aerial
  misc_feature: MA Experiment 20000070 PARAMETER Experiment Name: At_100uM_ABA_Mutants_cDNA_P Parameter: Treatment Value: 100uM ABA vs. No Treatment
  misc_feature: MA Experiment ID: 20000071 Result: Up-regulated in Transcription
  misc_feature: MA Experiment 20000071 PARAMETER Experiment Name: At_100uM_ABA_Mutants_cDNA_P Parameter: Plant Line Value: CS8104
  misc_feature: MA Experiment 20000071 PARAMETER Experiment Name: At_100uM_ABA_Mutants_cDNA_P Parameter: Timepoint (hr) Value: 6
  misc_feature: MA Experiment 20000071 PARAMETER Experiment Name: At_100uM_ABA_Mutants_cDNA_P Parameter: Tissue Value: Aerial
  misc_feature: MA Experiment 20000071 PARAMETER Experiment Name: At_100uM_ABA_Mutants_cDNA_P Parameter: Treatment Value: 100uM ABA vs. No Treatment
  misc_feature: MA Experiment ID: 20000072 Result: Up-regulated in Transcription
  misc_feature: MA Experiment 20000072 PARAMETER Experiment Name: At_100uM_ABA_Mutants_cDNA_P Parameter: Plant Line Value: CS8105
  misc_feature: MA Experiment 20000072 PARAMETER Experiment Name: At_100uM_ABA_Mutants_cDNA_P Parameter: Timepoint (hr) Value: 6
  misc_feature: MA Experiment 20000072 PARAMETER Experiment Name: At_100uM_ABA_Mutants_cDNA_P Parameter: Tissue Value: Aerial
  misc_feature: MA Experiment 20000072 PARAMETER Experiment Name: At_100uM_ABA_Mutants_cDNA_P Parameter: Treatment Value: 100uM ABA vs. No Treatment
  misc_feature: MA Experiment ID: 20000086 Result: Up-regulated in Transcription
  misc_feature: MA Experiment 20000086 PARAMETER Experiment Name: At_100uM_ABA_Mutants_cDNA_P Parameter: Plant Line Value: CS22
  misc_feature: MA Experiment 20000086 PARAMETER Experiment Name: At_100uM_ABA_Mutants_cDNA_P Parameter: Timepoint (hr) Value: 6
  misc_feature: MA Experiment 20000086 PARAMETER Experiment Name: At_100uM_ABA_Mutants_cDNA_P Parameter: Tissue Value: Aerial
  misc_feature: MA Experiment 20000086 PARAMETER Experiment Name: At_100uM_ABA_Mutants_cDNA_P Parameter: Treatment Value: 100uM ABA vs. No Treatment
  misc_feature: MA Experiment ID: 20000087 Result: Up-regulated in Transcription
  misc_feature: MA Experiment 20000087 PARAMETER Experiment Name: At_100uM_ABA_Mutants_cDNA_P Parameter: Plant Line Value: WS
  misc_feature: MA Experiment 20000087 PARAMETER Experiment Name: At_100uM_ABA_Mutants_cDNA_P Parameter: Timepoint (hr) Value: 6
  misc_feature: MA Experiment 20000087 PARAMETER Experiment Name: At_100uM_ABA_Mutants_cDNA_P Parameter: Tissue Value: Aerial
  misc_feature: MA Experiment 20000087 PARAMETER Experiment Name: At_100uM_ABA_Mutants_cDNA_P Parameter: Treatment Value: 100uM ABA vs. No Treatment
  misc_feature: MA Experiment ID: 20000088 Result: Up-regulated in Transcription
  misc_feature: MA Experiment 20000088 PARAMETER Experiment Name: At_100uM_ABA_Mutants_cDNA_P Parameter: Plant Line Value: Landsberg
  misc_feature: MA Experiment 20000088 PARAMETER Experiment Name: At_100uM_ABA_Mutants_cDNA_P Parameter: Timepoint (hr) Value: 6
  misc_feature: MA Experiment 20000088 PARAMETER Experiment Name: At_100uM_ABA_Mutants_cDNA_P Parameter: Tissue Value: Aerial
  misc_feature: MA Experiment 20000088 PARAMETER Experiment Name: At_100uM_ABA_Mutants_cDNA_P Parameter: Treatment Value: 100uM ABA vs. No Treatment
  misc_feature: MA Experiment ID: 20000112 Result: Up-regulated in Transcription
  misc_feature: MA Experiment 20000112 PARAMETER Experiment Name: At_42deg_Heat_cDNA_P Parameter: Temperature (deg C) Value: 42 vs. 22
  misc_feature: MA Experiment 20000112 PARAMETER Experiment Name: At_42deg_Heat_cDNA_P Parameter: Timepoint (hr) Value: 2
  misc_feature: MA Experiment 20000112 PARAMETER Experiment Name: At_42deg_Heat_cDNA_P Parameter: Tissue Value: Aerial
  misc_feature: MA Experiment ID: 20000113 Result: Up-regulated in Transcription
  misc_feature: MA Experiment 20000113 PARAMETER Experiment Name: At_42deg_Heat_cDNA_P Parameter: Temperature (deg C) Value: 42 vs. 22
  misc_feature: MA Experiment 20000113 PARAMETER Experiment Name: At_42deg_Heat_cDNA_P Parameter: Timepoint (hr) Value: 8
  misc_feature: MA Experiment 20000113 PARAMETER Experiment Name: At_42deg_Heat_cDNA_P Parameter: Tissue Value: Aerial
  misc_feature: MA Experiment ID: 20000117 Result: Up-regulated in Transcription
  misc_feature: MA Experiment 20000117 PARAMETER Experiment Name: At_100uM_ABA_Mutants_cDNA_P Parameter: Plant Line Value: Columbia
  misc_feature: MA Experiment 20000117 PARAMETER Experiment Name: At_100uM_ABA_Mutants_cDNA_P Parameter: Timepoint (hr) Value: 6
  misc_feature: MA Experiment 20000117 PARAMETER Experiment Name: At_100uM_ABA_Mutants_cDNA_P Parameter: Tissue Value: Aerial
  misc_feature: MA Experiment 20000117 PARAMETER Experiment Name: At_100uM_ABA_Mutants_cDNA_P Parameter: Treatment Value: 100uM ABA vs. No Treatment
  misc_feature: MA Experiment ID: 20000306 Result: Down-regulated in Transcription
  misc_feature: MA Experiment 20000306 PARAMETER Experiment Name: At_Germinating_Seeds_Sub_P Parameter: Age (hr) Value: 6 vs. 0
  misc_feature: MA Experiment 20000306 PARAMETER Experiment Name: At_Germinating_Seeds_Sub_P Parameter: Organism Value: A. thaliana
  misc_feature: MA Experiment 20000306 PARAMETER Experiment Name: At_Germinating_Seeds_Sub_P Parameter: Plant Line Value: WS
  misc_feature: MA Experiment 20000306 PARAMETER Experiment Name: At_Germinating_Seeds_Sub_P Parameter: Tissue Value: Germinating Seeds
  misc_feature: MA Experiment ID: 20000307 Result: Down-regulated in Transcription
  misc_feature: MA Experiment 20000307 PARAMETER Experiment Name: At_Germinating_Seeds_Sub_P Parameter: Age (hr) Value: 24 vs. 0
  misc_feature: MA Experiment 20000307 PARAMETER Experiment Name: At_Germinating_Seeds_Sub_P Parameter: Organism Value: A. thaliana
  misc_feature: MA Experiment 20000307 PARAMETER Experiment Name: At_Germinating_Seeds_Sub_P Parameter: Plant Line Value: WS
  misc_feature: MA Experiment 20000307 PARAMETER Experiment Name: At_Germinating_Seeds_Sub_P Parameter: Tissue Value: Germinating Seeds
  misc_feature: MA Experiment ID: 20000329 Result: Up-regulated in Transcription
  misc_feature: MA Experiment 20000329 PARAMETER Experiment Name: At_4deg_Cold_Sub_P Parameter: Age (day) Value: 14
  misc_feature: MA Experiment 20000329 PARAMETER Experiment Name: At_4deg_Cold_Sub_P Parameter: Organism Value: A. thaliana
  misc_feature: MA Experiment 20000329 PARAMETER Experiment Name: At_4deg_Cold_Sub_P Parameter: Plant Line Value: WS
  misc_feature: MA Experiment 20000329 PARAMETER Experiment Name: At_4deg_Cold_Sub_P Parameter: Temperature (deg C) Value: 4 vs. 22
  misc_feature: MA Experiment 20000329 PARAMETER Experiment Name: At_4deg_Cold_Sub_P Parameter: Timepoint (hr) Value: 6
  misc_feature: MA Experiment 20000329 PARAMETER Experiment Name: At_4deg_Cold_Sub_P Parameter: Tissue Value: Aerial
  misc_feature: MA Experiment ID: 20000332 Result: Up-regulated in Transcription
  misc_feature: MA Experiment 20000332 PARAMETER Experiment Name: At_4deg_Cold_Sub_P Parameter: Age (day) Value: 14
  misc_feature: MA Experiment 20000332 PARAMETER Experiment Name: At_4deg_Cold_Sub_P Parameter: Organism Value: A. thaliana
  misc_feature: MA Experiment 20000332 PARAMETER Experiment Name: At_4deg_Cold_Sub_P Parameter: Plant Line Value: WS
  misc_feature: MA Experiment 20000332 PARAMETER Experiment Name: At_4deg_Cold_Sub_P Parameter: Temperature (deg C) Value: 4 vs. 22
  misc_feature: MA Experiment 20000332 PARAMETER Experiment Name: At_4deg_Cold_Sub_P Parameter: Timepoint (hr) Value: 2
  misc_feature: MA Experiment 20000332 PARAMETER Experiment Name: At_4deg_Cold_Sub_P Parameter: Tissue Value: Aerial
  misc_feature: MA Experiment ID: 20000355 Result: Down-regulated in Transcription
  misc_feature: MA Experiment 20000355 PARAMETER Experiment Name: At_Siliques_Sub_P Parameter: Age (day) Value: 21
  misc_feature: MA Experiment 20000355 PARAMETER Experiment Name: At_Siliques_Sub_P Parameter: Organism Value: A. thaliana
  misc_feature: MA Experiment 20000355 PARAMETER Experiment Name: At_Siliques_Sub_P Parameter: Plant Line Value: WS
  misc_feature: MA Experiment 20000355 PARAMETER Experiment Name: At_Siliques_Sub_P Parameter: Tissue Value: Less Than 5mm Siliques vs. Whole Plant
  misc_feature: MA Experiment ID: 20000440 Result: Down-regulated in Transcription
  misc_feature: MA Experiment 20000440 PARAMETER Experiment Name: At_Closed-Flower__Sub_P Parameter: Tissue Value: Closed Flower vs. Whole Plant
aaagagttctcctacaattttcctaaattcttggatttgagatttcactttttccgatttgaaacaatgatgataactcgcggtggagccaaggcggcgaaatcgctgttagtggcggctggaccacgtttgttctcgacggtccgtacggtttcgtctcacgaggctttatcagcaagccatattttgaagcctggtgttacatctgcttggatatggactagagctccgacgattggaggtatgagattcgctagcacgatcactctgggagagaaaactccgatgaaggaggaggacgcgaatcagaagaaaacagagaacgaatccaccggtggagacgccgccggaggtaataacaagggagataaaggaatcgcgagctattggggtgttgaacctaataagattactaaagaagatggttctgaatggaagtggaactgtttcaggccatgggaaacgtataaagctgatataacgatagatctgaagaagcatcatgttccaacgacgtttcttgatagaatagcttattggactgttaaatctcttcgttggcctaccgatttgttcttccagaggagatatggatgtcgagctatgatgcttgaaactgtagcagcagtacctggaatggttggaggaatgttactacactgcaaatcgcttcgacgttttgagcaaagtggaggatggattaaggctcttcttgaggaagcagagaatgagagaatgcatcttatgacattcatggaagtcgcgaaaccgaaatggtacgagagagcgctcgtgatcactgtgcaaggagtcttcttcaacgcttatttccttggttacttaatctctcccaagtttgctcatcgtatggttgggtaccttgaagaagaagcgatccattcttatactgagtttctcaaggaacttgacaaaggtaacattgagaatgttcctgctccggctattgctattgattactggaggcttcctgctgatgcgacacttcgtgatgttgtgatggttgttcgtgctgacgaggctcatcaccgtgatgtaaaccattttgcatctgatattcactaccaaggtcgtgaactaaaggaagctccagctccaattgggtatcattgattcgattaaaagaagagctttttctcaagtttaaaactttgttctaaagaatttaagttctttgacttgtatatacatcatcacctctgcttaagccatacttggattcggctttctttgaatgttgctacgaatgttctgatttcttctttacttttcctgtcaatgggcttttgggcttatcttttgctattgtatggccttgctatttagaatgagagtaatagtttgt

SEQ ID NO: 84356 - protein, 376 aa, Arabidopsis thaliana
  peptide (1)..(376): Ceres Seq. ID no. 12674786
  misc_feature (97)..(374): Pfam Name: Alternative oxidase Pfam Description: Alternative oxidase
  misc_feature (23)..(376): Homolog of NCBI NO: 15228734 NR Description: alternative oxidase 1a precursor; protein id: supported by cDNA: 116257., supported by cDNA: gi_13877806, by cDNA: gi_16323479 [Arabidopsis thaliana]
  misc_feature (23)..(376): Homolog of NCBI NO: 11278947 NR Description: alternative respiratory pathway oxidase (EC
  misc_feature (74)..(376): Homolog of NCBI NO: 421824 NR Description: alternative respiratory pathway oxidase (EC
  misc_feature (90)..(376): Homolog of NCBI NO: 1872517 NR Description: alternative oxidase [Arabidopsis thaliana]
  misc_feature (23)..(376): Homolog of NCBI NO: 6634501 NR Description: alternative oxidase [Populus tremula x Populus
  misc_feature (56)..(376): Homolog of NCBI NO: 15228729 NR Description: alternative oxidase 1b precursor; protein id: [Arabidopsis thaliana] >gi|3913143|sp|O23913|AX1B_ARATH oxidase 1b, mitochondrial precursor >gi|2506082|dbj|BAA22624.1|
  misc_feature (24)..(376): Homolog of NCBI NO: 3023316 NR Description: Alternative oxidase 1, mitochondrial precursor
  misc_feature (52)..(376): Homolog of NCBI NO: 15232222 NR Description: alternative oxidase 1c precursor; protein id: [Arabidopsis thaliana] >gi|3913142|sp|O22048|AX1C_ARATH oxidase 1c, mitochondrial precursor >gi|2506049|dbj|BAA22635.1|
  misc_feature (72)..(376): Homolog of NCBI NO: 3913066 NR Description: Alternative oxidase 2, mitochondrial precursor
  misc_feature (24)..(376): Homolog of NCBI NO: 29465622 NR Description: alternative oxidase 1a [Lycopersicon esculentum]
KEFSYNFPKFLDLRFHFFRFETMMITRGGAKAAKSLLVAAGPRLFSTVRTVSSHEALSASHILKPGVTSAWIWTRAPTIGGMRFASTITLGEKTPMKEEDANQKKTENESTGGDAAGGNNKGDKGIASYWGVEPNKITKEDGSEWKWNCFRPWETYKADITIDLKKHHVPTTFLDRIAYWTVKSLRWPTDLFFQRRYGCRAMMLETVAAVPGMVGGMLLHCKSLRRFEQSGGWIKALLEEAENERMHLMTFMEVAKPKWYERALVITVQGVFFNAYFLGYLISPKFAHRMVGYLEEEAIHSYTEFLKELDKGNIENVPAPAIAIDYWRLPADATLRDVVMVVRADEAHHRDVNHFASDIHYQGRELKEAPAPIGYH

SEQ ID NO: 84357 - protein, 354 aa, Arabidopsis thaliana; identical to SEQ ID NO: 40785
  peptide (1)..(354): Ceres Seq. ID no. 12674787
  misc_feature (75)..(352): Pfam Name: Alternative oxidase Pfam Description: Alternative oxidase
  misc_feature (1)..(354): Homolog of NCBI NO: 15228734 NR Description: alternative oxidase 1a precursor; protein id: supported by cDNA: 116257., supported by cDNA: gi_13877806, by cDNA: gi_16323479 [Arabidopsis thaliana]
  misc_feature (1)..(354): Homolog of NCBI NO: 11278947 NR Description: alternative respiratory pathway oxidase (EC
  misc_feature (52)..(354): Homolog of NCBI NO: 421824 NR Description: alternative respiratory pathway oxidase (EC
  misc_feature (68)..(354): Homolog of NCBI NO: 1872517 NR Description: alternative oxidase [Arabidopsis thaliana]
  misc_feature (1)..(354): Homolog of NCBI NO: 6634501 NR Description: alternative oxidase [Populus tremula x Populus
  misc_feature (34)..(354): Homolog of NCBI NO: 15228729 NR Description: alternative oxidase 1b precursor; protein id: [Arabidopsis thaliana] >gi|3913143|sp|O23913|AX1B_ARATH oxidase 1b, mitochondrial precursor >gi|2506082|dbj|BAA22624.1|
  misc_feature (2)..(354): Homolog of NCBI NO: 3023316 NR Description: Alternative oxidase 1, mitochondrial precursor
  misc_feature (30)..(354): Homolog of NCBI NO: 15232222 NR Description: alternative oxidase 1c precursor; protein id: [Arabidopsis thaliana] >gi|3913142|sp|O22048|AX1C_ARATH oxidase 1c, mitochondrial precursor >gi|2506049|dbj|BAA22635.1|
  misc_feature (50)..(354): Homolog of NCBI NO: 3913066 NR Description: Alternative oxidase 2, mitochondrial precursor
  misc_feature (2)..(354): Homolog of NCBI NO: 29465622 NR Description: alternative oxidase 1a [Lycopersicon esculentum]

SEQ ID NO: 84358 - protein, 353 aa, Arabidopsis thaliana; identical to SEQ ID NO: 40786
  peptide (1)..(353): Ceres Seq. ID no. 12674788
  misc_feature (74)..(351): Pfam Name: Alternative oxidase Pfam Description: Alternative oxidase
  misc_feature (1)..(353): Homolog of NCBI NO: 15228734 NR Description: alternative oxidase 1a precursor; protein id: supported by cDNA: 116257., supported by cDNA: gi_13877806, by cDNA: gi_16323479 [Arabidopsis thaliana]
  misc_feature (1)..(353): Homolog of NCBI NO: 11278947 NR Description: alternative respiratory pathway oxidase (EC
  misc_feature (51)..(353): Homolog of NCBI NO: 421824 NR Description: alternative respiratory pathway oxidase (EC
  misc_feature (67)..(353): Homolog of NCBI NO: 1872517 NR Description: alternative oxidase [Arabidopsis thaliana]
  misc_feature (1)..(353): Homolog of NCBI NO: 6634501 NR Description: alternative oxidase [Populus tremula x Populus
  misc_feature (33)..(353): Homolog of NCBI NO: 15228729 NR Description: alternative oxidase 1b precursor; protein id: [Arabidopsis thaliana] >gi|3913143|sp|O23913|AX1B_ARATH oxidase 1b, mitochondrial precursor >gi|2506082|dbj|BAA22624.1|
  misc_feature (1)..(353): Homolog of NCBI NO: 3023316 NR Description: Alternative oxidase 1, mitochondrial precursor
  misc_feature (29)..(353): Homolog of NCBI NO: 15232222 NR Description: alternative oxidase 1c precursor; protein id: [Arabidopsis thaliana] >gi|3913142|sp|O22048|AX1C_ARATH oxidase 1c, mitochondrial precursor >gi|2506049|dbj|BAA22635.1|
  misc_feature (49)..(353): Homolog of NCBI NO: 3913066 NR Description: Alternative oxidase 2, mitochondrial precursor
  misc_feature (1)..(353): Homolog of NCBI NO: 29465622 NR Description: alternative oxidase 1a [Lycopersicon esculentum]

SEQ ID NO: 84359 - DNA, 1350 bp, Arabidopsis thaliana
  misc_feature (1)..(1350): Ceres Seq. ID no. 12674797
  misc_feature: MA Experiment ID: 20000306 Result: Up-regulated in Transcription
  misc_feature: MA Experiment 20000306 PARAMETER Experiment Name: At_Germinating_Seeds_Sub_P Parameter: Age (hr) Value: 6 vs. 0
  misc_feature: MA Experiment 20000306 PARAMETER Experiment Name: At_Germinating_Seeds_Sub_P Parameter: Organism Value: A. thaliana
  misc_feature: MA Experiment 20000306 PARAMETER Experiment Name: At_Germinating_Seeds_Sub_P Parameter: Plant Line Value: WS
  misc_feature: MA Experiment 20000306 PARAMETER Experiment Name: At_Germinating_Seeds_Sub_P Parameter: Tissue Value: Germinating Seeds
  misc_feature: MA Experiment ID: 20000307 Result: Up-regulated in Transcription
  misc_feature: MA Experiment 20000307 PARAMETER Experiment Name: At_Germinating_Seeds_Sub_P Parameter: Age (hr) Value: 24 vs. 0
  misc_feature: MA Experiment 20000307 PARAMETER Experiment Name: At_Germinating_Seeds_Sub_P Parameter: Organism Value: A. thaliana
  misc_feature: MA Experiment 20000307 PARAMETER Experiment Name: At_Germinating_Seeds_Sub_P Parameter: Plant Line Value: WS
  misc_feature: MA Experiment 20000307 PARAMETER Experiment Name: At_Germinating_Seeds_Sub_P Parameter: Tissue Value: Germinating Seeds
  misc_feature: MA Experiment ID: 20000315 Result: Down-regulated in Transcription
  misc_feature: MA Experiment 20000315 PARAMETER Experiment Name: At_14day_Shoots-Roots_Sub_P Parameter: Age (day) Value: 14
  misc_feature: MA Experiment 20000315 PARAMETER Experiment Name: At_14day_Shoots-Roots_Sub_P Parameter: Organism Value: A. thaliana
  misc_feature: MA Experiment 20000315 PARAMETER Experiment Name: At_14day_Shoots-Roots_Sub_P Parameter: Plant Line Value: WS
  misc_feature: MA Experiment 20000315 PARAMETER Experiment Name: At_14day_Shoots-Roots_Sub_P Parameter: Tissue Value: Shoots vs. Whole Plant
  misc_feature: MA Experiment ID: 20000329 Result: Down-regulated in Transcription
  misc_feature: MA Experiment 20000329 PARAMETER Experiment Name: At_4deg_Cold_Sub_P Parameter: Age (day) Value: 14
  misc_feature: MA Experiment 20000329 PARAMETER Experiment Name: At_4deg_Cold_Sub_P Parameter: Organism Value: A. thaliana
  misc_feature: MA Experiment 20000329 PARAMETER Experiment Name: At_4deg_Cold_Sub_P Parameter: Plant Line Value: WS
  misc_feature: MA Experiment 20000329 PARAMETER Experiment Name: At_4deg_Cold_Sub_P Parameter: Temperature (deg C) Value: 4 vs. 22
  misc_feature: MA Experiment 20000329 PARAMETER Experiment Name: At_4deg_Cold_Sub_P Parameter: Timepoint (hr) Value: 6
  misc_feature: MA Experiment 20000329 PARAMETER Experiment Name: At_4deg_Cold_Sub_P Parameter: Tissue Value: Aerial
  misc_feature: MA Experiment ID: 20000355 Result: Down-regulated in Transcription
  misc_feature: MA Experiment 20000355 PARAMETER Experiment Name: At_Siliques_Sub_P Parameter: Age (day) Value: 21
  misc_feature: MA Experiment 20000355 PARAMETER Experiment Name: At_Siliques_Sub_P Parameter: Organism Value: A. thaliana
  misc_feature: MA Experiment 20000355 PARAMETER Experiment Name: At_Siliques_Sub_P Parameter: Plant Line Value: WS
  misc_feature: MA Experiment 20000355 PARAMETER Experiment Name: At_Siliques_Sub_P Parameter: Tissue Value: Less Than 5mm Siliques vs. Whole Plant
  misc_feature: MA Experiment ID: 20000440 Result: Down-regulated in Transcription
  misc_feature: MA Experiment 20000440 PARAMETER Experiment Name: At_Closed-Flower__Sub_P Parameter: Tissue Value: Closed Flower vs. Whole Plant
  misc_feature: MA Experiment ID: 20001807 Result: Down-regulated in Transcription
  misc_feature: MA Experiment 20001807 PARAMETER Experiment Name: At_50mM_NH4NO3_L-to-H_Sub_P Parameter: Timepoint (hr) Value: 6
  misc_feature: MA Experiment 20001807 PARAMETER Experiment Name: At_50mM_NH4NO3_L-to-H_Sub_P Parameter: Tissue Value: Leaf
  misc_feature: MA Experiment 20001807 PARAMETER Experiment Name: At_50mM_NH4NO3_L-to-H_Sub_P Parameter: Treatment Value: 50mM NH4NO3 vs 100mM Mannitol
ttttcttatacgtaacttctctgctcttccatagccgatcgacctttgttcacaattcccaccgatttttatttgctagatcgatatattttcagtgagcttgaaacatggcttcagtggctcctaaaatcgctaaagatgtaactgaactaatagggaacactccattagtgtatctaaacaaagtagctaaagattgtgttggtcatgttgctgctaagcttgagatgatggaaccatgttctagcgtcaaagacaggtgcttccgaaaagtttaaaagctctgttttctagtttctctgttagtgacaaaagaaacaaatacttgtactttgttcttttttgttgcaggattggttatagtatgattgctgatgcagaagctaaaggacttattaaaccgggagagagtgtgttgattgagccaacaagtgggaacactggagttggtttagcatttactgcagctgcaaagggctataagcttgttataacaatgccagcttcaatgagtatagagagaagaatcattctcttagcttttggagctgagttgattcttactgatccggctaaaggtatgaaaggtgctgttgcaaaggcggaggagattttggcgaaaacacctaatggttatatgcttcaacagtttgagaatcctgctaatccaaagatccattatgagactactggacctgagatatggaaaggttctggtggaaaagtggatggctttgtttctggtattggtactggtggtacctgaacaggtgctgggaagtatctcaaggaacagaacacaaacataaagctgtatggtgtcgagcctgttgaaagccctattctgtccggtggaaagccaggtccccacaaaattcaaggtataggtgctggttttattccaggcattttggatgttgatcttatagatgaagttgttcaggtttcaagtgaagaatccattgacatggcaaggcttcttgctagggaagagggtctgttagtgggaatctcatctggagcagcagctactgcagcaatcaaacttgcaaagaggccagaaaatgctgggaagcttatagtggcggtgtttccgagtttcggggaaagatatctatcgactgtactgtttgatgcagcaaggaaagaggcagagactatgacctttgagccctgaatctgttcccctttcttcttggtgatacaaataaatgatctttcttccaacatatatatcttcagattctgtctgtatcttgtcatttgtgagaactcaaaagtagtttgtctgctactatgaacaatccatttctagaaagtttctggttgagtttttgctctctctatttg

SEQ ID NO: 84360 - protein, 133 aa, Arabidopsis thaliana
  peptide (1)..(133): Ceres Seq. ID no. 12674798
  misc_feature (1)..(118): Pfam Name: Pyridoxal-phosphate dependent enzyme Pfam Description: Pyridoxal-phosphate dependent enzyme
  misc_feature (1)..(118): Homolog of NCBI NO: 11994278 NR Description: cysteine synthase; O-acetylserine(thiol) lyase
  misc_feature (1)..(133): Homolog of NCBI NO: 11131561 NR Description: Cysteine synthase (O-acetylserine sulfhydrylase)
  misc_feature (1)..(133): Homolog of NCBI NO: 15233613 NR Description: cytosolic O-acetylserine(thiol)lyase (EC protein id: At4g14880.1, supported by cDNA: gi_15027936
  misc_feature (1)..(133): Homolog of NCBI NO: 11131564 NR Description: Cysteine synthase (O-acetylserine sulfhydrylase)
  misc_feature (1)..(133): Homolog of NCBI NO: 804950 NR Description: cysteine synthase [Arabidopsis thaliana]
  misc_feature (1)..(133): Homolog of NCBI NO: 15027937 NR Description: putative cytosolic O-acetylserine(thiol)lyase
MIADAEAKGLIKPGESVLIEPTSGNTGVGLAFTAAAKGYKLVITMPASMSIERRIILLAFGAELILTDPAKGMKGAVAKAEEILAKTPNGYMLQQFENPANPKIHYETTGPEIWKGSGGKVDGFVSGIGTGGT

SEQ ID NO: 84361 - protein, 89 aa, Arabidopsis thaliana
  peptide (1)..(89): Ceres Seq. ID no. 12674799
  misc_feature (1)..(74): Pfam Name: Pyridoxal-phosphate dependent enzyme Pfam Description: Pyridoxal-phosphate dependent enzyme
  misc_feature (1)..(74): Homolog of NCBI NO: 11994278 NR Description: cysteine synthase; O-acetylserine(thiol) lyase
  misc_feature (1)..(89): Homolog of NCBI NO: 11131561 NR Description: Cysteine synthase (O-acetylserine sulfhydrylase)
  misc_feature (1)..(89): Homolog of NCBI NO: 15233613 NR Description: cytosolic O-acetylserine(thiol)lyase (EC protein id: At4g14880.1, supported by cDNA: gi_15027936
  misc_feature (1)..(89): Homolog of NCBI NO: 11131564 NR Description: Cysteine synthase (O-acetylserine sulfhydrylase)
  misc_feature (1)..(89): Homolog of NCBI NO: 804950 NR Description: cysteine synthase [Arabidopsis thaliana]
  misc_feature (1)..(89): Homolog of NCBI NO: 15027937 NR Description: putative cytosolic O-acetylserine(thiol)lyase
MPASMSIERRIILLAFGAELILTDPAKGMKGAVAKAEEILAKTPNGYMLQQFENPANPKIHYETTGPEIWKGSGGKVDGFVSGIGTGGT

SEQ ID NO: 84362 - protein, 85 aa, Arabidopsis thaliana
  peptide (1)..(85): Ceres Seq. ID no. 12674800
  misc_feature (1)..(70): Pfam Name: Pyridoxal-phosphate dependent enzyme Pfam Description: Pyridoxal-phosphate dependent enzyme
  misc_feature (1)..(70): Homolog of NCBI NO: 11994278 NR Description: cysteine synthase; O-acetylserine(thiol) lyase
  misc_feature (1)..(85): Homolog of NCBI NO: 11131561 NR Description: Cysteine synthase (O-acetylserine sulfhydrylase)
  misc_feature (1)..(85): Homolog of NCBI NO: 15233613 NR Description: cytosolic O-acetylserine(thiol)lyase (EC protein id: At4g14880.1, supported by cDNA: gi_15027936
  misc_feature (1)..(85): Homolog of NCBI NO: 11131564 NR Description: Cysteine synthase (O-acetylserine sulfhydrylase)
  misc_feature (1)..(85): Homolog of NCBI NO: 804950 NR Description: cysteine synthase [Arabidopsis thaliana]
  misc_feature (1)..(85): Homolog of NCBI NO: 15027937 NR Description: putative cytosolic O-acetylserine(thiol)lyase
MSIERRIILLAFGAELILTDPAKGMKGAVAKAEEILAKTPNGYMLQQFENPANPKIHYETTGPEIWKGSGGKVDGFVSGIGTGGT

SEQ ID NO: 84363 - DNA, 896 bp, Arabidopsis thaliana
  misc_feature (1)..(896): Ceres Seq. ID no. 12674801
  misc_feature: MA Experiment ID: 108434 Result: Up-regulated in Transcription
  misc_feature: MA Experiment 108434 PARAMETER Experiment Name: At_Root_Tips_cDNA_P Parameter: Tissue Value: Root Tips
  misc_feature: MA Experiment ID: 108462 Result: Down-regulated in Transcription
  misc_feature: MA Experiment 108462 PARAMETER Experiment Name: At_Germinating_Seeds_cDNA_P Parameter: Age (day) Value: 2 vs. 0
  misc_feature: MA Experiment 108462 PARAMETER Experiment Name: At_Germinating_Seeds_cDNA_P Parameter: Tissue Value: Germinating Seeds
  misc_feature: MA Experiment ID: 108463 Result: Down-regulated in Transcription
  misc_feature: MA Experiment 108463 PARAMETER Experiment Name: At_Germinating_Seeds_cDNA_P Parameter: Age (day) Value: 3 vs. 0
  misc_feature: MA Experiment 108463 PARAMETER Experiment Name: At_Germinating_Seeds_cDNA_P Parameter: Tissue Value: Germinating Seeds
  misc_feature: MA Experiment ID: 108464 Result: Down-regulated in Transcription
  misc_feature: MA Experiment 108464 PARAMETER Experiment Name: At_Germinating_Seeds_cDNA_P Parameter: Age (day) Value: 4 vs. 0
  misc_feature: MA Experiment 108464 PARAMETER Experiment Name: At_Germinating_Seeds_cDNA_P Parameter: Tissue Value: Germinating Seeds
  misc_feature: MA Experiment ID: 20000180 Result: Down-regulated in Transcription
  misc_feature: MA Experiment 20000180 PARAMETER Experiment Name: At_Germinating_Seeds_P Parameter: Age (hr) Value: 24 vs. 0
  misc_feature: MA Experiment 20000180 PARAMETER Experiment Name: At_Germinating_Seeds_P Parameter: Tissue Value: Germinating Seeds
  misc_feature: MA Experiment ID: 20000184 Result: Down-regulated in Transcription
  misc_feature: MA Experiment 20000184 PARAMETER Experiment Name: At_Shoots__P Parameter: Age (day) Value: 7
  misc_feature: MA Experiment 20000184 PARAMETER Experiment Name: At_Shoots__P Parameter: Tissue Value: Shoots vs. Whole Plant
  misc_feature: MA Experiment ID: 20000227 Result: Down-regulated in Transcription
  misc_feature: MA Experiment 20000227 PARAMETER Experiment Name: At_Root-Tips-vs-Tops_P Parameter: Tissue Value: Root Tips vs. Root Tops
  misc_feature: MA Experiment ID: 20001557 Result: Up-regulated in Transcription
  misc_feature: MA Experiment 20001557 PARAMETER Experiment Name: At_Drought_Soil_Dry_P Parameter: Age (day) Value: 27
  misc_feature: MA Experiment 20001557 PARAMETER Experiment Name: At_Drought_Soil_Dry_P Parameter: Organism Value: A. thaliana
  misc_feature: MA Experiment 20001557 PARAMETER Experiment Name: At_Drought_Soil_Dry_P Parameter: Plant Line Value: WS
  misc_feature: MA Experiment 20001557 PARAMETER Experiment Name: At_Drought_Soil_Dry_P Parameter: Post Timepoint (hr) Value: 3
  misc_feature: MA Experiment 20001557 PARAMETER Experiment Name: At_Drought_Soil_Dry_P Parameter: Post-Treatment Value: Re-Water vs. No Drought
  misc_feature: MA Experiment 20001557 PARAMETER Experiment Name: At_Drought_Soil_Dry_P Parameter: Timepoint (day) Value: 13
  misc_feature: MA Experiment 20001557 PARAMETER Experiment Name: At_Drought_Soil_Dry_P Parameter: Treatment Value: Drought vs. No Drought
  misc_feature: MA Experiment ID: 20001558 Result: Up-regulated in Transcription
  misc_feature: MA Experiment 20001558 PARAMETER Experiment Name: At_Drought_Soil_Dry_P Parameter: Age (day) Value: 27
  misc_feature: MA Experiment 20001558 PARAMETER Experiment Name: At_Drought_Soil_Dry_P Parameter: Organism Value: A. thaliana
  misc_feature: MA Experiment 20001558 PARAMETER Experiment Name: At_Drought_Soil_Dry_P Parameter: Plant Line Value: WS
  misc_feature: MA Experiment 20001558 PARAMETER Experiment Name: At_Drought_Soil_Dry_P Parameter: Post Timepoint (hr) Value: 6
  misc_feature: MA Experiment 20001558 PARAMETER Experiment Name: At_Drought_Soil_Dry_P Parameter: Post-Treatment Value: Re-Water vs. No Drought
  misc_feature: MA Experiment 20001558 PARAMETER Experiment Name: At_Drought_Soil_Dry_P Parameter: Timepoint (day) Value: 13
  misc_feature: MA Experiment 20001558 PARAMETER Experiment Name: At_Drought_Soil_Dry_P Parameter: Treatment Value: Drought vs. No Drought
  misc_feature: MA Experiment ID: 20001757 Result: Up-regulated in Transcription
  misc_feature: MA Experiment 20001757 PARAMETER Experiment Name: At_50mM_NH4NO3_L-to-H_P Parameter: Timepoint (hr) Value: 6
  misc_feature: MA Experiment 20001757 PARAMETER Experiment Name: At_50mM_NH4NO3_L-to-H_P Parameter: Tissue Value: Leaf
  misc_feature: MA Experiment 20001757 PARAMETER Experiment Name: At_50mM_NH4NO3_L-to-H_P Parameter: Treatment Value: 50mM NH4NO3 vs 100mM Mannitol
aaaaggagaaagcttgaaacgccgcttcttcttcttcttcttccactgtcgttctctctgtaaatcgcttcttcaatcatctctgtggatttgtctctattcataacttggtgaagaagatgttgacggaagaggagctcaaaagattgtacagaatccagaagacgttgatgcagatgttaagggatcgtggatattttatcgcggattctgaacttacgatgactaaacaacagtttattaggaaacatggtgataacatgaaaagagaggatcttgttactcttaaggctaagcgaaatgataatagtgatcagctctatatattcttccctgatgaggcgaaagttggtgtgaagacgatgaaaatgtacacgaacaggatgaaatcagagaatgtgttcagagctattttggttgtgcaacagaacttgaccccgtttgctcgaacttgcattagtgagatctcttctaagtttcatctggaagttttccaggaggcggaaatgctagtgaacattaaagaacatgttcttgttcctgagcatcaagttcttaccactgaagagaagaaaactttactggagagatacacagtgaaggagacacagcttccaaggatccaagtgactgatccaatcgcaagatactttggactaaaacgtgggcaagtcgtgaagatcattcgtccgagtgaaacggctggtcgttatgttacctatcgttatgttgtataagccaaagcaaaaggcttttgtggattgtaatgcgaattgaacgctgagagttgtgaaacataagagtaatgcttttgtactaaaccaaactgatgactgtgttttatttttgtttgtccgataggagaaattaaagcttgaaacaacttatttgtatta

SEQ ID NO: 84364 - protein, 205 aa, Arabidopsis thaliana; identical to SEQ ID NO: 29287
  peptide (1)..(205): Ceres Seq. ID no. 12674802
  misc_feature (1)..(90): Pfam Name: RNA polymerase Rpb5, N-terminal domain Pfam Description: RNA polymerase Rpb5, N-terminal domain
  misc_feature (1)..(205): Homolog of NCBI NO: 15228724 NR Description: RNA polymerase I, II and III 24.3 kDa subunit; id: At3g22320.1, supported by cDNA: 21828., supported by cDNA: supported by cDNA: gi_15724321, supported by cDNA: gi_3372232
  misc_feature (1)..(205): Homolog of NCBI NO: 38344231 NR Description: OJ991113_30.8 [Oryza sativa (japonica
  misc_feature (4)..(204): Homolog of NCBI NO: 1173134 NR Description: DNA-directed RNA polymerase II 23 kDa polypeptide
  misc_feature (4)..(204): Homolog of NCBI NO: 2135016 NR Description: DNA-directed RNA polymerase (EC 2.7.7.6) II 23K
  misc_feature (4)..(204): Homolog of NCBI NO: 28497750 NR Description: polymerase (RNA) II (DNA directed) polypeptide E musculus] >gi|28374319|gb|AAH45521.1| similar to DNA directed RNA
  misc_feature (4)..(204): Homolog of NCBI NO: 2896797 NR Description: RPB5_Human [Homo sapiens]
  misc_feature (4)..(204): Homolog of NCBI NO: 14589951 NR Description: DNA directed RNA polymerase II polypeptide E; (RNA) II (DNA directed) polypeptide E (25kD); DNA directed RNA II 23 kda polypeptide [Homo sapiens] >gi|678549|gb|AAA62401.1|
  misc_feature (2)..(205): Homolog of NCBI NO: 17507947 NR Description: RNA polymerase Rpb5, N-terminal domain and RNA
  misc_feature (2)..(205): Homolog of NCBI NO: 39595790 NR Description: Hypothetical protein CBG12745 [Caenorhabditis
  misc_feature (4)..(204): Homolog of NCBI NO: 19922004 NR Description: CG11979-PA [Drosophila melanogaster]

SEQ ID NO: 84365 - protein, 188 aa, Arabidopsis thaliana; identical to SEQ ID NO: 29288
  peptide (1)..(188): Ceres Seq. ID no. 12674803
  misc_feature (1)..(73): Pfam Name: RNA polymerase Rpb5, N-terminal domain Pfam Description: RNA polymerase Rpb5, N-terminal domain
  misc_feature (1)..(188): Homolog of NCBI NO: 15228724 NR Description: RNA polymerase I, II and III 24.3 kDa subunit; id: At3g22320.1, supported by cDNA: 21828., supported by cDNA: supported by cDNA: gi_15724321, supported by cDNA: gi_3372232
  misc_feature (1)..(188): Homolog of NCBI NO: 38344231 NR Description: OJ991113_30.8 [Oryza sativa (japonica
  misc_feature (1)..(187): Homolog of NCBI NO: 1173134 NR Description: DNA-directed RNA polymerase II 23 kDa polypeptide
  misc_feature (1)..(187): Homolog of NCBI NO: 2135016 NR Description: DNA-directed RNA polymerase (EC 2.7.7.6) II 23K
  misc_feature (1)..(187): Homolog of NCBI NO: 28497750 NR Description: polymerase (RNA) II (DNA directed) polypeptide E musculus] >gi|28374319|gb|AAH45521.1| similar to DNA directed RNA
  misc_feature (1)..(187): Homolog of NCBI NO: 2896797 NR Description: RPB5_Human [Homo sapiens]
  misc_feature (1)..(187): Homolog of NCBI NO: 14589951 NR Description: DNA directed RNA polymerase II polypeptide E; (RNA) II (DNA directed) polypeptide E (25kD); DNA directed RNA II 23 kda polypeptide [Homo sapiens] >gi|678549|gb|AAA62401.1|
  misc_feature (1)..(188): Homolog of NCBI NO: 17507947 NR Description: RNA polymerase Rpb5, N-terminal domain and RNA
  misc_feature (1)..(188): Homolog of NCBI NO: 39595790 NR Description: Hypothetical protein CBG12745 [Caenorhabditis
  misc_feature (1)..(187): Homolog of NCBI NO: 19922004 NR Description: CG11979-PA [Drosophila melanogaster]

SEQ ID NO: 84366 - protein, 186 aa, Arabidopsis thaliana; identical to SEQ ID NO: 35158
  peptide (1)..(186): Ceres Seq. ID no. 12674804
  misc_feature (1)..(71): Pfam Name: RNA polymerase Rpb5, N-terminal domain Pfam Description: RNA polymerase Rpb5, N-terminal domain
  misc_feature (1)..(186): Homolog of NCBI NO: 15228724 NR Description: RNA polymerase I, II and III 24.3 kDa subunit; id: At3g22320.1, supported by cDNA: 21828., supported by cDNA: supported by cDNA: gi_15724321, supported by cDNA: gi_3372232
  misc_feature (1)..(186): Homolog of NCBI NO: 38344231 NR Description: OJ991113_30.8 [Oryza sativa (japonica
  misc_feature (1)..(185): Homolog of NCBI NO: 1173134 NR Description: DNA-directed RNA polymerase II 23 kDa polypeptide
  misc_feature (1)..(185): Homolog of NCBI NO: 2135016 NR Description: DNA-directed RNA polymerase (EC 2.7.7.6) II 23K
  misc_feature (1)..(185): Homolog of NCBI NO: 28497750 NR Description: polymerase (RNA) II (DNA directed) polypeptide E musculus] >gi|28374319|gb|AAH45521.1| similar to DNA directed RNA
  misc_feature (1)..(185): Homolog of NCBI NO: 2896797 NR Description: RPB5_Human [Homo sapiens]
  misc_feature (1)..(185): Homolog of NCBI NO: 14589951 NR Description: DNA directed RNA polymerase II polypeptide E; (RNA) II (DNA directed) polypeptide E (25kD); DNA directed RNA II 23 kda polypeptide [Homo sapiens] >gi|678549|gb|AAA62401.1|
  misc_feature (1)..(186): Homolog of NCBI NO: 17507947 NR Description: RNA polymerase Rpb5, N-terminal domain and RNA
  misc_feature (1)..(186): Homolog of NCBI NO: 39595790 NR Description: Hypothetical protein CBG12745 [Caenorhabditis
  misc_feature (1)..(185): Homolog of NCBI NO: 19922004 NR Description: CG11979-PA [Drosophila melanogaster]

SEQ ID NO: 84367 - DNA, 891 bp, Arabidopsis thaliana
  misc_feature (1)..(891): Ceres Seq. ID no. 12674863
  misc_feature: MA Experiment ID: 108462 Result: Up-regulated in Transcription
  misc_feature: MA Experiment 108462 PARAMETER Experiment Name: At_Germinating_Seeds_cDNA_P Parameter: Age (day) Value: 2 vs. 0
  misc_feature: MA Experiment 108462 PARAMETER Experiment Name: At_Germinating_Seeds_cDNA_P Parameter: Tissue Value: Germinating Seeds
  misc_feature: MA Experiment ID: 108573 Result: Down-regulated in Transcription
  misc_feature: MA Experiment 108573 PARAMETER Experiment Name: At_Drought_cDNA_P Parameter: Timepoint (hr) Value: 6
  misc_feature: MA Experiment 108573 PARAMETER Experiment Name: At_Drought_cDNA_P Parameter: Tissue Value: Aerial
  misc_feature: MA Experiment 108573 PARAMETER Experiment Name: At_Drought_cDNA_P Parameter: Treatment Value: Drought vs. No Drought
  misc_feature: MA Experiment ID: 108595 Result: Down-regulated in Transcription
  misc_feature: MA Experiment 108595 PARAMETER Experiment Name: At_Ler-pi_Ovule_cDNA_P Parameter: Plant Line Value: null
  misc_feature: MA Experiment ID: 20000069 Result: Down-regulated in Transcription
  misc_feature: MA Experiment 20000069 PARAMETER Experiment Name: At_100uM_ABA_Mutants_cDNA_P Parameter: Plant Line Value: CS23
  misc_feature: MA Experiment 20000069 PARAMETER Experiment Name: At_100uM_ABA_Mutants_cDNA_P Parameter: Timepoint (hr) Value: 6
  misc_feature: MA Experiment 20000069 PARAMETER Experiment Name: At_100uM_ABA_Mutants_cDNA_P Parameter: Tissue Value: Aerial
  misc_feature: MA Experiment 20000069 PARAMETER Experiment Name: At_100uM_ABA_Mutants_cDNA_P Parameter: Treatment Value: 100uM ABA vs. No Treatment
  misc_feature: MA Experiment ID: 20000070 Result: Down-regulated in Transcription
  misc_feature: MA Experiment 20000070 PARAMETER Experiment Name: At_100uM_ABA_Mutants_cDNA_P Parameter: Plant Line Value: CS24
  misc_feature: MA Experiment 20000070 PARAMETER Experiment Name: At_100uM_ABA_Mutants_cDNA_P Parameter: Timepoint (hr) Value: 6
  misc_feature: MA Experiment 20000070 PARAMETER Experiment Name: At_100uM_ABA_Mutants_cDNA_P Parameter: Tissue Value: Aerial
  misc_feature: MA Experiment 20000070 PARAMETER Experiment Name: At_100uM_ABA_Mutants_cDNA_P Parameter: Treatment Value: 100uM ABA vs. No Treatment
  misc_feature: MA Experiment ID: 20000071 Result: Down-regulated in Transcription
  misc_feature: MA Experiment 20000071 PARAMETER Experiment Name: At_100uM_ABA_Mutants_cDNA_P Parameter: Plant Line Value: CS8104
  misc_feature: MA Experiment 20000071 PARAMETER Experiment Name: At_100uM_ABA_Mutants_cDNA_P Parameter: Timepoint (hr) Value: 6
  misc_feature: MA Experiment 20000071 PARAMETER Experiment Name: At_100uM_ABA_Mutants_cDNA_P Parameter: Tissue Value: Aerial
  misc_feature: MA Experiment 20000071 PARAMETER Experiment Name: At_100uM_ABA_Mutants_cDNA_P Parameter: Treatment Value: 100uM ABA vs. No Treatment
  misc_feature: MA Experiment ID: 20000086 Result: Down-regulated in Transcription
  misc_feature: MA Experiment 20000086 PARAMETER Experiment Name: At_100uM_ABA_Mutants_cDNA_P Parameter: Plant Line Value: CS22
  misc_feature: MA Experiment 20000086 PARAMETER Experiment Name: At_100uM_ABA_Mutants_cDNA_P Parameter: Timepoint (hr) Value: 6
  misc_feature: MA Experiment 20000086 PARAMETER Experiment Name: At_100uM_ABA_Mutants_cDNA_P Parameter: Tissue Value: Aerial
  misc_feature: MA Experiment 20000086 PARAMETER Experiment Name: At_100uM_ABA_Mutants_cDNA_P Parameter: Treatment Value: 100uM ABA vs. No Treatment
  misc_feature: MA Experiment ID: 20000088 Result: Down-regulated in Transcription
  misc_feature: MA Experiment 20000088 PARAMETER Experiment Name: At_100uM_ABA_Mutants_cDNA_P Parameter: Plant Line Value: Landsberg
  misc_feature: MA Experiment 20000088 PARAMETER Experiment Name: At_100uM_ABA_Mutants_cDNA_P Parameter: Timepoint (hr) Value: 6
  misc_feature: MA Experiment 20000088 PARAMETER Experiment Name: At_100uM_ABA_Mutants_cDNA_P Parameter: Tissue Value: Aerial
  misc_feature: MA Experiment 20000088 PARAMETER Experiment Name: At_100uM_ABA_Mutants_cDNA_P Parameter: Treatment Value: 100uM ABA vs. No Treatment
  misc_feature: MA Experiment ID: 20000089 Result: Down-regulated in Transcription
  misc_feature: MA Experiment ID: 20000090 Result: Down-regulated in Transcription
  misc_feature: MA Experiment ID: 20000117 Result: Down-regulated in Transcription
  misc_feature: MA Experiment 20000117 PARAMETER Experiment Name: At_100uM_ABA_Mutants_cDNA_P Parameter: Plant Line Value: Columbia
  misc_feature: MA Experiment 20000117 PARAMETER Experiment Name: At_100uM_ABA_Mutants_cDNA_P Parameter: Timepoint (hr) Value: 6
  misc_feature: MA Experiment 20000117 PARAMETER Experiment Name: At_100uM_ABA_Mutants_cDNA_P Parameter: Tissue Value: Aerial
  misc_feature: MA Experiment 20000117 PARAMETER Experiment Name: At_100uM_ABA_Mutants_cDNA_P Parameter: Treatment Value: 100uM ABA vs. No Treatment
  misc_feature: MA Experiment ID: 20000180 Result: Up-regulated in Transcription
  misc_feature: MA Experiment 20000180 PARAMETER Experiment Name: At_Germinating_Seeds_P Parameter: Age (hr) Value: 24 vs. 0
  misc_feature: MA Experiment 20000180 PARAMETER Experiment Name: At_Germinating_Seeds_P Parameter: Tissue Value: Germinating Seeds
  misc_feature: MA Experiment ID: 20000184 Result: Up-regulated in Transcription
  misc_feature: MA Experiment 20000184 PARAMETER Experiment Name: At_Shoots__P Parameter: Age (day) Value: 7
  misc_feature: MA Experiment 20000184 PARAMETER Experiment Name: At_Shoots__P Parameter: Tissue Value: Shoots vs. Whole Plant
  misc_feature: MA Experiment ID: 20000185 Result: Down-regulated in Transcription
  misc_feature: MA Experiment 20000185 PARAMETER Experiment Name: At_Roots__P Parameter: Age (day) Value: 7 vs. 21
  misc_feature: MA Experiment 20000185 PARAMETER Experiment Name: At_Roots__P Parameter: Organism Value: A. thaliana
  misc_feature: MA Experiment 20000185 PARAMETER Experiment Name: At_Roots__P Parameter: Tissue Value: Roots vs. Whole Plant
  misc_feature: MA Experiment ID: 20000224 Result: Up-regulated in Transcription
  misc_feature: MA Experiment ID: 20000286 Result: Down-regulated in Transcription
  misc_feature: MA Experiment 20000286 PARAMETER Experiment Name: At_Open_Flower_P Parameter: Age (day) Value: 21
  misc_feature: MA Experiment 20000286 PARAMETER Experiment Name: At_Open_Flower_P Parameter: Plant Line Value: WS
  misc_feature: MA Experiment 20000286 PARAMETER Experiment Name: At_Open_Flower_P Parameter: Tissue Value: Half Open vs. Whole Plant
  misc_feature: MA Experiment ID: 20000438 Result: Up-regulated in Transcription
  misc_feature: MA Experiment 20000438 PARAMETER Experiment Name: At_Shoots__P Parameter: Age (day) Value: 14
  misc_feature: MA Experiment 20000438 PARAMETER Experiment Name: At_Shoots__P Parameter: Tissue Value: Shoots vs. Whole Plant
  misc_feature: MA Experiment ID: 20000439 Result: Down-regulated in Transcription
  misc_feature: MA Experiment 20000439 PARAMETER Experiment Name: At_Roots__P Parameter: Age (day) Value: 14 vs. 21
  misc_feature: MA Experiment 20000439 PARAMETER Experiment Name: At_Roots__P Parameter: Organism Value: A. thaliana
  misc_feature: MA Experiment 20000439 PARAMETER Experiment Name: At_Roots__P Parameter: Tissue Value: Roots vs. Whole Plant
  misc_feature: MA Experiment ID: 20000573 Result: Down-regulated in Transcription
  misc_feature: MA Experiment 20000573 PARAMETER Experiment Name: At_100uM_ABA_Mutants__P Parameter: Organism Value: A. thaliana
  misc_feature: MA Experiment 20000573 PARAMETER Experiment Name: At_100uM_ABA_Mutants__P Parameter: Plant Line Value: CS22 vs. Ler wt
  misc_feature: MA Experiment 20000573 PARAMETER Experiment Name: At_100uM_ABA_Mutants__P Parameter: Timepoint (hr) Value: N/A
  misc_feature: MA Experiment 20000573 PARAMETER Experiment Name: At_100uM_ABA_Mutants__P Parameter: Tissue Value: Whole Plant
  misc_feature: MA Experiment 20000573 PARAMETER Experiment Name: At_100uM_ABA_Mutants__P Parameter: Treatment Value: None
  misc_feature: MA Experiment ID: 20000794 Result: Down-regulated in Transcription
  misc_feature: MA Experiment 20000794 PARAMETER Experiment Name: At_Petals_P Parameter: Age (day) Value: 23-25 days
  misc_feature: MA Experiment 20000794 PARAMETER Experiment Name: At_Petals_P Parameter: Plant Line Value: WS
  misc_feature: MA Experiment 20000794 PARAMETER Experiment Name: At_Petals_P Parameter: Tissue Value: Petals vs. Whole plant
  misc_feature: MA Experiment ID: 20001248 Result: Down-regulated in Transcription
  misc_feature: MA Experiment 20001248 PARAMETER Experiment Name: At_Far-red-induction_P Parameter: Age (day) Value: 7
  misc_feature: MA Experiment 20001248 PARAMETER Experiment Name: At_Far-red-induction_P Parameter: Light Value: Far-red vs. White
  misc_feature: MA Experiment 20001248 PARAMETER Experiment Name: At_Far-red-induction_P Parameter: Organism Value: A. thaliana
  misc_feature: MA Experiment 20001248 PARAMETER Experiment Name: At_Far-red-induction_P Parameter: Plant Line Value: Columbia
  misc_feature: MA Experiment 20001248 PARAMETER Experiment Name: At_Far-red-induction_P Parameter: Timepoint (hr) Value: 4
  misc_feature: MA Experiment 20001248 PARAMETER Experiment Name: At_Far-red-induction_P Parameter: Tissue Value: Whole Plant
  misc_feature: MA Experiment ID: 20001757 Result: Up-regulated in Transcription
  misc_feature: MA Experiment 20001757 PARAMETER Experiment Name: At_50mM_NH4NO3_L-to-H_P Parameter: Timepoint (hr) Value: 6
  misc_feature: MA Experiment 20001757 PARAMETER Experiment Name: At_50mM_NH4NO3_L-to-H_P Parameter: Tissue Value: Leaf
  misc_feature: MA Experiment 20001757 PARAMETER Experiment Name: At_50mM_NH4NO3_L-to-H_P Parameter: Treatment Value: 50mM NH4NO3 vs 100mM Mannitol
  misc_feature: MA Experiment ID: 20001904 Result: Down-regulated in Transcription
  misc_feature: MA Experiment 20001904 PARAMETER Experiment Name: At_Drought_Reproduction_P Parameter: Age (day) Value: 37
  misc_feature: MA Experiment 20001904 PARAMETER Experiment Name: At_Drought_Reproduction_P Parameter: Organism Value: A. thaliana
  misc_feature: MA Experiment 20001904 PARAMETER Experiment Name: At_Drought_Reproduction_P Parameter: Plant Line Value: WS
  misc_feature: MA Experiment 20001904 PARAMETER Experiment Name: At_Drought_Reproduction_P Parameter: Timepoint (day) Value: 7
  misc_feature: MA Experiment 20001904 PARAMETER Experiment Name: At_Drought_Reproduction_P Parameter: Tissue Value: Rosettes
  misc_feature: MA Experiment 20001904 PARAMETER Experiment Name: At_Drought_Reproduction_P Parameter: Treatment Value: Drought vs. No Drought
  misc_feature: MA Experiment ID: 20001905 Result: Down-regulated in Transcription
  misc_feature: MA Experiment 20001905 PARAMETER Experiment Name: At_Drought_Reproduction_P Parameter: Age (day) Value: 40
  misc_feature: MA Experiment 20001905 PARAMETER Experiment Name: At_Drought_Reproduction_P Parameter: Organism Value: A. thaliana
  misc_feature: MA Experiment 20001905 PARAMETER Experiment Name: At_Drought_Reproduction_P Parameter: Plant Line Value: WS
  misc_feature: MA Experiment 20001905 PARAMETER Experiment Name: At_Drought_Reproduction_P Parameter: Timepoint (day) Value: 10
  misc_feature: MA Experiment 20001905 PARAMETER Experiment Name: At_Drought_Reproduction_P Parameter: Tissue Value: Rosettes
  misc_feature: MA Experiment 20001905 PARAMETER Experiment Name: At_Drought_Reproduction_P Parameter: Treatment Value: Drought vs. No Drought
  misc_feature: MA Experiment ID: 20001906 Result: Down-regulated in Transcription
  misc_feature: MA Experiment 20001906 PARAMETER Experiment Name: At_Drought_Reproduction_P Parameter: Age (day) Value: 35
  misc_feature: MA Experiment 20001906 PARAMETER Experiment Name: At_Drought_Reproduction_P Parameter: Organism Value: A. thaliana
  misc_feature: MA Experiment 20001906 PARAMETER Experiment Name: At_Drought_Reproduction_P Parameter: Plant Line Value: WS
  misc_feature: MA Experiment 20001906 PARAMETER Experiment Name: At_Drought_Reproduction_P Parameter: Timepoint (day) Value: 5
  misc_feature: MA Experiment 20001906 PARAMETER Experiment Name: At_Drought_Reproduction_P Parameter: Tissue Value: Siliques
  misc_feature: MA Experiment 20001906 PARAMETER Experiment Name: At_Drought_Reproduction_P Parameter: Treatment Value: Drought vs. No Drought
  misc_feature: Pfam Name: GUN4 Pfam Description: GUN4-like
gacgtgactcttctctctcttcctctccatcaatggcgaccacaaactctctcatctccattgccaatctcacttcggaccaacttctctttccctcaaacaacccacttccgccgcaacattctcactaatctgctctgcttcttccacctcctcctccaccaccgccgtatctgccgtttcaaccacaaacgcctccgccacaactgccgaaaccgcgaccatattcgacgttctggagaaccatctcgtcaatcaaaacttcagacaagccgacgaggagacacggagattactcattcagatatccggagaagccgccgtgaaacgtggctacgttttcttctccgaggtgaaaacaatctcccccgaagatcttcaagctatcgacaatctatggattaaacacagtgatggtagattcggatacagcgtgcaacgcaaaatctggttaaaagtgaagaaagatttcacaagattcttcgttaaagttgagtggatgaagcttcttgacacagaggttgttcaatacaattacagagcgtttcctgacgaattcaagtgggagcttaacgatgaaacgcctttaggacacttaccgctcacaaacgccttgagaggaacgcagcttctgaaatgcgttttaagccatcctgcgtttgcgacagctgatgataacagtggagaaacagaagacgagcttaacagaggtgttgcggtggctaaggaacaggcaggagtaggagcagacaaaagagtgtttaaaacaaattacagcttctgatgtctttctccttcttttttttttttttttaatattgattttctgatattgtgaaagtataaacaaatctctgtaatcatatcattaattaaatcggatttctcttc

SEQ ID NO: 84368 - protein, 134 aa, Arabidopsis thaliana
  peptide (1)..(134): Ceres Seq. ID no. 12674864
  misc_feature: Pfam Name: GUN4 Pfam Description: GUN4-like
DVTLLSLPLHQWRPQTLSSPLPISLRTNFSFPQTTHFRRNILTNLLCFFHLLLHHRRICRFNHKRLRHNCRNRDHIRRSGEPSRQSKLQTSRRGDTEITHSDIRRSRRETWLRFLLRGENNLPRRSSSYRQSMD

SEQ ID NO: 84369 - protein, 94 aa, Arabidopsis thaliana; identical to SEQ ID NO: 30152
  peptide (1)..(94): Ceres Seq. ID no. 12674865
  misc_feature: Pfam Name: GUN4 Pfam Description: GUN4-like
  misc_feature (1)..(94): Homolog of NCBI NO: 15231674 NR Description: putative protein; protein id: At3g59400.1, by cDNA: gi_17380923 [Arabidopsis thaliana]
  misc_feature (1)..(94): Homolog of NCBI NO: 32816239 NR Description: GUN4 mutant [Arabidopsis thaliana]
  misc_feature (1)..(94): Homolog of NCBI NO: 17380924 NR Description: unknown protein [Arabidopsis thaliana]
  misc_feature (1)..(55): Homolog of NCBI NO: 23042866 NR Description: hypothetical protein [Trichodesmium erythraeum
  misc_feature (1)..(55): Homolog of NCBI NO: 17229318 NR Description: hypothetical protein [Nostoc sp. PCC 7120]
  misc_feature (1)..(60): Homolog of NCBI NO: 33861481 NR Description: conserved hypothetical protein [Prochlorococcus subsp. pastoris str. CCMP1378] >gi|33634058|emb|CAE19383.1| hypothetical protein [Prochlorococcus marinus subsp. pastoris
  misc_feature (1)..(54): Homolog of NCBI NO: 22299137 NR Description: ORF_ID:tlr1594~hypothetical protein
  misc_feature (1)..(54): Homolog of NCBI NO: 11465668 NR Description: ORF238 [Porphyra purpurea] HYPOTHETICAL 28.1 KD PROTEIN YCF53 (ORF238)
  misc_feature (1)..(55): Homolog of NCBI NO: 23126475 NR Description: hypothetical protein [Nostoc punctiforme]
  misc_feature (1)..(55): Homolog of NCBI NO: 23042867 NR Description: hypothetical protein [Trichodesmium erythraeum

SEQ ID NO: 84370 - DNA, 747 bp, Arabidopsis thaliana
  misc_feature (1)..(747): Ceres Seq. ID no. 12674866
  misc_feature: MA Experiment ID: 108434 Result: Up-regulated in Transcription
  misc_feature: MA Experiment 108434 PARAMETER Experiment Name: At_Root_Tips_cDNA_P Parameter: Tissue Value: Root Tips
  misc_feature: MA Experiment ID: 108462 Result: Down-regulated in Transcription
  misc_feature: MA Experiment 108462 PARAMETER Experiment Name: At_Germinating_Seeds_cDNA_P Parameter: Age (day) Value: 2 vs. 0
  misc_feature: MA Experiment 108462 PARAMETER Experiment Name: At_Germinating_Seeds_cDNA_P Parameter: Tissue Value: Germinating Seeds
  misc_feature: MA Experiment ID: 108463 Result: Down-regulated in Transcription
  misc_feature: MA Experiment 108463 PARAMETER Experiment Name: At_Germinating_Seeds_cDNA_P Parameter: Age (day) Value: 3 vs. 0
  misc_feature: MA Experiment 108463 PARAMETER Experiment Name: At_Germinating_Seeds_cDNA_P Parameter: Tissue Value: Germinating Seeds
  misc_feature: MA Experiment ID: 108464 Result: Down-regulated in Transcription
  misc_feature: MA Experiment 108464 PARAMETER Experiment Name: At_Germinating_Seeds_cDNA_P Parameter: Age (day) Value: 4 vs. 0
  misc_feature: MA Experiment 108464 PARAMETER Experiment Name: At_Germinating_Seeds_cDNA_P Parameter: Tissue Value: Germinating Seeds
  misc_feature: MA Experiment ID: 108488 Result: Up-regulated in Transcription
  misc_feature: MA Experiment ID: 108561 Result: Down-regulated in Transcription
  misc_feature: MA Experiment 108561 PARAMETER Experiment Name: At_100uM_ABA_cDNA_P Parameter: Timepoint (hr) Value: 6
  misc_feature: MA Experiment 108561 PARAMETER Experiment Name: At_100uM_ABA_cDNA_P Parameter: Tissue Value: Aerial
  misc_feature: MA Experiment 108561 PARAMETER Experiment Name: At_100uM_ABA_cDNA_P Parameter: Treatment Value: 100uM ABA vs. No Treatment
  misc_feature: MA Experiment ID: 108573 Result: Down-regulated in Transcription
  misc_feature: MA Experiment 108573 PARAMETER Experiment Name: At_Drought_cDNA_P Parameter: Timepoint (hr) Value: 6
  misc_feature: MA Experiment 108573 PARAMETER Experiment Name: At_Drought_cDNA_P Parameter: Tissue Value: Aerial
  misc_feature: MA Experiment 108573 PARAMETER Experiment Name: At_Drought_cDNA_P Parameter: Treatment Value: Drought vs. No Drought
atgaagcacaacaatgttatccccaatggtcacttcaaaaagcactggcagaattatgtcaagacatggttcaaccagcctgccaggaaaaccagaagaagaattgcgaggcaaaagaaggctgtgaagatcttccctcgtccaacttctggacctctccgccctgttgtgcatggtcagactcttaagtacaacatgaaggtcagaaccggtaaaggattcactcttgaagagctcaaggctgctggtatcccaaagaagttggcgcctacaattggtattgctgttgaccatcgtcgcaagaaccgatctttggagggtcttcaaacaaatgtccagaggctgaaaacctacaagaccaagttagtcattttcccgcgtcgtgcccgcaaggtcaaggctggtgactctacaccagaagagttggctaatgctacccaagttcaaggagactacttgcctattgtacgtgagaagcctaccatggaactcgtcaagctgacttcagaaatgaagtctttcaaggcttttgacaagatacgccttgagcgcactaacaagaggcatgccggagctagagccaagagagccgcagaggctgagaaagaagagaagaagtgaggtcgttcttcttaggtagaagaaacttttatcttatcaacttttggaactgaattttgtgtatcagactgtcttttctttcatcagtttttatccttaaatctttgattttgctgctaccttgct

SEQ ID NO: 84371 - protein, 206 aa, Arabidopsis thaliana [sequence omitted]

SEQ ID NO: 84372 - protein, 141 aa, Arabidopsis thaliana; identical to SEQ ID NO: 25776
  peptide (1)..(141): Ceres Seq. ID no. 12674868
  misc_feature (1)..(118): Pfam Name: Ribosomal protein L13e Pfam Description: Ribosomal protein L13e
  misc_feature (1)..(141): Homolog of NCBI NO: 15229064 NR Description: 60S ribosomal protein L13, BBC1 protein; protein At3g49010.2, supported by cDNA: 12182., supported by cDNA: supported by cDNA: gi_16226380, supported by cDNA: gi_17473729,
  misc_feature (1)..(141): Homolog of NCBI NO: 21537149 NR Description: 60S ribosomal protein L13, BBC1 protein
  misc_feature (1)..(141): Homolog of NCBI NO: 730449 NR Description: 60S RIBOSOMAL PROTEIN L13-1 (COLD INDUCED PROTEIN >gi|398918|emb|CAA80341.1| cold induced protein (BnC24A)
  misc_feature (1)..(141): Homolog of NCBI NO: 730450 NR Description: 60S RIBOSOMAL PROTEIN L13-2 (COLD INDUCED PROTEIN >gi|398922|emb|CAA80343.1| cold induced protein (BnC24B)
  misc_feature (1)..(141): Homolog of NCBI NO: 7441103 NR Description: ribosomal protein L13.B, cytosolic - rape
  misc_feature (1)..(141): Homolog of NCBI NO: 7441102 NR Description: ribosomal protein L13.A, cytosolic - rape
  misc_feature (1)..(141): Homolog of NCBI NO: 15237847 NR Description: 60S ribosomal protein L13; protein id: supported by cDNA: gi_14190434, supported by cDNA: gi_15450564 thaliana] >gi|10176857|dbj|BAB10063.1| 60S ribosomal protein L13
  misc_feature (1)..(141): Homolog of NCBI NO: 34897952 NR Description: ESTs AU077873(S1878),D40121(S1878) correspond to region of the predicted gene.~Similar to Arabidopsis thaliana 60S
  misc_feature (1)..(141): Homolog of NCBI NO: 18873677 NR Description: putative cold-induced protein [Oryza sativa
  misc_feature (1)..(141): Homolog of NCBI NO: 12580867 NR Description: 60S ribosomal protein L13E [Picea abies]

SEQ ID NO: 84373 - DNA, 712 bp, Arabidopsis thaliana
  misc_feature (1)..(712): Ceres Seq. ID no. 12674891
  misc_feature: MA Experiment ID: 108434 Result: Up-regulated in Transcription
  misc_feature: MA Experiment 108434 PARAMETER Experiment Name: At_Root_Tips_cDNA_P Parameter: Tissue Value: Root Tips
  misc_feature: MA Experiment ID: 108462 Result: Down-regulated in Transcription
  misc_feature: MA Experiment 108462 PARAMETER Experiment Name: At_Germinating_Seeds_cDNA_P Parameter: Age (day) Value: 2 vs. 0
  misc_feature: MA Experiment 108462 PARAMETER Experiment Name: At_Germinating_Seeds_cDNA_P Parameter: Tissue Value: Germinating Seeds
  misc_feature: MA Experiment ID: 108463 Result: Down-regulated in Transcription
  misc_feature: MA Experiment 108463 PARAMETER Experiment Name: At_Germinating_Seeds_cDNA_P Parameter: Age (day) Value: 3 vs. 0
  misc_feature: MA Experiment 108463 PARAMETER Experiment Name: At_Germinating_Seeds_cDNA_P Parameter: Tissue Value: Germinating Seeds
  misc_feature: MA Experiment ID: 108488 Result: Up-regulated in Transcription
  misc_feature: MA Experiment ID: 108489 Result: Up-regulated in Transcription
  misc_feature: MA Experiment ID: 108573 Result: Down-regulated in Transcription
  misc_feature: MA Experiment 108573 PARAMETER Experiment Name: At_Drought_cDNA_P Parameter: Timepoint (hr) Value: 6
  misc_feature: MA Experiment 108573 PARAMETER Experiment Name: At_Drought_cDNA_P Parameter: Tissue Value: Aerial
  misc_feature: MA Experiment 108573 PARAMETER Experiment Name: At_Drought_cDNA_P Parameter: Treatment Value: Drought vs. No Drought
  misc_feature: MA Experiment ID: 108595 Result: Down-regulated in Transcription
  misc_feature: MA Experiment 108595 PARAMETER Experiment Name: At_Ler-pi_Ovule_cDNA_P Parameter: Plant Line Value: null
  misc_feature: MA Experiment ID: 20000227 Result: Up-regulated in Transcription
  misc_feature: MA Experiment 20000227 PARAMETER Experiment Name: At_Root-Tips-vs-Tops_P Parameter: Tissue Value: Root Tips vs. Root Tops
  misc_feature: MA Experiment ID: 20000437 Result: Down-regulated in Transcription
  misc_feature: MA Experiment 20000437 PARAMETER Experiment Name: At_Drought_P Parameter: Age (day) Value: 8
  misc_feature: MA Experiment 20000437 PARAMETER Experiment Name: At_Drought_P Parameter: Organism Value: A. thaliana
  misc_feature: MA Experiment 20000437 PARAMETER Experiment Name: At_Drought_P Parameter: Plant Line Value: WS
  misc_feature: MA Experiment 20000437 PARAMETER Experiment Name: At_Drought_P Parameter: Timepoint (hr) Value: 24
  misc_feature: MA Experiment 20000437 PARAMETER Experiment Name: At_Drought_P Parameter: Tissue Value: Whole Plant
  misc_feature: MA Experiment 20000437 PARAMETER Experiment Name: At_Drought_P Parameter: Treatment Value: Drought vs. No Drought
  misc_feature: MA Experiment ID: 20000573 Result: Down-regulated in Transcription
  misc_feature: MA Experiment 20000573 PARAMETER Experiment Name: At_100uM_ABA_Mutants__P Parameter: Organism Value: A. thaliana
  misc_feature: MA Experiment 20000573 PARAMETER Experiment Name: At_100uM_ABA_Mutants__P Parameter: Plant Line Value: CS22 vs. Ler wt
  misc_feature: MA Experiment 20000573 PARAMETER Experiment Name: At_100uM_ABA_Mutants__P Parameter: Timepoint (hr) Value: N/A
  misc_feature: MA Experiment 20000573 PARAMETER Experiment Name: At_100uM_ABA_Mutants__P Parameter: Tissue Value: Whole Plant
  misc_feature: MA Experiment 20000573 PARAMETER Experiment Name: At_100uM_ABA_Mutants__P Parameter: Treatment Value: None
  misc_feature: MA Experiment ID: 20000574 Result: Down-regulated in Transcription
  misc_feature: MA Experiment 20000574 PARAMETER Experiment Name: At_100uM_ABA_Mutants__P Parameter: Organism Value: A. thaliana
  misc_feature: MA Experiment 20000574 PARAMETER Experiment Name: At_100uM_ABA_Mutants__P Parameter: Plant Line Value: CS23 vs. Ler wt
  misc_feature: MA Experiment 20000574 PARAMETER Experiment Name: At_100uM_ABA_Mutants__P Parameter: Timepoint (hr) Value: N/A
  misc_feature: MA Experiment 20000574 PARAMETER Experiment Name: At_100uM_ABA_Mutants__P Parameter: Tissue Value: Whole Plant
  misc_feature: MA Experiment 20000574 PARAMETER Experiment Name: At_100uM_ABA_Mutants__P Parameter: Treatment Value: None
  misc_feature: MA Experiment ID: 20000794 Result: Down-regulated in Transcription
  misc_feature: MA Experiment 20000794 PARAMETER Experiment Name: At_Petals_P Parameter: Age (day) Value: 23-25 days
  misc_feature: MA Experiment 20000794 PARAMETER Experiment Name: At_Petals_P Parameter: Plant Line Value: WS
  misc_feature: MA Experiment 20000794 PARAMETER Experiment Name: At_Petals_P Parameter: Tissue Value: Petals vs. Whole plant
  misc_feature: MA Experiment ID: 20001557 Result: Up-regulated in Transcription
  misc_feature: MA Experiment 20001557 PARAMETER Experiment Name: At_Drought_Soil_Dry_P Parameter: Age (day) Value: 27
  misc_feature: MA Experiment 20001557 PARAMETER Experiment Name: At_Drought_Soil_Dry_P Parameter: Organism Value: A. thaliana
  misc_feature: MA Experiment 20001557 PARAMETER Experiment Name: At_Drought_Soil_Dry_P Parameter: Plant Line Value: WS
  misc_feature: MA Experiment 20001557 PARAMETER Experiment Name: At_Drought_Soil_Dry_P Parameter: Post Timepoint (hr) Value: 3
  misc_feature: MA Experiment 20001557 PARAMETER Experiment Name: At_Drought_Soil_Dry_P Parameter: Post-Treatment Value: Re-Water vs. No Drought
  misc_feature: MA Experiment 20001557 PARAMETER Experiment Name: At_Drought_Soil_Dry_P Parameter: Timepoint (day) Value: 13
  misc_feature: MA Experiment 20001557 PARAMETER Experiment Name: At_Drought_Soil_Dry_P Parameter: Treatment Value: Drought vs. No Drought
  misc_feature: MA Experiment ID: 20001558 Result: Up-regulated in Transcription
  misc_feature: MA Experiment 20001558 PARAMETER Experiment Name: At_Drought_Soil_Dry_P Parameter: Age (day) Value: 27
  misc_feature: MA Experiment 20001558 PARAMETER Experiment Name: At_Drought_Soil_Dry_P Parameter: Organism Value: A. thaliana
  misc_feature: MA Experiment 20001558 PARAMETER Experiment Name: At_Drought_Soil_Dry_P Parameter: Plant Line Value: WS
  misc_feature: MA Experiment 20001558 PARAMETER Experiment Name: At_Drought_Soil_Dry_P Parameter: Post Timepoint (hr) Value: 6
  misc_feature: MA Experiment 20001558 PARAMETER Experiment Name: At_Drought_Soil_Dry_P Parameter: Post-Treatment Value: Re-Water vs. No Drought
  misc_feature: MA Experiment 20001558 PARAMETER Experiment Name: At_Drought_Soil_Dry_P Parameter: Timepoint (day) Value: 13
  misc_feature: MA Experiment 20001558 PARAMETER Experiment Name: At_Drought_Soil_Dry_P Parameter: Treatment Value: Drought vs. No Drought
  misc_feature: MA Experiment ID: 20001560 Result: Up-regulated in Transcription
  misc_feature: MA Experiment 20001560 PARAMETER Experiment Name: At_Drought_Soil_Dry_P Parameter: Age (day) Value: 28
  misc_feature: MA Experiment 20001560 PARAMETER Experiment Name: At_Drought_Soil_Dry_P Parameter: Organism Value: A. thaliana
  misc_feature: MA Experiment 20001560 PARAMETER Experiment Name: At_Drought_Soil_Dry_P Parameter: Plant Line Value: WS
  misc_feature: MA Experiment 20001560 PARAMETER Experiment Name: At_Drought_Soil_Dry_P Parameter: Post Timepoint (hr) Value: None
  misc_feature: MA Experiment 20001560 PARAMETER Experiment Name: At_Drought_Soil_Dry_P Parameter: Post-Treatment Value: None
  misc_feature: MA Experiment 20001560 PARAMETER Experiment Name: At_Drought_Soil_Dry_P Parameter: Timepoint (day) Value: 14
  misc_feature: MA Experiment 20001560 PARAMETER Experiment Name: At_Drought_Soil_Dry_P Parameter: Treatment Value: Drought vs. No Drought
  misc_feature: MA Experiment ID: 20001757 Result: Up-regulated in Transcription
  misc_feature: MA Experiment 20001757 PARAMETER Experiment Name: At_50mM_NH4NO3_L-to-H_P Parameter: Timepoint (hr) Value: 6
  misc_feature: MA Experiment 20001757 PARAMETER Experiment Name: At_50mM_NH4NO3_L-to-H_P Parameter: Tissue Value: Leaf
  misc_feature: MA Experiment 20001757 PARAMETER Experiment Name: At_50mM_NH4NO3_L-to-H_P Parameter: Treatment Value: 50mM NH4NO3 vs 100mM Mannitol
ctcatccccttaaaaaaccctaagagtagagactctctcaatcccggcggcgaagatgaagtacaacccaagagtgacctcttctcgcagaaagaacaggaaggctcatttcacagcttcctccagcgagaggcgtgtgataatgagctctcctctctccaccgatcttcgtcagaagtacaatgtcagatccatgccgatccgtaaagacgacgaggttcagatcgttcgtggtacttacaagggacgtgaaggcaaagttgttcaggtttaccgtcgcaaatgggtgattcacatcgagagaatcacgagggagaaggtgaatggaacaaccgtgaacgttgggattcagccgtcgaaagttgtgataacgaagcttcgtcttgataaagataggaaatcgcttttggagaggaaggctaagggacgtgctgctgctgataaggagaagggtactaagtttacgtctgaggatgttatgcagaacgttgattaagtaagaaggaagaagaaatcttcttgaaaggttttatcttttagagttatcttcaatcgctttttaattttcaagttttggatattttggaatgttgtcagtggatctttatggtgctagacatgagaacttatgttttgattttgagtatttgaagtttggttatggaagtttatctctttgtctcattctttataatgatgtgtttgtttggtt

SEQ ID NO: 84374 - protein, 146 aa, Arabidopsis thaliana; identical to SEQ ID NO: 35384
  peptide (1)..(146): Ceres Seq. ID no. 12674892
  misc_feature (1)..(146): Homolog of NCBI NO: 15229631 NR Description: 60S RIBOSOMAL PROTEIN - like; protein id: supported by cDNA: gi_16323425 [Arabidopsis thaliana]
  misc_feature (1)..(145): Homolog of NCBI NO: 3914740 NR Description: 60S ribosomal protein L26
  misc_feature (1)..(146): Homolog of NCBI NO: 15240766 NR Description: 60S ribosomal protein L26; protein id: supported by cDNA: 2561., supported by cDNA: gi_17473655, by cDNA: gi_20148598 [Arabidopsis thaliana]
  misc_feature (1)..(141): Homolog of NCBI NO: 34895672 NR Description: putative ribosomal protein L26 [Oryza sativa
  misc_feature (1)..(119): Homolog of NCBI NO: 3747050 NR Description: ribosomal protein L26 [Zea mays]
  misc_feature (1)..(141): Homolog of NCBI NO: 132827 NR Description: 60S RIBOSOMAL PROTEIN L26 >gi|71312|pir||R5RT26
  misc_feature (1)..(141): Homolog of NCBI NO: 4506621 NR Description: ribosomal protein L26; 60S ribosomal protein L26 sapiens] >gi|6677777|ref|NP_033106.1| ribosomal protein L26 [Mus >gi|20881715|ref|XP_122248.1| ribosomal protein L26 [Mus
  misc_feature (1)..(139): Homolog of NCBI NO: 7705813 NR Description: ribosomal protein L26-like 1; ribosomal protein
  misc_feature (1)..(141): Homolog of NCBI NO: 27729769 NR Description: similar to ribosomal protein L26 - mouse [Rattus
  misc_feature (1)..(141): Homolog of NCBI NO: 292435 NR Description: ribosomal protein L26

SEQ ID NO: 84375 - protein, 117 aa, Arabidopsis thaliana; identical to SEQ ID NO: 35385
  peptide (1)..(117): Ceres Seq. ID no. 12674893
  misc_feature (1)..(117): Homolog of NCBI NO: 15229631 NR Description: 60S RIBOSOMAL PROTEIN - like; protein id: supported by cDNA: gi_16323425 [Arabidopsis thaliana]
  misc_feature (1)..(116): Homolog of NCBI NO: 3914740 NR Description: 60S ribosomal protein L26
  misc_feature (1)..(117): Homolog of NCBI NO: 15240766 NR Description: 60S ribosomal protein L26; protein id: supported by cDNA: 2561., supported by cDNA: gi_17473655, by cDNA: gi_20148598 [Arabidopsis thaliana]
  misc_feature (1)..(112): Homolog of NCBI NO: 34895672 NR Description: putative ribosomal protein L26 [Oryza sativa
  misc_feature (1)..(90): Homolog of NCBI NO: 3747050 NR Description: ribosomal protein L26 [Zea mays]
  misc_feature (1)..(112): Homolog of NCBI NO: 132827 NR Description: 60S RIBOSOMAL PROTEIN L26 >gi|71312|pir||R5RT26
  misc_feature (1)..(112): Homolog of NCBI NO: 4506621 NR Description: ribosomal protein L26; 60S ribosomal protein L26 sapiens] >gi|6677777|ref|NP_033106.1| ribosomal protein L26 [Mus >gi|20881715|ref|XP_122248.1| ribosomal protein L26 [Mus
  misc_feature (1)..(110): Homolog of NCBI NO: 7705813 NR Description: ribosomal protein L26-like 1; ribosomal protein
  misc_feature (1)..(112): Homolog of NCBI NO: 27729769 NR Description: similar to ribosomal protein L26 - mouse [Rattus
  misc_feature (1)..(112): Homolog of NCBI NO: 292435 NR Description: ribosomal protein L26

SEQ ID NO: 84376 - protein, 100 aa, Arabidopsis thaliana; identical to SEQ ID NO: 35386
  peptide (1)..(100): Ceres Seq. ID no. 12674894
  misc_feature (1)..(100): Homolog of NCBI NO: 15229631 NR Description: 60S RIBOSOMAL PROTEIN - like; protein id: supported by cDNA: gi_16323425 [Arabidopsis thaliana]
  misc_feature (1)..(99): Homolog of NCBI NO: 3914740 NR Description: 60S ribosomal protein L26
  misc_feature (1)..(100): Homolog of NCBI NO: 15240766 NR Description: 60S ribosomal protein L26; protein id: supported by cDNA: 2561., supported by cDNA: gi_17473655, by cDNA: gi_20148598 [Arabidopsis thaliana]
  misc_feature (1)..(95): Homolog of NCBI NO: 34895672 NR Description: putative ribosomal protein L26 [Oryza sativa
  misc_feature (1)..(73): Homolog of NCBI NO: 3747050 NR Description: ribosomal protein L26 [Zea mays]
  misc_feature (1)..(95): Homolog of NCBI NO: 132827 NR Description: 60S RIBOSOMAL PROTEIN L26 >gi|71312|pir||R5RT26
  misc_feature (1)..(95): Homolog of NCBI NO: 4506621 NR Description: ribosomal protein L26; 60S ribosomal protein L26 sapiens] >gi|6677777|ref|NP_033106.1| ribosomal protein L26 [Mus >gi|20881715|ref|XP_122248.1| ribosomal protein L26 [Mus
  misc_feature (1)..(93): Homolog of NCBI NO: 7705813 NR Description: ribosomal protein L26-like 1; ribosomal protein
  misc_feature (1)..(95): Homolog of NCBI NO: 27729769 NR Description: similar to ribosomal protein L26 - mouse [Rattus
  misc_feature (1)..(95): Homolog of NCBI NO: 292435 NR Description: ribosomal protein L26

SEQ ID NO: 84377 - DNA, 3039 bp, Arabidopsis thaliana
  misc_feature (1)..(3039): Ceres Seq. ID no. 12674895
  misc_feature: MA Experiment ID: 20000171 Result: Up-regulated in Transcription
  misc_feature: MA Experiment 20000171 PARAMETER Experiment Name: At_42deg_Heat_P Parameter: Age (day) Value: 14
  misc_feature: MA Experiment 20000171 PARAMETER Experiment Name: At_42deg_Heat_P Parameter: Organism Value: A. thaliana
  misc_feature: MA Experiment 20000171 PARAMETER Experiment Name: At_42deg_Heat_P Parameter: Plant Line Value: WS
  misc_feature: MA Experiment 20000171 PARAMETER Experiment Name: At_42deg_Heat_P Parameter: Temperature (deg C) Value: 42 vs. 22
  misc_feature: MA Experiment 20000171 PARAMETER Experiment Name: At_42deg_Heat_P Parameter: Timepoint (hr) Value: 1
  misc_feature: MA Experiment 20000171 PARAMETER Experiment Name: At_42deg_Heat_P Parameter: Tissue Value: Aerial
  misc_feature: MA Experiment ID: 20000286 Result: Down-regulated in Transcription
  misc_feature: MA Experiment 20000286 PARAMETER Experiment Name: At_Open_Flower_P Parameter: Age (day) Value: 21
  misc_feature: MA Experiment 20000286 PARAMETER Experiment Name: At_Open_Flower_P Parameter: Plant Line Value: WS
  misc_feature: MA Experiment 20000286 PARAMETER Experiment Name: At_Open_Flower_P Parameter: Tissue Value: Half Open vs. Whole Plant
  misc_feature: MA Experiment ID: 20000437 Result: Up-regulated in Transcription
  misc_feature: MA Experiment 20000437 PARAMETER Experiment Name: At_Drought_P Parameter: Age (day) Value: 8
  misc_feature: MA Experiment 20000437 PARAMETER Experiment Name: At_Drought_P Parameter: Organism Value: A. thaliana
  misc_feature: MA Experiment 20000437 PARAMETER Experiment Name: At_Drought_P Parameter: Plant Line Value: WS
  misc_feature: MA Experiment 20000437 PARAMETER Experiment Name: At_Drought_P Parameter: Timepoint (hr) Value: 24
  misc_feature: MA Experiment 20000437 PARAMETER Experiment Name: At_Drought_P Parameter: Tissue Value: Whole Plant
  misc_feature: MA Experiment 20000437 PARAMETER Experiment Name: At_Drought_P Parameter: Treatment Value: Drought vs. No Drought
  misc_feature: MA Experiment ID: 20000439 Result: Up-regulated in Transcription
  misc_feature: MA Experiment 20000439 PARAMETER Experiment Name: At_Roots__P Parameter: Age (day) Value: 14 vs. 21
  misc_feature: MA Experiment 20000439 PARAMETER Experiment Name: At_Roots__P Parameter: Organism Value: A. thaliana
  misc_feature: MA Experiment 20000439 PARAMETER Experiment Name: At_Roots__P Parameter: Tissue Value: Roots vs. Whole Plant
  misc_feature: MA Experiment ID: 20000496 Result: Down-regulated in Transcription
  misc_feature: MA Experiment 20000496 PARAMETER Experiment Name: At_Guard_Cells_P Parameter: Harvest Date Value: 7/19/2002
  misc_feature: MA Experiment 20000496 PARAMETER Experiment Name: At_Guard_Cells_P Parameter: Organism Value: Canola
  misc_feature: MA Experiment 20000496 PARAMETER Experiment Name: At_Guard_Cells_P Parameter: Tissue Value: Guard Cells vs. Leaves
attaaatttttatttcccagcttaaattttgaaacggtgaaatttcacagagagagagagaatcttgaaactatcaaacattttgaattctatcctcttagctcagctgaaattttcttcttctcagctcagattttttttgtttaattcttcgctagctgtgagtttctctgatcgttaagagactctgtttcgtttccgagaaagtctgcatagggaaaatttaacctcacattgggaaaattttggctctatactgacgaaatgccaagcattagagctccagctgcgaagaagaccactacactcacggttgctgtgaaatgtagaccgttaatggagaaagaacgtggtagagacattgttcgagtgaataactctaaggaagtggttgtgttagacccagacttatccaaggattatcttgaccgaattcagaatcggactaaagagaagaaatattgttttgatcatgcttttggacctgagagcaccaacaagaatgtgtataggagtatgtcttctgtgatctctagtgttgttcatggactcaatgctacagtttttgcctatggttccactggaagtggcaaaacatatacaatggttggaactcgaagtgatcctggattgatggttctcagcttgaatactatttttgatatgatcaagagtgacaagagctcagatgagtttgaagtgacttgctcatatcttgaagtttacaatgaagttatctacgatctgcttgaaaaatcctctggtcatttagagcttagagaggatccagagcagggaatagtagttgcaggcctgcgatcaataaaggtccattctgctgataggattcttgagctgctgaacttggggaacagtagacgaaaaactgagagcacagagatgaatggaacatcatcaaggtctcatgcagttctagagattgcagtcaaaagaaggcaaaagaatcaaaatcaagtcatgagagggaaactcgcccttgtagatcttgctgggagtgaaagagctgctgagacaaacaatggaggtcaaaaattgagggatggagcaaatatcaatcgctcactccttgcactagcaaattgcataaatgctttggggaagcaacacaaaaagggtcttgcttatgtaccataccgaaacagcaaacttacgcggattctcaaagatggtctgagtgggaactcccagacagtgatggttgcaactatatcacctgctgatagtcagtatcatcatactgtaaacacattgaaatatgctgaccgagcaaaagagattaagacacacatccagaaaaatattggtaccatcgatactcatatgtcagactaccaacgaatgatcgacaatcttcaagtaagttaattacttttatctacttctgttacaaaatgaatatagtaacagtatataactcagagctttgctttcatagagtgaggtttctcagctgaagacacaactagctgaaaaagagtcgcagctaagcatcaaaccttttgaaagaggtgttgaacgtgaactttcttggttggatggtttaagccaccagatcagtgaaaatgttcaagaccgtataaacttacagaaggcgttatttgagcttgaggaaactaacctcagaaatcgcactgaacttcagcatcttgatgatgcaattgcgaaacaggcgacagagaaagatgttgtcgaagctctaagtagcagacgacaagtaatacttgataatatccgcgacaatgatgaagccggtgttaactaccagagggatattgaagaaaatgaaaaacatcgttgcgaactacaggatatgctcaatgaagcaataaataacaatggaaacaaaacgtatctgcatattcttaatcagtataagctcctggggatgggtaatacggaactacagtttgaaatggcaatgagggaccaaattatttacaaccaaagggaagcccagagaaacctatggaatttgctcatgggtttaggagttgaagagaaacaagtgttcgatctcgctgcaaaacaaggaatcacaatcgaagactggagtagtatagcgttgtttccaggacttccttaccggaaacagacaccgagtttcataccagcaaacatccctttcgtgggccactcatattctaaatcctcctgcactttccagagctatcaagacccttcttcgaaaggacaacaatgggctccaactcctactttatgcagagaagaacaccacagctcttactacttcatgagacaggagccaccagcatttgtcaatcttaggaaaagccacgatggttgggttggtggcagcagaccagcttcacggattgacacaggaggcaatcatcgccgagtctcatatccacaaactgtgaacaattcttctcctcggatggcctcaggtcctactttttaccagactcctcaaagggaaatgttgctcaacacaacgagtccttatagtagtccgcgagtgggactcatcaacggggccaccaccccgtccgtgcaacctttctatggaagtcctcgtgccgtgactgtgagaaacggttcatacaacactccactcgcccccgctgcagtttcaactaaaggtgcgagaaaccaacaacgagtgtttggaacgagcccactctcaggaaccaaaggcgtcaagaactcttcatatggacagaacagtcacacaaagttgtacagaggaggaggcactaaaggtcacagtaaaggaaacaatactcaacgccaacaccaatgacatgagaccaaaacatgggttcgaattttcgagtcagttgaggcacagttttttaaacgcctcacactcagtctcactctcacatgactcgattttttgtttgtgtttgtacagctatttccactgtattgatttctttctgatacgattgatgtgtgtatatatatgggaaagaggttggtaaaaagtaagaagacaattgttccgtggtgaaccaaaaaaaaagctcaacaaatcttcagctttgttttcac

SEQ ID NO: 84378 - protein, 373 aa, Arabidopsis thaliana
  peptide (1)..(373): Ceres Seq. ID no. 12674896
  misc_feature (1)..(372): Homolog of NCBI NO: 34896882 NR Description: putative kinesin-like protein [Oryza sativa
  misc_feature (1)..(373): Homolog of NCBI NO: 21539527 NR Description: kinesin-like protein [Arabidopsis thaliana]
  misc_feature (12)..(371): Homolog of NCBI NO: 23489919 NR Description: kinesin-like protein-related [Plasmodium yoelii
  misc_feature (11)..(371): Homolog of NCBI NO: 28277259 NR Description: Similar to hypothetical protein FLJ37300 [Xenopus
  misc_feature (12)..(371): Homolog of NCBI NO: 23613466 NR Description: kinesin, putative [Plasmodium falciparum 3D7]
  misc_feature (11)..(371): Homolog of NCBI NO: 23397458 NR Description: hypothetical protein FLJ37300 [Homo sapiens]
  misc_feature (17)..(363): Homolog of NCBI NO: 28838703 NR Description: Similar to hypothetical protein DKFZp434G2226
  misc_feature (55)..(371): Homolog of NCBI NO: 37544008 NR Description: similar to kinesin family member 18A; kinesin
  misc_feature (9)..(371): Homolog of NCBI NO: 34873908 NR Description: similar to 3000004C01Rik protein [Rattus
  misc_feature (9)..(371): Homolog of NCBI NO: 37537560 NR Description: RIKEN cDNA 3000004C01 [Mus musculus]
MPSIRAPAAKKTTTLTVAVKCRPLMEKERGRDIVRVNNSKEVVVLDPDLSKDYLDRIQNRTKEKKYCFDHAFGPESTNKNVYRSMSSVISSVVHGLNATVFAYGSTGSGKTYTMVGTRSDPGLMVLSLNTIFDMIKSDKSSDEFEVTCSYLEVYNEVIYDLLEKSSGHLELREDPEQGIVVAGLRSIKVHSADRILELLNLGNSRRKTESTEMNGTSSRSHAVLEIAVKRRQKNQNQVMRGKLALVDLAGSERAAETNNGGQKLRDGANINRSLLALANCINALGKQHKKGLAYVPYRNSKLTRILKDGLSGNSQTVMVATISPADSQYHHTVNTLKYADRAKEIKTHIQKNIGTIDTHMSDYQRMIDNLQVS

SEQ ID NO: 84379 - protein, 349 aa, Arabidopsis thaliana
  peptide (1)..(349): Ceres Seq. ID no. 12674897
  misc_feature (1)..(348): Homolog of NCBI NO: 34896882 NR Description: putative kinesin-like protein [Oryza sativa
  misc_feature (1)..(349): Homolog of NCBI NO: 21539527 NR Description: kinesin-like protein [Arabidopsis thaliana]
  misc_feature (1)..(347): Homolog of NCBI NO: 23489919 NR Description: kinesin-like protein-related [Plasmodium yoelii
  misc_feature (1)..(347): Homolog of NCBI NO: 28277259 NR Description: Similar to hypothetical protein FLJ37300 [Xenopus
  misc_feature (1)..(347): Homolog of NCBI NO: 23613466 NR Description: kinesin, putative [Plasmodium falciparum 3D7]
  misc_feature (1)..(347): Homolog of NCBI NO: 23397458 NR Description: hypothetical protein FLJ37300 [Homo sapiens]
  misc_feature (1)..(339): Homolog of NCBI NO: 28838703 NR Description: Similar to hypothetical protein DKFZp434G2226
  misc_feature (31)..(347): Homolog of NCBI NO: 37544008 NR Description: similar to kinesin family member 18A; kinesin
  misc_feature (1)..(347): Homolog of NCBI NO: 34873908 NR Description: similar to 3000004C01Rik protein [Rattus
  misc_feature (1)..(347): Homolog of NCBI NO: 37537560 NR Description: RIKEN cDNA 3000004C01 [Mus musculus]
MEKERGRDIVRVNNSKEVVVLDPDLSKDYLDRIQNRTKEKKYCFDHAFGPESTNKNVYRSMSSVISSVVHGLNATVFAYGSTGSGKTYTMVGTRSDPGLMVLSLNTIFDMIKSDKSSDEFEVTCSYLEVYNEVIYDLLEKSSGHLELREDPEQGIVVAGLRSIKVHSADRILELLNLGNSRRKTESTEMNGTSSRSHAVLEIAVKRRQKNQNQVMRGKLALVDLAGSERAAETNNGGQKLRDGANINRSLLALANCINALGKQHKKGLAYVPYRNSKLTRILKDGLSGNSQTVMVATISPADSQYHHTVNTLKYADRAKEIKTHIQKNIGTIDTHMSDYQRMIDNLQVS

SEQ ID NO: 84380 - protein, 317 aa, Arabidopsis thaliana
  peptide (1)..(317): Ceres Seq. ID no. 12674898
  misc_feature (1)..(204): Homolog of NCBI NO: 34896882 NR Description: putative kinesin-like protein [Oryza sativa
MLNEAINNNGNKTYLHILNQYKLLGMGNTELQFEMAMRDQIIYNQREAQRNLWNLLMGLGVEEKQVFDLAAKQGITIEDWSSIALFPGLPYRKQTPSFIPANIPFVGHSYSKSSCTFQSYQDPSSKGQQWAPTPTLCREEHHSSYYFMRQEPPAFVNLRKSHDGWVGGSRPASRIDTGGNHRRVSYPQTVNNSSPRMASGPTFYQTPQREMLLNTTSPYSSPRVGLINGATTPSVQPFYGSPRAVTVRNGSYNTPLAPAAVSTKGARNQQRVFGTSPLSGTKGVKNSSYGQNSHTKLYRGGGTKGHSKGNNTQRQHQ

SEQ ID NO: 84381 - DNA, 1227 bp, Arabidopsis thaliana
  misc_feature (1)..(1227): Ceres Seq. ID no. 12674899
  misc_feature: MA Experiment ID: 108462 Result: Down-regulated in Transcription
  misc_feature: MA Experiment 108462 PARAMETER Experiment Name: At_Germinating_Seeds_cDNA_P Parameter: Age (day) Value: 2 vs. 0
  misc_feature: MA Experiment 108462 PARAMETER Experiment Name: At_Germinating_Seeds_cDNA_P Parameter: Tissue Value: Germinating Seeds
  misc_feature: MA Experiment ID: 108463 Result: Down-regulated in Transcription
  misc_feature: MA Experiment 108463 PARAMETER Experiment Name: At_Germinating_Seeds_cDNA_P Parameter: Age (day) Value: 3 vs. 0
  misc_feature: MA Experiment 108463 PARAMETER Experiment Name: At_Germinating_Seeds_cDNA_P Parameter: Tissue Value: Germinating Seeds
  misc_feature: MA Experiment ID: 108464 Result: Down-regulated in Transcription
  misc_feature: MA Experiment 108464 PARAMETER Experiment Name: At_Germinating_Seeds_cDNA_P Parameter: Age (day) Value: 4 vs. 0
  misc_feature: MA Experiment 108464 PARAMETER Experiment Name: At_Germinating_Seeds_cDNA_P Parameter: Tissue Value: Germinating Seeds
  misc_feature: MA Experiment ID: 108573 Result: Down-regulated in Transcription
  misc_feature: MA Experiment 108573 PARAMETER Experiment Name: At_Drought_cDNA_P Parameter: Timepoint (hr) Value: 6
  misc_feature: MA Experiment 108573 PARAMETER Experiment Name: At_Drought_cDNA_P Parameter: Tissue Value: Aerial
  misc_feature: MA Experiment 108573 PARAMETER Experiment Name: At_Drought_cDNA_P Parameter: Treatment Value: Drought vs. No Drought
  misc_feature: MA Experiment ID: 108595 Result: Down-regulated in Transcription
  misc_feature: MA Experiment 108595 PARAMETER Experiment Name: At_Ler-pi_Ovule_cDNA_P Parameter: Plant Line Value: null
  misc_feature: MA Experiment ID: 20000173 Result: Down-regulated in Transcription
  misc_feature: MA Experiment 20000173 PARAMETER Experiment Name: At_42deg_Heat_P Parameter: Age (day) Value: 14
  misc_feature: MA Experiment 20000173 PARAMETER Experiment Name: At_42deg_Heat_P Parameter: Organism Value: A. thaliana
  misc_feature: MA Experiment 20000173 PARAMETER Experiment Name: At_42deg_Heat_P Parameter: Plant Line Value: WS
  misc_feature: MA Experiment 20000173 PARAMETER Experiment Name: At_42deg_Heat_P Parameter: Temperature (deg C) Value: 42 vs. 22
  misc_feature: MA Experiment 20000173 PARAMETER Experiment Name: At_42deg_Heat_P Parameter: Timepoint (hr) Value: 6
  misc_feature: MA Experiment 20000173 PARAMETER Experiment Name: At_42deg_Heat_P Parameter: Tissue Value: Aerial
  misc_feature: MA Experiment ID: 20000436 Result: Down-regulated in Transcription
  misc_feature: MA Experiment 20000436 PARAMETER Experiment Name: At_Drought_P Parameter: Age (day) Value: 7
  misc_feature: MA Experiment 20000436 PARAMETER Experiment Name: At_Drought_P Parameter: Organism Value: A. thaliana
  misc_feature: MA Experiment 20000436 PARAMETER Experiment Name: At_Drought_P Parameter: Plant Line Value: WS
  misc_feature: MA Experiment 20000436 PARAMETER Experiment Name: At_Drought_P Parameter: Timepoint (hr) Value: 12
  misc_feature: MA Experiment 20000436 PARAMETER Experiment Name: At_Drought_P Parameter: Tissue Value: Whole Plant
  misc_feature: MA Experiment 20000436 PARAMETER Experiment Name: At_Drought_P Parameter: Treatment Value: Drought vs. No Drought
  misc_feature: MA Experiment ID: 20000437 Result: Down-regulated in Transcription
  misc_feature: MA Experiment 20000437 PARAMETER Experiment Name: At_Drought_P Parameter: Age (day) Value: 8
  misc_feature: MA Experiment 20000437 PARAMETER Experiment Name: At_Drought_P Parameter: Organism Value: A. thaliana
  misc_feature: MA Experiment 20000437 PARAMETER Experiment Name: At_Drought_P Parameter: Plant Line Value: WS
  misc_feature: MA Experiment 20000437 PARAMETER Experiment Name: At_Drought_P Parameter: Timepoint (hr) Value: 24
  misc_feature: MA Experiment 20000437 PARAMETER Experiment Name: At_Drought_P Parameter: Tissue Value: Whole Plant
  misc_feature: MA Experiment 20000437 PARAMETER Experiment Name: At_Drought_P Parameter: Treatment Value: Drought vs. No Drought
aacaaaactctcgaagtcgcaacagaaaagaaacgagagagatatggtggtaggcggcggaggagaaggagatcagaagagaagcagcggagaaatgatggcgatggcgagtttattcaacgatcagcagaatccaattcaacagtttcaggttaaattcaaagaagtagaaactaatttcaagacatggttgtcgaaacagtcgattccggtggaagccgccgtcgtatccaccatgagcggtgtacaaggagctttcattggtggtctcatgggaacactctctcctgaaatgcctcaagccggcgttgaccctcaagccatagcttcgatgaaacaagctcaggtttcaactctatataaaccctatcctcattcaaatgtttgtaaaattgaggtatgagaattagggtttttgaatctgtaggctcttgtgggtggtccttgggtccaagctcggaattttgctgcaattactggtgtgaatgctggaattgcttctgttatgaagcggattagaggcaaagaggatattgaatctgcagtggtggcagcgttaggatctggatttgcatactcattggtgagccaaggattgcaaggacaacctatgaatgcaatcactactgctgctggttttgctgtttttcaaggagtgttttttaaattgggagaaagattctctaaaccgagtactgaagatccatttttcacaagaggaaggacaatgctagtgaagctaggtttggagaaatacgagaagaacttcaagaaaggacttttaactgatcccacattgccattgctcactgatagcgcgctgaaagatgcgaacatcccaccagggccaagacttatgatactagatcatatccagagggacccggagataaagggcaaacgaaagtaggagccatgttgtttaatcaaatatgttttgatggtaacgatcttcaaacacatatgtaatgccttttacttttagctgctattgccatgaagagctcttgttagatacttctgtttctattaccaatgtttgattatctttaaaaaaattgagtagttcgtctcaaatcaaattggattataggttctgaataaaacgaaaatgaaatatgctttgtatgagaataagatgtttatattatgtatagttgattggcttaagatcaagactcgataaaattttggttcatacaattggccaatcaccaaagtgattcg

SEQ ID NO: 84382 - protein, 134 aa, Arabidopsis thaliana
  peptide (1)..(134): Ceres Seq. ID no. 12674900
  misc_feature (1)..(59): Pfam Name: Tim17/Tim22/Tim23 family Pfam Description: Tim17/Tim22/Tim23 family
  misc_feature (1)..(134): Homolog of NCBI NO: 15229167 NR Description: putative protein; protein id: At3g49560.1, by cDNA: 15698., supported by cDNA: gi_13430557 [Arabidopsis
  misc_feature (1)..(133): Homolog of NCBI NO: 15238598 NR Description: putative protein; protein id: At5g24650.1, by cDNA: 5684., supported by cDNA: gi_17979478 [Arabidopsis >gi|10177865|dbj|BAB11217.1|
  misc_feature (1)..(133): Homolog of NCBI NO: 21593899 NR Description: unknown [Arabidopsis thaliana]
  misc_feature (1)..(125): Homolog of NCBI NO: 32487911 NR Description: OJ000315_02.15 [Oryza sativa (japonica
MKRIRGKEDIESAVVAALGSGFAYSLVSQGLQGQPMNAITTAAGFAVFQGVFFKLGERFSKPSTEDPFFTRGRTMLVKLGLEKYEKNFKKGLLTDPTLPLLTDSALKDANIPPGPRLMILDHIQRDPEIKGKRK

SEQ ID NO: 84383 - protein, 133 aa, Arabidopsis thaliana; identical to SEQ ID NO: 40470
  peptide (1)..(133): Ceres Seq. ID no. 12674901
  misc_feature (15)..(115): Homolog of NCBI NO: 15229167 NR Description: putative protein; protein id: At3g49560.1, by cDNA: 15698., supported by cDNA: gi_13430557 [Arabidopsis
  misc_feature (17)..(115): Homolog of NCBI NO: 15238598 NR Description: putative protein; protein id: At5g24650.1, by cDNA: 5684., supported by cDNA: gi_17979478 [Arabidopsis >gi|10177865|dbj|BAB11217.1|
  misc_feature (33)..(115): Homolog of NCBI NO: 21593899 NR Description: unknown [Arabidopsis thaliana]
  misc_feature (21)..(133): Homolog of NCBI NO: 32487911 NR Description: OJ000315_02.15 [Oryza sativa (japonica

SEQ ID NO: 84384 - protein, 119 aa, Arabidopsis thaliana; identical to SEQ ID NO: 40471
  peptide (1)..(119): Ceres Seq. ID no. 12674902
  misc_feature (1)..(101): Homolog of NCBI NO: 15229167 NR Description: putative protein; protein id: At3g49560.1, by cDNA: 15698., supported by cDNA: gi_13430557 [Arabidopsis
  misc_feature (3)..(101): Homolog of NCBI NO: 15238598 NR Description: putative protein; protein id: At5g24650.1, by cDNA: 5684., supported by cDNA: gi_17979478 [Arabidopsis >gi|10177865|dbj|BAB11217.1|
  misc_feature (19)..(101): Homolog of NCBI NO: 21593899 NR Description: unknown [Arabidopsis thaliana]
  misc_feature (7)..(119): Homolog of NCBI NO: 32487911 NR Description: OJ000315_02.15 [Oryza sativa (japonica

SEQ ID NO: 84385 - DNA, 1114 bp, Arabidopsis thaliana
  misc_feature (1)..(1114): Ceres Seq. ID no. 12674903
  misc_feature: MA Experiment ID: 108462 Result: Down-regulated in Transcription
  misc_feature: MA Experiment 108462 PARAMETER Experiment Name: At_Germinating_Seeds_cDNA_P Parameter: Age (day) Value: 2 vs. 0
  misc_feature: MA Experiment 108462 PARAMETER Experiment Name: At_Germinating_Seeds_cDNA_P Parameter: Tissue Value: Germinating Seeds
  misc_feature: MA Experiment ID: 108463 Result: Down-regulated in Transcription
  misc_feature: MA Experiment 108463 PARAMETER Experiment Name: At_Germinating_Seeds_cDNA_P Parameter: Age (day) Value: 3 vs. 0
  misc_feature: MA Experiment 108463 PARAMETER Experiment Name: At_Germinating_Seeds_cDNA_P Parameter: Tissue Value: Germinating Seeds
  misc_feature: MA Experiment ID: 108464 Result: Down-regulated in Transcription
  misc_feature: MA Experiment 108464 PARAMETER Experiment Name: At_Germinating_Seeds_cDNA_P Parameter: Age (day) Value: 4 vs. 0
  misc_feature: MA Experiment 108464 PARAMETER Experiment Name: At_Germinating_Seeds_cDNA_P Parameter: Tissue Value: Germinating Seeds
  misc_feature: MA Experiment ID: 108573 Result: Down-regulated in Transcription
  misc_feature: MA Experiment 108573 PARAMETER Experiment Name: At_Drought_cDNA_P Parameter: Timepoint (hr) Value: 6
  misc_feature: MA Experiment 108573 PARAMETER Experiment Name: At_Drought_cDNA_P Parameter: Tissue Value: Aerial
  misc_feature: MA Experiment 108573 PARAMETER Experiment Name: At_Drought_cDNA_P Parameter: Treatment Value: Drought vs. No Drought
  misc_feature: MA Experiment ID: 108595 Result: Down-regulated in Transcription
  misc_feature: MA Experiment 108595 PARAMETER Experiment Name: At_Ler-pi_Ovule_cDNA_P Parameter: Plant Line Value: null
  misc_feature: MA Experiment ID: 20000113 Result: Down-regulated in Transcription
  misc_feature: MA Experiment 20000113 PARAMETER Experiment Name: At_42deg_Heat_cDNA_P Parameter: Temperature (deg C) Value: 42 vs. 22
  misc_feature: MA Experiment 20000113 PARAMETER Experiment Name: At_42deg_Heat_cDNA_P Parameter: Timepoint (hr) Value: 8
  misc_feature: MA Experiment 20000113 PARAMETER Experiment Name: At_42deg_Heat_cDNA_P Parameter: Tissue Value: Aerial
  misc_feature: MA Experiment ID: 20000173 Result: Down-regulated in Transcription
  misc_feature: MA Experiment 20000173 PARAMETER Experiment Name: At_42deg_Heat_P Parameter: Age (day) Value: 14
  misc_feature: MA Experiment 20000173 PARAMETER Experiment Name: At_42deg_Heat_P Parameter: Organism Value: A. thaliana
  misc_feature: MA Experiment 20000173 PARAMETER Experiment Name: At_42deg_Heat_P Parameter: Plant Line Value: WS
  misc_feature: MA Experiment 20000173 PARAMETER Experiment Name: At_42deg_Heat_P Parameter: Temperature (deg C) Value: 42 vs. 22
  misc_feature: MA Experiment 20000173 PARAMETER Experiment Name: At_42deg_Heat_P Parameter: Timepoint (hr) Value: 6
  misc_feature: MA Experiment 20000173 PARAMETER Experiment Name: At_42deg_Heat_P Parameter: Tissue Value: Aerial
  misc_feature: MA Experiment ID: 20000436 Result: Down-regulated in Transcription
  misc_feature: MA Experiment 20000436 PARAMETER Experiment Name: At_Drought_P Parameter: Age (day) Value: 7
  misc_feature: MA Experiment 20000436 PARAMETER Experiment Name: At_Drought_P Parameter: Organism Value: A. thaliana
  misc_feature: MA Experiment 20000436 PARAMETER Experiment Name: At_Drought_P Parameter: Plant Line Value: WS
  misc_feature: MA Experiment 20000436 PARAMETER Experiment Name: At_Drought_P Parameter: Timepoint (hr) Value: 12
  misc_feature: MA Experiment 20000436 PARAMETER Experiment Name: At_Drought_P Parameter: Tissue Value: Whole Plant
  misc_feature: MA Experiment 20000436 PARAMETER Experiment Name: At_Drought_P Parameter: Treatment Value: Drought vs. No Drought
  misc_feature: MA Experiment ID: 20000437 Result: Down-regulated in Transcription
  misc_feature: MA Experiment 20000437 PARAMETER Experiment Name: At_Drought_P Parameter: Age (day) Value: 8
  misc_feature: MA Experiment 20000437 PARAMETER Experiment Name: At_Drought_P Parameter: Organism Value: A. thaliana
  misc_feature: MA Experiment 20000437 PARAMETER Experiment Name: At_Drought_P Parameter: Plant Line Value: WS
  misc_feature: MA Experiment 20000437 PARAMETER Experiment Name: At_Drought_P Parameter: Timepoint (hr) Value: 24
  misc_feature: MA Experiment 20000437 PARAMETER Experiment Name: At_Drought_P Parameter: Tissue Value: Whole Plant
  misc_feature: MA Experiment 20000437 PARAMETER Experiment Name: At_Drought_P Parameter: Treatment Value: Drought vs. No Drought
aagactgagaagcagagaaccgaaagaagaaaacaaaactctcgaagtcgcaacagaaaagaaacgagagagatatggtggtaggcggcggaggagaaggagatcagaagagaagcagcggagaaatgatggcgatggcgagtttattcaacgatcagcagaatccaattcaacagtttcaggttaaattcaaagaagtagaaactaatttcaagacatggttgtcgaaacagtcgattccggtggaagccgccgtcgtatccaccatgagcggtgtacaaggagctttcattggtggtctcatgggaacactctctcctgaaatgcctcaagccggcgttgaccctcaagccatagcttcgatgaaacaagctcaggctcttgtgggtggtccttgggtccaagctcggaattttgctgcaattactggtgtgaatgctggaattgcttctgttatgaagcggattagaggcaaagaggatattgaatctgcagtggtggcagcgttaggatctggatttgcatactcattggtgagccaaggattgcaaggacaacctatgaatgcaatcactactgctgctggttttgctgtttttcaaggagtgttttttaaattgggagaaagattctctaaaccgagtactgaagatccatttttcacaagaggaaggacaatgctagtgaagctaggtttggagaaatacgagaagaacttcaagaaaggacttttaactgatcccacattgccattgctcactgatagcgcgctgaaagatgcgaacatcccaccagggccaagacttatgatactagatcatatccagagggacccggagataaagggcaaacgaaagtaggagccatgttgtttaatcaaatatgttttgatggtaacgatcttcaaacacatatgtaatgccttttacttttagctgctattgccatgaagagctcttgttagatacttctgtttctattaccaatgtttgattatctttaaaaaaattgagtagttcgtctcaaatcaaattggattataggttctgaataaaacgaaaatgaaatatgctttgtatgagaataagatgtttatattatgtatagttgattg

SEQ ID NO: 84386 - protein, 261 aa, Arabidopsis thaliana; identical to SEQ ID NO: 29883
  peptide (1)..(261): Ceres Seq. ID no. 12674904
  misc_feature (52)..(186): Pfam Name: Tim17/Tim22/Tim23 family Pfam Description: Tim17/Tim22/Tim23 family
  misc_feature (1)..(261): Homolog of NCBI NO: 15229167 NR Description: putative protein; protein id: At3g49560.1, by cDNA: 15698., supported by cDNA: gi_13430557 [Arabidopsis
  misc_feature (3)..(260): Homolog of NCBI NO: 15238598 NR Description: putative protein; protein id: At5g24650.1, by cDNA: 5684., supported by cDNA: gi_17979478 [Arabidopsis >gi|10177865|dbj|BAB11217.1|
  misc_feature (19)..(260): Homolog of NCBI NO: 21593899 NR Description: unknown [Arabidopsis thaliana]
  misc_feature (7)..(252): Homolog of NCBI NO: 32487911 NR Description: OJ000315_02.15 [Oryza sativa (japonica

SEQ ID NO: 84387 - protein, 244 aa, Arabidopsis thaliana; identical to SEQ ID NO: 29884
  peptide (1)..(244): Ceres Seq. ID no. 12674905
  misc_feature (35)..(169): Pfam Name: Tim17/Tim22/Tim23 family Pfam Description: Tim17/Tim22/Tim23 family
  misc_feature (1)..(244): Homolog of NCBI NO: 15229167 NR Description: putative protein; protein id: At3g49560.1, by cDNA: 15698., supported by cDNA: gi_13430557 [Arabidopsis
  misc_feature (1)..(243): Homolog of NCBI NO: 15238598 NR Description: putative protein; protein id: At5g24650.1, by cDNA: 5684., supported by cDNA: gi_17979478 [Arabidopsis >gi|10177865|dbj|BAB11217.1|
  misc_feature (2)..(243): Homolog of NCBI NO: 21593899 NR Description: unknown [Arabidopsis thaliana]
  misc_feature (1)..(235): Homolog of NCBI NO: 32487911 NR Description: OJ000315_02.15 [Oryza sativa (japonica

SEQ ID NO: 84388 - protein, 243 aa, Arabidopsis thaliana; identical to SEQ ID NO: 29885
  peptide (1)..(243): Ceres Seq. ID no. 12674906
  misc_feature (34)..(168): Pfam Name: Tim17/Tim22/Tim23 family Pfam Description: Tim17/Tim22/Tim23 family
  misc_feature (1)..(243): Homolog of NCBI NO: 15229167 NR Description: putative protein; protein id: At3g49560.1, by cDNA: 15698., supported by cDNA: gi_13430557 [Arabidopsis
  misc_feature (1)..(242): Homolog of NCBI NO: 15238598 NR Description: putative protein; protein id: At5g24650.1, by cDNA: 5684., supported by cDNA: gi_17979478 [Arabidopsis >gi|10177865|dbj|BAB11217.1|
  misc_feature (1)..(242): Homolog of NCBI NO: 21593899 NR Description: unknown [Arabidopsis thaliana]
  misc_feature (1)..(234): Homolog of NCBI NO: 32487911 NR Description: OJ000315_02.15 [Oryza sativa (japonica

SEQ ID NO: 84389 - DNA, 1142 bp, Arabidopsis thaliana
  misc_feature (1)..(1142): Ceres Seq. ID no. 12674919
  misc_feature: MA Experiment ID: 108488 Result: Down-regulated in Transcription
  misc_feature: MA Experiment ID: 108569 Result: Down-regulated in Transcription
  misc_feature: MA Experiment 108569 PARAMETER Experiment Name: At_0.001%_MeJA__cDNA_P Parameter: Timepoint (hr) Value: 6
  misc_feature: MA Experiment 108569 PARAMETER Experiment Name: At_0.001%_MeJA__cDNA_P Parameter: Tissue Value: Aerial
  misc_feature: MA Experiment 108569 PARAMETER Experiment Name: At_0.001%_MeJA__cDNA_P Parameter: Treatment Value: 0.001% MeJA vs. No Treatment
  misc_feature: MA Experiment ID: 20000087 Result: Up-regulated in Transcription
  misc_feature: MA Experiment 20000087 PARAMETER Experiment Name: At_100uM_ABA_Mutants_cDNA_P Parameter: Plant Line Value: WS
  misc_feature: MA Experiment 20000087 PARAMETER Experiment Name: At_100uM_ABA_Mutants_cDNA_P Parameter: Timepoint (hr) Value: 6
  misc_feature: MA Experiment 20000087 PARAMETER Experiment Name: At_100uM_ABA_Mutants_cDNA_P Parameter: Tissue Value: Aerial
  misc_feature: MA Experiment 20000087 PARAMETER Experiment Name: At_100uM_ABA_Mutants_cDNA_P Parameter: Treatment Value: 100uM ABA vs. No Treatment
  misc_feature: MA Experiment ID: 20000111 Result: Up-regulated in Transcription
  misc_feature: MA Experiment 20000111 PARAMETER Experiment Name: At_42deg_Heat_cDNA_P Parameter: Temperature (deg C) Value: 42 vs. 22
  misc_feature: MA Experiment 20000111 PARAMETER Experiment Name: At_42deg_Heat_cDNA_P Parameter: Timepoint (hr) Value: 6
  misc_feature: MA Experiment 20000111 PARAMETER Experiment Name: At_42deg_Heat_cDNA_P Parameter: Tissue Value: Aerial
  misc_feature: MA Experiment ID: 20000112 Result: Up-regulated in Transcription
  misc_feature: MA Experiment 20000112 PARAMETER Experiment Name: At_42deg_Heat_cDNA_P Parameter: Temperature (deg C) Value: 42 vs. 22
  misc_feature: MA Experiment 20000112 PARAMETER Experiment Name: At_42deg_Heat_cDNA_P Parameter: Timepoint (hr) Value: 2
  misc_feature: MA Experiment 20000112 PARAMETER Experiment Name: At_42deg_Heat_cDNA_P Parameter: Tissue Value: Aerial
  misc_feature: MA Experiment ID: 20000113 Result: Up-regulated in Transcription
  misc_feature: MA Experiment 20000113 PARAMETER Experiment Name: At_42deg_Heat_cDNA_P Parameter: Temperature (deg C) Value: 42 vs. 22
  misc_feature: MA Experiment 20000113 PARAMETER Experiment Name: At_42deg_Heat_cDNA_P Parameter: Timepoint (hr) Value: 8
  misc_feature: MA Experiment 20000113 PARAMETER Experiment Name: At_42deg_Heat_cDNA_P Parameter: Tissue Value: Aerial
  misc_feature: MA Experiment ID: 20000180 Result: Up-regulated in Transcription
  misc_feature: MA Experiment 20000180 PARAMETER Experiment Name: At_Germinating_Seeds_P Parameter: Age (hr) Value: 24 vs. 0
  misc_feature: MA Experiment 20000180 PARAMETER Experiment Name: At_Germinating_Seeds_P Parameter: Tissue Value: Germinating Seeds
  misc_feature: MA Experiment ID: 20000185 Result: Up-regulated in Transcription
  misc_feature: MA Experiment 20000185 PARAMETER Experiment Name: At_Roots__P Parameter: Age (day) Value: 7 vs. 21
  misc_feature: MA Experiment 20000185 PARAMETER Experiment Name: At_Roots__P Parameter: Organism Value: A. thaliana
  misc_feature: MA Experiment 20000185 PARAMETER Experiment Name: At_Roots__P Parameter: Tissue Value: Roots vs. Whole Plant
  misc_feature: MA Experiment ID: 20000439 Result: Up-regulated in Transcription
  misc_feature: MA Experiment 20000439 PARAMETER Experiment Name: At_Roots__P Parameter: Age (day) Value: 14 vs. 21
  misc_feature: MA Experiment 20000439 PARAMETER Experiment Name: At_Roots__P Parameter: Organism Value: A. thaliana
  misc_feature: MA Experiment 20000439 PARAMETER Experiment Name: At_Roots__P Parameter: Tissue Value: Roots vs. Whole Plant
  misc_feature: MA Experiment ID: 20001248 Result: Down-regulated in Transcription
  misc_feature: MA Experiment 20001248 PARAMETER Experiment Name: At_Far-red-induction_P Parameter: Age (day) Value: 7
  misc_feature: MA Experiment 20001248 PARAMETER Experiment Name: At_Far-red-induction_P Parameter: Light Value: Far-red vs. White
  misc_feature: MA Experiment 20001248 PARAMETER Experiment Name: At_Far-red-induction_P Parameter: Organism Value: A. thaliana
  misc_feature: MA Experiment 20001248 PARAMETER Experiment Name: At_Far-red-induction_P Parameter: Plant Line Value: Columbia
  misc_feature: MA Experiment 20001248 PARAMETER Experiment Name: At_Far-red-induction_P Parameter: Timepoint (hr) Value: 4
  misc_feature: MA Experiment 20001248 PARAMETER Experiment Name: At_Far-red-induction_P Parameter: Tissue Value: Whole Plant
ggctcaatttatatacaacactctctctctctcggttttgtccatacaatggctcgcttcgatattgttctactcataggtctttgcctcataatctctgtctttcccgatacaaccaccgcacaactaagccgcggtttctactccaaaacttgccccaatgtcgaacaaatcgtgagaaatgctgtccaaaagaaaataaagaagacattcgtcgccgtccctgccactctccgtctcttcttccacgactgctttgtcaatggttgtgatgcatctgtcatgatccaatcaacgcctaagaacaaggcagagaaggatcatccagataacatttcgctagctggagatggatttgatgtggtgatccaagctaagaaagcccttgactctaaccctagttgccggaacaaggtctcatgtgccgatattcttactttggccacccgagatgttgttgttgcggctggaggaccgtcctatgaagttgaacttggtaggttcgatggtttggtatcaaccgcgtcaagtgtcgaagggaacttaccaggaccttcggacaatgtagacaaacttaatgctcttttcacgaaaaacaaacttacccaagaagatatgattgctctttcagcggctcacacccttggattcgcacattgtggcaaggtctttaaaagaatccacaaattcaacggcatcaactccgtggacccaactttaaacaaggcttacgctattgagcttcaaaaggcttgtcctaagaatgtggacccaagaattgcaatcaacatggacccagtcacgcccaagacgtttgacaacacttacttcaagaatcttcaacaaggcaaaggtctcttcacctccgatcaagttctcttcacggatggtcgctctaggcccaccgttaatgcttgggcctcaaactctacggcctttaaccgcgcttttgtgatagccatgaccaaacttggccgtgttggagttaagaatagcagcaatggaaacatccgtcgtgattgtggtgcgtttaactagagctggtaatgggaaaatataagttgtcttatctcctattttcctttcgttttattaatgtttgaatgttcattttgacgatgagaagatattattggtttttc

SEQ ID NO: 84390 - protein, 345 aa, Arabidopsis thaliana
  peptide (1)..(345): Ceres Seq. ID no. 12674920
  misc_feature (59)..(309): Pfam Name: Peroxidase Pfam Description: Peroxidase
  misc_feature (17)..(345): Homolog of NCBI NO: 15229646 NR Description: peroxidase, putative; protein id: At3g49960.1 thaliana] >gi|25453201|sp|Q96510|PE35_ARATH Peroxidase 35
  misc_feature (17)..(345): Homolog of NCBI NO: 15240737 NR Description: peroxidase, putative; protein id: At5g67400.1 thaliana] >gi|26397661|sp|Q43873|PE73_ARATH Peroxidase 73 (Atperox P73) (PRXR11) (ATP10a) >gi|1402902|emb|CAA66967.1|
  misc_feature (22)..(345): Homolog of NCBI NO: 15235597 NR Description: peroxidase, putative; protein id: At4g37520.1, by cDNA: 2583., supported by cDNA: gi_17065479, supported by gi_20148496 [Arabidopsis thaliana]
  misc_feature (22)..(345): Homolog of NCBI NO: 21554605 NR Description: peroxidase, prxr2 [Arabidopsis thaliana]
  misc_feature (37)..(345): Homolog of NCBI NO: 1546708 NR Description: peroxidase ATP9a [Arabidopsis thaliana]
  misc_feature (17)..(345): Homolog of NCBI NO: 28629828 NR Description: peroxidase 1 [Artemisia annua]
  misc_feature (17)..(345): Homolog of NCBI NO: 15235600 NR Description: peroxidase, putative; protein id: At4g37530.1, by cDNA: gi_18874553 [Arabidopsis thaliana] Peroxidase 51 precursor (Atperox P51) (ATP37)
  misc_feature (17)..(345): Homolog of NCBI NO: 17979440 NR Description: putative peroxidase [Arabidopsis thaliana]
  misc_feature (17)..(341): Homolog of NCBI NO: 2117624 NR Description: peroxidase (EC 1.11.1.7) 2 precursor - alfalfa
  misc_feature (17)..(341): Homolog of NCBI NO: 4138647 NR Description: peroxidase [Trifolium repens]
GSIYIQHSLSLGFVHTMARFDIVLLIGLCLIISVFPDTTTAQLSRGFYSKTCPNVEQIVRNAVQKKIKKTFVAVPATLRLFFHDCFVNGCDASVMIQSTPKNKAEKDHPDNISLAGDGFDVVIQAKKALDSNPSCRNKVSCADILTLATRDVVVAAGGPSYEVELGRFDGLVSTASSVEGNLPGPSDNVDKLNALFTKNKLTQEDMIALSAAHTLGFAHCGKVFKRIHKFNGINSVDPTLNKAYAIELQKACPKNVDPRIAINMDPVTPKTFDNTYFKNLQQGKGLFTSDQVLFTDGRSRPTVNAWASNSTAFNRAFVIAMTKLGRVGVKNSSNGNIRRDCGAFN

SEQ ID NO: 84391 - protein, 329 aa, Arabidopsis thaliana; identical to SEQ ID NO: 21898
  peptide (1)..(329): Ceres Seq. ID no. 12674921
  misc_feature (43)..(293): Pfam Name: Peroxidase Pfam Description: Peroxidase
  misc_feature (1)..(329): Homolog of NCBI NO: 15229646 NR Description: peroxidase, putative; protein id: At3g49960.1 thaliana] >gi|25453201|sp|Q96510|PE35_ARATH Peroxidase 35
  misc_feature (1)..(329): Homolog of NCBI NO: 15240737 NR Description: peroxidase, putative; protein id: At5g67400.1 thaliana] >gi|26397661|sp|Q43873|PE73_ARATH Peroxidase 73 (Atperox P73) (PRXR11) (ATP10a) >gi|1402902|emb|CAA66967.1|
  misc_feature (6)..(329): Homolog of NCBI NO: 15235597 NR Description: peroxidase, putative; protein id: At4g37520.1, by cDNA: 2583., supported by cDNA: gi_17065479, supported by gi_20148496 [Arabidopsis thaliana]
  misc_feature (6)..(329): Homolog of NCBI NO: 21554605 NR Description: peroxidase, prxr2 [Arabidopsis thaliana]
  misc_feature (21)..(329): Homolog of NCBI NO: 1546708 NR Description: peroxidase ATP9a [Arabidopsis thaliana]
  misc_feature (1)..(329): Homolog of NCBI NO: 28629828 NR Description: peroxidase 1 [Artemisia annua]
  misc_feature (1)..(329): Homolog of NCBI NO: 15235600 NR Description: peroxidase, putative; protein id: At4g37530.1, by cDNA: gi_18874553 [Arabidopsis thaliana] Peroxidase 51 precursor (Atperox P51) (ATP37)
  misc_feature (1)..(329): Homolog of NCBI NO: 17979440 NR Description: putative peroxidase [Arabidopsis thaliana]
  misc_feature (1)..(325): Homolog of NCBI NO: 2117624 NR Description: peroxidase (EC 1.11.1.7) 2 precursor - alfalfa
  misc_feature (1)..(325): Homolog of NCBI NO: 4138647 NR Description: peroxidase [Trifolium repens]

SEQ ID NO: 84392 - protein, 251 aa, Arabidopsis thaliana; identical to SEQ ID NO: 21899
  peptide (1)..(251): Ceres Seq. ID no. 12674922
  misc_feature (1)..(215): Pfam Name: Peroxidase Pfam Description: Peroxidase
  misc_feature (1)..(251): Homolog of NCBI NO: 15229646 NR Description: peroxidase, putative; protein id: At3g49960.1 thaliana] >gi|25453201|sp|Q96510|PE35_ARATH Peroxidase 35
  misc_feature (1)..(251): Homolog of NCBI NO: 15240737 NR Description: peroxidase, putative; protein id: At5g67400.1 thaliana] >gi|26397661|sp|Q43873|PE73_ARATH Peroxidase 73 (Atperox P73) (PRXR11) (ATP10a) >gi|1402902|emb|CAA66967.1|
  misc_feature (1)..(251): Homolog of NCBI NO: 15235597 NR Description: peroxidase, putative; protein id: At4g37520.1, by cDNA: 2583., supported by cDNA: gi_17065479, supported by gi_20148496 [Arabidopsis thaliana]
  misc_feature (1)..(251): Homolog of NCBI NO: 21554605 NR Description: peroxidase, prxr2 [Arabidopsis thaliana]
  misc_feature (1)..(251): Homolog of NCBI NO: 1546708 NR Description: peroxidase ATP9a [Arabidopsis thaliana]
  misc_feature (1)..(251): Homolog of NCBI NO: 28629828 NR Description: peroxidase 1 [Artemisia annua]
  misc_feature (1)..(251): Homolog of NCBI NO: 15235600 NR Description: peroxidase, putative; protein id: At4g37530.1, by cDNA: gi_18874553 [Arabidopsis thaliana] Peroxidase 51 precursor (Atperox P51) (ATP37)
  misc_feature (1)..(251): Homolog of NCBI NO: 17979440 NR Description: putative peroxidase [Arabidopsis thaliana]
  misc_feature (1)..(247): Homolog of NCBI NO: 2117624 NR Description: peroxidase (EC 1.11.1.7) 2 precursor - alfalfa
  misc_feature (1)..(247): Homolog of NCBI NO: 4138647 NR Description: peroxidase [Trifolium repens]

SEQ ID NO: 84393 - DNA, 2290 bp, Arabidopsis thaliana
  misc_feature (1)..(2290): Ceres Seq. ID no. 12674923
  misc_feature: MA Experiment ID: 108434 Result: Down-regulated in Transcription
  misc_feature: MA Experiment 108434 PARAMETER Experiment Name: At_Root_Tips_cDNA_P Parameter: Tissue Value: Root Tips
  misc_feature: MA Experiment ID: 108435 Result: Up-regulated in Transcription
  misc_feature: MA Experiment 108435 PARAMETER Experiment Name: At_stm_Mutants_cDNA_P Parameter: Plant Line Value: wt Landsburg vs stm
  misc_feature: MA Experiment 108435 PARAMETER Experiment Name: At_stm_Mutants_cDNA_P Parameter: Tissue Value: Shoot Apical Meristem Region
  misc_feature: MA Experiment ID: 108461 Result: Up-regulated in Transcription
  misc_feature: MA Experiment 108461 PARAMETER Experiment Name: At_Germinating_Seeds_cDNA_P Parameter: Age (day) Value: 1 vs. 0
  misc_feature: MA Experiment 108461 PARAMETER Experiment Name: At_Germinating_Seeds_cDNA_P Parameter: Tissue Value: Germinating Seeds
  misc_feature: MA Experiment ID: 108462 Result: Up-regulated in Transcription
  misc_feature: MA Experiment 108462 PARAMETER Experiment Name: At_Germinating_Seeds_cDNA_P Parameter: Age (day) Value: 2 vs. 0
  misc_feature: MA Experiment 108462 PARAMETER Experiment Name: At_Germinating_Seeds_cDNA_P Parameter: Tissue Value: Germinating Seeds
  misc_feature: MA Experiment ID: 108463 Result: Up-regulated in Transcription
  misc_feature: MA Experiment 108463 PARAMETER Experiment Name: At_Germinating_Seeds_cDNA_P Parameter: Age (day) Value: 3 vs. 0
  misc_feature: MA Experiment 108463 PARAMETER Experiment Name: At_Germinating_Seeds_cDNA_P Parameter: Tissue Value: Germinating Seeds
  misc_feature: MA Experiment ID: 108464 Result: Up-regulated in Transcription
  misc_feature: MA Experiment 108464 PARAMETER Experiment Name: At_Germinating_Seeds_cDNA_P Parameter: Age (day) Value: 4 vs. 0
  misc_feature: MA Experiment 108464 PARAMETER Experiment Name: At_Germinating_Seeds_cDNA_P Parameter: Tissue Value: Germinating Seeds
  misc_feature: MA Experiment ID: 108488 Result: Down-regulated in Transcription
  misc_feature: MA Experiment ID: 108585 Result: Up-regulated in Transcription
  misc_feature: MA Experiment 108585 PARAMETER Experiment Name: At_5mM_NaNP_cDNA_P Parameter: Timepoint (hr) Value: 6
  misc_feature: MA Experiment 108585 PARAMETER Experiment Name: At_5mM_NaNP_cDNA_P Parameter: Tissue Value: Aerial
  misc_feature: MA Experiment 108585 PARAMETER Experiment Name: At_5mM_NaNP_cDNA_P Parameter: Treatment Value: null
  misc_feature: MA Experiment ID: 108595 Result: Up-regulated in Transcription
  misc_feature: MA Experiment 108595 PARAMETER Experiment Name: At_Ler-pi_Ovule_cDNA_P Parameter: Plant Line Value: null
  misc_feature: MA Experiment ID: 20000070 Result: Up-regulated in Transcription
  misc_feature: MA Experiment 20000070 PARAMETER Experiment Name: At_100uM_ABA_Mutants_cDNA_P Parameter: Plant Line Value: CS24
  misc_feature: MA Experiment 20000070 PARAMETER Experiment Name: At_100uM_ABA_Mutants_cDNA_P Parameter: Timepoint (hr) Value: 6
  misc_feature: MA Experiment 20000070 PARAMETER Experiment Name: At_100uM_ABA_Mutants_cDNA_P Parameter: Tissue Value: Aerial
  misc_feature: MA Experiment 20000070 PARAMETER Experiment Name: At_100uM_ABA_Mutants_cDNA_P Parameter: Treatment Value: 100uM ABA vs. No Treatment
  misc_feature: MA Experiment ID: 20000071 Result: Up-regulated in Transcription
  misc_feature: MA Experiment 20000071 PARAMETER Experiment Name: At_100uM_ABA_Mutants_cDNA_P Parameter: Plant Line Value: CS8104
  misc_feature: MA Experiment 20000071 PARAMETER Experiment Name: At_100uM_ABA_Mutants_cDNA_P Parameter: Timepoint (hr) Value: 6
  misc_feature: MA Experiment 20000071 PARAMETER Experiment Name: At_100uM_ABA_Mutants_cDNA_P Parameter: Tissue Value: Aerial
  misc_feature: MA Experiment 20000071 PARAMETER Experiment Name: At_100uM_ABA_Mutants_cDNA_P Parameter: Treatment Value: 100uM ABA vs. No Treatment
  misc_feature: MA Experiment ID: 20000072 Result: Up-regulated in Transcription
  misc_feature: MA Experiment 20000072 PARAMETER Experiment Name: At_100uM_ABA_Mutants_cDNA_P Parameter: Plant Line Value: CS8105
  misc_feature: MA Experiment 20000072 PARAMETER Experiment Name: At_100uM_ABA_Mutants_cDNA_P Parameter: Timepoint (hr) Value: 6
  misc_feature: MA Experiment 20000072 PARAMETER Experiment Name: At_100uM_ABA_Mutants_cDNA_P Parameter: Tissue Value: Aerial
  misc_feature: MA Experiment 20000072 PARAMETER Experiment Name: At_100uM_ABA_Mutants_cDNA_P Parameter: Treatment Value: 100uM ABA vs. No Treatment
  misc_feature: MA Experiment ID: 20000086 Result: Up-regulated in Transcription
  misc_feature: MA Experiment 20000086 PARAMETER Experiment Name: At_100uM_ABA_Mutants_cDNA_P Parameter: Plant Line Value: CS22
  misc_feature: MA Experiment 20000086 PARAMETER Experiment Name: At_100uM_ABA_Mutants_cDNA_P Parameter: Timepoint (hr) Value: 6
  misc_feature: MA Experiment 20000086 PARAMETER Experiment Name: At_100uM_ABA_Mutants_cDNA_P Parameter: Tissue Value: Aerial
  misc_feature: MA Experiment 20000086 PARAMETER Experiment Name: At_100uM_ABA_Mutants_cDNA_P Parameter: Treatment Value: 100uM ABA vs. No Treatment
  misc_feature: MA Experiment ID: 20000087 Result: Up-regulated in Transcription
  misc_feature: MA Experiment 20000087 PARAMETER Experiment Name: At_100uM_ABA_Mutants_cDNA_P Parameter: Plant Line Value: WS
  misc_feature: MA Experiment 20000087 PARAMETER Experiment Name: At_100uM_ABA_Mutants_cDNA_P Parameter: Timepoint (hr) Value: 6
  misc_feature: MA Experiment 20000087 PARAMETER Experiment Name: At_100uM_ABA_Mutants_cDNA_P Parameter: Tissue Value: Aerial
  misc_feature: MA Experiment 20000087 PARAMETER Experiment Name: At_100uM_ABA_Mutants_cDNA_P Parameter: Treatment Value: 100uM ABA vs. No Treatment
  misc_feature: MA Experiment ID: 20000088 Result: Up-regulated in Transcription
  misc_feature: MA Experiment 20000088 PARAMETER Experiment Name: At_100uM_ABA_Mutants_cDNA_P Parameter: Plant Line Value: Landsberg
  misc_feature: MA Experiment 20000088 PARAMETER Experiment Name: At_100uM_ABA_Mutants_cDNA_P Parameter: Timepoint (hr) Value: 6
  misc_feature: MA Experiment 20000088 PARAMETER Experiment Name: At_100uM_ABA_Mutants_cDNA_P Parameter: Tissue Value: Aerial
  misc_feature: MA Experiment 20000088 PARAMETER Experiment Name: At_100uM_ABA_Mutants_cDNA_P Parameter: Treatment Value: 100uM ABA vs. No Treatment
  misc_feature: MA Experiment ID: 20000117 Result: Up-regulated in Transcription
  misc_feature: MA Experiment 20000117 PARAMETER Experiment Name: At_100uM_ABA_Mutants_cDNA_P Parameter: Plant Line Value: Columbia
  misc_feature: MA Experiment 20000117 PARAMETER Experiment Name: At_100uM_ABA_Mutants_cDNA_P Parameter: Timepoint (hr) Value: 6
  misc_feature: MA Experiment 20000117 PARAMETER Experiment Name: At_100uM_ABA_Mutants_cDNA_P Parameter: Tissue Value: Aerial
  misc_feature: MA Experiment 20000117 PARAMETER Experiment Name: At_100uM_ABA_Mutants_cDNA_P Parameter: Treatment Value: 100uM ABA vs. No Treatment
  misc_feature: MA Experiment ID: 20000180 Result: Up-regulated in Transcription
  misc_feature: MA Experiment 20000180 PARAMETER Experiment Name: At_Germinating_Seeds_P Parameter: Age (hr) Value: 24 vs. 0
  misc_feature: MA Experiment 20000180 PARAMETER Experiment Name: At_Germinating_Seeds_P Parameter: Tissue Value: Germinating Seeds
  misc_feature: MA Experiment ID: 20000184 Result: Down-regulated in Transcription
  misc_feature: MA Experiment 20000184 PARAMETER Experiment Name: At_Shoots__P Parameter: Age (day) Value: 7
  misc_feature: MA Experiment 20000184 PARAMETER Experiment Name: At_Shoots__P Parameter: Tissue Value: Shoots vs. Whole Plant
  misc_feature: MA Experiment ID: 20000185 Result: Down-regulated in Transcription
  misc_feature: MA Experiment 20000185 PARAMETER Experiment Name: At_Roots__P Parameter: Age (day) Value: 7 vs. 21
  misc_feature: MA Experiment 20000185 PARAMETER Experiment Name: At_Roots__P Parameter: Organism Value: A. thaliana
  misc_feature: MA Experiment 20000185 PARAMETER Experiment Name: At_Roots__P Parameter: Tissue Value: Roots vs. Whole Plant
  misc_feature: MA Experiment ID: 20000227 Result: Up-regulated in Transcription
  misc_feature: MA Experiment 20000227 PARAMETER Experiment Name: At_Root-Tips-vs-Tops_P Parameter: Tissue Value: Root Tips vs. Root Tops
  misc_feature: MA Experiment ID: 20000234 Result: Down-regulated in Transcription
  misc_feature: MA Experiment 20000234 PARAMETER Experiment Name: At_Siliques_P Parameter: Age (day) Value: 21
  misc_feature: MA Experiment 20000234 PARAMETER Experiment Name: At_Siliques_P Parameter: Organism Value: A. thaliana
  misc_feature: MA Experiment 20000234 PARAMETER Experiment Name: At_Siliques_P Parameter: Plant Line Value: WS
  misc_feature: MA Experiment 20000234 PARAMETER Experiment Name: At_Siliques_P Parameter: Tissue Value: Less Than 5mm Siliques vs. Whole Plant
  misc_feature: MA Experiment ID: 20000264 Result: Down-regulated in Transcription
  misc_feature: MA Experiment 20000264 PARAMETER Experiment Name: At_Open_Flower_P Parameter: Age (day) Value: 21
  misc_feature: MA Experiment 20000264 PARAMETER Experiment Name: At_Open_Flower_P Parameter: Plant Line Value: WS
  misc_feature: MA Experiment 20000264 PARAMETER Experiment Name: At_Open_Flower_P Parameter: Tissue Value: Open Flower vs. Whole Plant
  misc_feature: MA Experiment ID: 20000265 Result: Down-regulated in Transcription
  misc_feature: MA Experiment 20000265 PARAMETER Experiment Name: At_Open_Flower_P Parameter: Age (day) Value: 21
  misc_feature: MA Experiment 20000265 PARAMETER Experiment Name: At_Open_Flower_P Parameter: Plant Line Value: WS
  misc_feature: MA Experiment 20000265 PARAMETER Experiment Name: At_Open_Flower_P Parameter: Tissue Value: Closed Flower vs. Whole Plant
  misc_feature: MA Experiment ID: 20000267 Result: Up-regulated in Transcription
  misc_feature: MA Experiment 20000267 PARAMETER Experiment Name: At_Drought_P Parameter: Age (day) Value: 7
  misc_feature: MA Experiment 20000267 PARAMETER Experiment Name: At_Drought_P Parameter: Organism Value: A. thaliana
  misc_feature: MA Experiment 20000267 PARAMETER Experiment Name: At_Drought_P Parameter: Plant Line Value: WS
  misc_feature: MA Experiment 20000267 PARAMETER Experiment Name: At_Drought_P Parameter: Timepoint (hr) Value: 6
  misc_feature: MA Experiment 20000267 PARAMETER Experiment Name: At_Drought_P Parameter: Tissue Value: Whole Plant
  misc_feature: MA Experiment 20000267 PARAMETER Experiment Name: At_Drought_P Parameter: Treatment Value: Drought vs. No Drought
  misc_feature: MA Experiment ID: 20000286 Result: Down-regulated in Transcription
  misc_feature: MA Experiment 20000286 PARAMETER Experiment Name: At_Open_Flower_P Parameter: Age (day) Value: 21
  misc_feature: MA Experiment 20000286 PARAMETER Experiment Name: At_Open_Flower_P Parameter: Plant Line Value: WS
  misc_feature: MA Experiment 20000286 PARAMETER Experiment Name: At_Open_Flower_P Parameter: Tissue Value: Half Open vs. Whole Plant
  misc_feature: MA Experiment ID: 20000308 Result: Up-regulated in Transcription
  misc_feature: MA Experiment 20000308 PARAMETER Experiment Name: At_100mM_NaCl__P Parameter: Age (day) Value: 17
  misc_feature: MA Experiment 20000308 PARAMETER Experiment Name: At_100mM_NaCl__P Parameter: Organism Value: A. thaliana
  misc_feature: MA Experiment 20000308 PARAMETER Experiment Name: At_100mM_NaCl__P Parameter: Plant Line Value: WS
  misc_feature: MA Experiment 20000308 PARAMETER Experiment Name: At_100mM_NaCl__P Parameter: Timepoint (hr) Value: 72
  misc_feature: MA Experiment 20000308 PARAMETER Experiment Name: At_100mM_NaCl__P Parameter: Tissue Value: Whole Plant
  misc_feature: MA Experiment 20000308 PARAMETER Experiment Name: At_100mM_NaCl__P Parameter: Treatment Value: 100mM NaCl vs. No Treatment
  misc_feature: MA Experiment ID: 20000437 Result: Down-regulated in Transcription
  misc_feature: MA Experiment 20000437 PARAMETER Experiment Name: At_Drought_P Parameter: Age (day) Value: 8
  misc_feature: MA Experiment 20000437 PARAMETER Experiment Name: At_Drought_P Parameter: Organism Value: A. thaliana
  misc_feature: MA Experiment 20000437 PARAMETER Experiment Name: At_Drought_P Parameter: Plant Line Value: WS
  misc_feature: MA Experiment 20000437 PARAMETER Experiment Name: At_Drought_P Parameter: Timepoint (hr) Value: 24
  misc_feature: MA Experiment 20000437 PARAMETER Experiment Name: At_Drought_P Parameter: Tissue Value: Whole Plant
  misc_feature: MA Experiment 20000437 PARAMETER Experiment Name: At_Drought_P Parameter: Treatment Value: Drought vs. No Drought
  misc_feature: MA Experiment ID: 20000438 Result: Down-regulated in Transcription
  misc_feature: MA Experiment 20000438 PARAMETER Experiment Name: At_Shoots__P Parameter: Age (day) Value: 14
  misc_feature: MA Experiment 20000438 PARAMETER Experiment Name: At_Shoots__P Parameter: Tissue Value: Shoots vs. Whole Plant
  misc_feature: MA Experiment ID: 20000439 Result: Down-regulated in Transcription
  misc_feature: MA Experiment 20000439 PARAMETER Experiment Name: At_Roots__P Parameter: Age (day) Value: 14 vs. 21
  misc_feature: MA Experiment 20000439 PARAMETER Experiment Name: At_Roots__P Parameter: Organism Value: A. thaliana
  misc_feature: MA Experiment 20000439 PARAMETER Experiment Name: At_Roots__P Parameter: Tissue Value: Roots vs. Whole Plant
  misc_feature: MA Experiment ID: 20000451 Result: Up-regulated in Transcription
  misc_feature: MA Experiment 20000451 PARAMETER Experiment Name: At_CS6879_Shoots-Roots_P Parameter: Age (day) Value: 14
  misc_feature: MA Experiment 20000451 PARAMETER Experiment Name: At_CS6879_Shoots-Roots_P Parameter: Organism Value: A. thaliana
  misc_feature: MA Experiment 20000451 PARAMETER Experiment Name: At_CS6879_Shoots-Roots_P Parameter: Plant Line Value: CS6879 vs. WS
  misc_feature: MA Experiment 20000451 PARAMETER Experiment Name: At_CS6879_Shoots-Roots_P Parameter: Tissue Value: Roots
  misc_feature: MA Experiment ID: 20000453 Result: Up-regulated in Transcription
  misc_feature: MA Experiment 20000453 PARAMETER Experiment Name: At_100uM_ABA_P Parameter: Age (day) Value: 15
  misc_feature: MA Experiment 20000453 PARAMETER Experiment Name: At_100uM_ABA_P Parameter: Organism Value: A. thaliana
  misc_feature: MA Experiment 20000453 PARAMETER Experiment Name: At_100uM_ABA_P Parameter: Plant Line Value: WS
  misc_feature: MA Experiment 20000453 PARAMETER Experiment Name: At_100uM_ABA_P Parameter: Timepoint (hr) Value: 24
  misc_feature: MA Experiment 20000453 PARAMETER Experiment Name: At_100uM_ABA_P Parameter: Tissue Value: Aerial
  misc_feature: MA Experiment 20000453 PARAMETER Experiment Name: At_100uM_ABA_P Parameter: Treatment Value: 100uM ABA vs. No Treatment
  misc_feature: MA Experiment ID: 20000456 Result: Up-regulated in Transcription
  misc_feature: MA Experiment 20000456 PARAMETER Experiment Name: At_100uM_BA_P Parameter: Age (day) Value: 14
  misc_feature: MA Experiment 20000456 PARAMETER Experiment Name: At_100uM_BA_P Parameter: Organism Value: A. thaliana
  misc_feature: MA Experiment 20000456 PARAMETER Experiment Name: At_100uM_BA_P Parameter: Plant Line Value: WS
  misc_feature: MA Experiment 20000456 PARAMETER Experiment Name: At_100uM_BA_P Parameter: Timepoint (hr) Value: 6
  misc_feature: MA Experiment 20000456 PARAMETER Experiment Name: At_100uM_BA_P Parameter: Tissue Value: Aerial
  misc_feature: MA Experiment 20000456 PARAMETER Experiment Name: At_100uM_BA_P Parameter: Treatment Value: 100uM BA vs. No Treatment
  misc_feature: MA Experiment ID: 20000460 Result: Up-regulated in Transcription
  misc_feature: MA Experiment 20000460 PARAMETER Experiment Name: At_10percent_PEG_P Parameter: Age (day) Value: 12
  misc_feature: MA Experiment 20000460 PARAMETER Experiment Name: At_10percent_PEG_P Parameter: Organism Value: A. thaliana
  misc_feature: MA Experiment 20000460 PARAMETER Experiment Name: At_10percent_PEG_P Parameter: Plant Line Value: WS
  misc_feature: MA Experiment 20000460 PARAMETER Experiment Name: At_10percent_PEG_P Parameter: Timepoint (day) Value: 12
  misc_feature: MA Experiment 20000460 PARAMETER Experiment Name: At_10percent_PEG_P Parameter: Tissue Value: Whole Plant
  misc_feature: MA Experiment 20000460 PARAMETER Experiment Name: At_10percent_PEG_P Parameter: Treatment Value: 10percent PEG vs. No Treatment
  misc_feature: MA Experiment ID: 20000527 Result: Up-regulated in Transcription
  misc_feature: MA Experiment 20000527 PARAMETER Experiment Name: At_10percent_PEG_P Parameter: Age (day) Value: 20
  misc_feature: MA Experiment 20000527 PARAMETER Experiment Name: At_10percent_PEG_P Parameter: Organism Value: A. thaliana
  misc_feature: MA Experiment 20000527 PARAMETER Experiment Name: At_10percent_PEG_P Parameter: Plant Line Value: WS
  misc_feature: MA Experiment 20000527 PARAMETER Experiment Name: At_10percent_PEG_P Parameter: Timepoint (day) Value: 20
  misc_feature: MA Experiment 20000527 PARAMETER Experiment Name: At_10percent_PEG_P Parameter: Tissue Value: Whole Plant
  misc_feature: MA Experiment 20000527 PARAMETER Experiment Name: At_10percent_PEG_P Parameter: Treatment Value: 10percent PEG vs. No Treatment
  misc_feature: MA Experiment ID: 20000709 Result: Up-regulated in Transcription
  misc_feature: MA Experiment 20000709 PARAMETER Experiment Name: At_15mM_NH4NO3_L-to-H_P Parameter: Age (hr) Value: 14
  misc_feature: MA Experiment 20000709 PARAMETER Experiment Name: At_15mM_NH4NO3_L-to-H_P Parameter: Organism Value: A. thaliana
  misc_feature: MA Experiment 20000709 PARAMETER Experiment Name: At_15mM_NH4NO3_L-to-H_P Parameter: Plant Line Value: WS
  misc_feature: MA Experiment 20000709 PARAMETER Experiment Name: At_15mM_NH4NO3_L-to-H_P Parameter: Timepoint (hr) Value: 4
  misc_feature: MA Experiment 20000709 PARAMETER Experiment Name: At_15mM_NH4NO3_L-to-H_P Parameter: Tissue Value: Aerial
  misc_feature: MA Experiment 20000709 PARAMETER Experiment Name: At_15mM_NH4NO3_L-to-H_P Parameter: Treatment Value: 15mM NH4NO3 vs. 30mM Mannitol
  misc_feature: MA Experiment ID: 20000794 Result: Down-regulated in Transcription
  misc_feature: MA Experiment 20000794 PARAMETER Experiment Name: At_Petals_P Parameter: Age (day) Value: 23-25 days
  misc_feature: MA Experiment 20000794 PARAMETER Experiment Name: At_Petals_P Parameter: Plant Line Value: WS
  misc_feature: MA Experiment 20000794 PARAMETER Experiment Name: At_Petals_P Parameter: Tissue Value: Petals vs. Whole plant
  misc_feature: MA Experiment ID: 20001554 Result: Down-regulated in Transcription
  misc_feature: MA Experiment 20001554 PARAMETER Experiment Name: At_Drought_Soil_Dry_P Parameter: Age (day) Value: 21
  misc_feature: MA Experiment 20001554 PARAMETER Experiment Name: At_Drought_Soil_Dry_P Parameter: Organism Value: A. thaliana
  misc_feature: MA Experiment 20001554 PARAMETER Experiment Name: At_Drought_Soil_Dry_P Parameter: Plant Line Value: WS
  misc_feature: MA Experiment 20001554 PARAMETER Experiment Name: At_Drought_Soil_Dry_P Parameter: Post Timepoint (hr) Value: None
  misc_feature: MA Experiment 20001554 PARAMETER Experiment Name: At_Drought_Soil_Dry_P Parameter: Post-Treatment Value: None
  misc_feature: MA Experiment 20001554 PARAMETER Experiment Name: At_Drought_Soil_Dry_P Parameter: Timepoint (day) Value: 7
  misc_feature: MA Experiment 20001554 PARAMETER Experiment Name: At_Drought_Soil_Dry_P Parameter: Treatment Value: Drought vs. No Drought
  misc_feature: MA Experiment ID: 20001556 Result: Down-regulated in Transcription
  misc_feature: MA Experiment 20001556 PARAMETER Experiment Name: At_Drought_Soil_Dry_P Parameter: Age (day) Value: 26
  misc_feature: MA Experiment 20001556 PARAMETER Experiment Name: At_Drought_Soil_Dry_P Parameter: Organism Value: A. thaliana
  misc_feature: MA Experiment 20001556 PARAMETER Experiment Name: At_Drought_Soil_Dry_P Parameter: Plant Line Value: WS
  misc_feature: MA Experiment 20001556 PARAMETER Experiment Name: At_Drought_Soil_Dry_P Parameter: Post Timepoint (hr) Value: None
  misc_feature: MA Experiment 20001556 PARAMETER Experiment Name: At_Drought_Soil_Dry_P Parameter: Post-Treatment Value: None
  misc_feature: MA Experiment 20001556 PARAMETER Experiment Name: At_Drought_Soil_Dry_P Parameter: Timepoint (day) Value: 12
  misc_feature: MA Experiment 20001556 PARAMETER Experiment Name: At_Drought_Soil_Dry_P Parameter: Treatment Value: Drought vs. No Drought
  misc_feature: MA Experiment ID: 20001757 Result: Down-regulated in Transcription
  misc_feature: MA Experiment 20001757 PARAMETER Experiment Name: At_50mM_NH4NO3_L-to-H_P Parameter: Timepoint (hr) Value: 6
  misc_feature: MA Experiment 20001757 PARAMETER Experiment Name: At_50mM_NH4NO3_L-to-H_P Parameter: Tissue Value: Leaf
  misc_feature: MA Experiment 20001757 PARAMETER Experiment Name: At_50mM_NH4NO3_L-to-H_P Parameter: Treatment Value: 50mM NH4NO3 vs 100mM Mannitol
  misc_feature: MA Experiment ID: 20001904 Result: Down-regulated in Transcription
  misc_feature: MA Experiment 20001904 PARAMETER Experiment Name: At_Drought_Reproduction_P Parameter: Age (day) Value: 37
  misc_feature: MA Experiment 20001904 PARAMETER Experiment Name: At_Drought_Reproduction_P Parameter: Organism Value: A. thaliana
  misc_feature: MA Experiment 20001904 PARAMETER Experiment Name: At_Drought_Reproduction_P Parameter: Plant Line Value: WS
  misc_feature: MA Experiment 20001904 PARAMETER Experiment Name: At_Drought_Reproduction_P Parameter: Timepoint (day) Value: 7
  misc_feature: MA Experiment 20001904 PARAMETER Experiment Name: At_Drought_Reproduction_P Parameter: Tissue Value: Rosettes
  misc_feature: MA Experiment 20001904 PARAMETER Experiment Name: At_Drought_Reproduction_P Parameter: Treatment Value: Drought vs. No Drought
caaggacgttttaagaatctggtggaattgatttgatagtagtatacaattgtgatgtatatatacatacaaatattaactgttcttggatttattgaaaggaaatgactttaaattacaagaagcgtgacccacacgttaagtcagtctttctttactaatattcttttcgattagtcaaataaacctcatgaacaagtcattggagcccacttaaactctacttttctattcttcttctttctttttgttattctatatattagttagcaacttccacgttgtagcgatggaaggatccaagctacttccttgcgtccataagtctccggttcccacctcccaccaattatatataaattatgagattttgggtttaacaaaactcaaaaaacacaaatacacccaaaacaagatgagctcctctgactcttcttccgccgaatcccgtctagccacggctaagacggttctcaccaccgcggcttcggtggctgcgaccgcaatgctagctcgatctttagtccaagattatttgcctgacgaggtgcatcactacatttcctatggattccgttccatctttggttacttctcatcccaaatgacgataatcatcgaagaatttgaaggttttgctcacaatgaagtctttgaagctgcagaggcctatctagccaccaagatctctccttctaacaaaagaatcaaagtgagtaaacatgagaaagaaaacaactacaatgtcaccgtggagcgtgacgaagaagttgttgacacctacaatggcgtcaaattccagtggatcctccattgtcgtcatgtcgagtccaagcacttccacaacccacgggatctaaactccacactgagatctgaggtccgatcattcgaactcaacttccacaagaaattcaaagacgtagctcttgaatcttacttgccattcatggtgaaaagagccacgttgatgaagcaagagaagaaaacactcaagatcttcactctctccccagaaaacatgtatgggaactactctgacgcgtggacctctgttactcttgaccatccttctaccttcaaaactctagcaatggattcagatgtcaagacaagtgtgatggaagatctagacaaattcgtaaagcgaagagacttctataaaagggttggtaaagcttggaagagaggttacttgctgtacggtccaccaggcacagggaagtcaagcttgatcgcagccatggccaatcatctcaactttgatatatacgacctagagttgaccgcggttaacaacaattctgagctccggcgattattgattgccactgctaatcgttcgattcttatcgtagaagatatcgattgttcactagaattgaaagataggactagcgatgaacctcctcgggaatctgacgatatagaagatccacggtataaaaaagtgacactctctggactgttgaatttcatagatggtctatggtcaagctgcggtgacgaaaggatcataatcttcacaaccaattacaaagagaaactcgacgcggccttgctgagaccaggacgtatggatatgcacatccacatgtcgtattgcacaccaagtactttcaaagctcttgctttgaactatcttgagatcaaagagcaccgccttttcagcaagatcgaggaaggtattgaggcgacagaggtcactccagcagaagtagctgaacagcttatgagaaatgactctgtagacaaggttcttgagggtttgattgagttcttgaaagtcaagaagatcgaaaacgaacaagataaggccaaaacagagaagcaagagttggagaacaagaaaaagaccaaggagggaacagattccgtagtcaagaaagaggttgatgaacagctagtgaggaatgaccgtgttgataaggttcttgagggtttggtcgagttgttaaaagccaagaagatcgaggacgaccaagataaagccaaacatgaggaggttgaacaacattaacttgtgagatatcaatacctaaatcattaaatcgccagttactgtctataatctacagattcatttataaacctagtcctaagataaaataatcttagagagattgagaccaaaaaagggaaaaaattgaggagatcagataaaacacctctgcatccgagtggtagctgtaaagagaagagcacgtgtatttatacaaaactatgcgtttagcttgttttttctctctgttttttttctaactttttttagcacaatttgttttaagct

SEQ ID NO: 84394 - protein, 576 aa, Arabidopsis thaliana; identical to SEQ ID NO: 22005
  peptide (1)..(576): Ceres Seq. ID no. 12674924
  misc_feature (301)..(492): Pfam Name: ATPase family associated with various cellular Pfam Description: ATPase family associated with various cellular
  misc_feature (1)..(576): Homolog of NCBI NO: 30693378 NR Description: AAA-type ATPase family [Arabidopsis thaliana] AT3g50930/F18B3_210 [Arabidopsis thaliana]
  misc_feature (43)..(576): Homolog of NCBI NO: 7485703 NR Description: hypothetical protein F18B3.210 - Arabidopsis >gi|4835244|emb|CAB42922.1| putative mitochondrial protein thaliana] >gi|13877697|gb|AAK43926.1|AF370607_1 putative
  misc_feature (43)..(576): Homolog of NCBI NO: 21592769 NR Description: BCS1 protein-like protein [Arabidopsis thaliana]
  misc_feature (48)..(507): Homolog of NCBI NO: 30693380 NR Description: AAA-type ATPase family [Arabidopsis thaliana]
  misc_feature (530)..(568): Homolog of NCBI NO: 30693380 NR Description: AAA-type ATPase family [Arabidopsis thaliana]
  misc_feature (48)..(507): Homolog of NCBI NO: 39104562 NR Description: putative BCS1 protein [Arabidopsis thaliana]
  misc_feature (530)..(568): Homolog of NCBI NO: 39104562 NR Description: putative BCS1 protein [Arabidopsis thaliana]
  misc_feature (48)..(388): Homolog of NCBI NO: 7485704 NR Description: hypothetical protein F18B3.220 - Arabidopsis >gi|4835245|emb|CAB42923.1| putative mitochondrial protein
  misc_feature (387)..(507): Homolog of NCBI NO: 7485704 NR Description: hypothetical protein F18B3.220 - Arabidopsis >gi|4835245|emb|CAB42923.1| putative mitochondrial protein
  misc_feature (530)..(568): Homolog of NCBI NO: 7485704 NR Description: hypothetical protein F18B3.220 - Arabidopsis >gi|4835245|emb|CAB42923.1| putative mitochondrial protein

SEQ ID NO: 84395 - protein, 534 aa, Arabidopsis thaliana; identical to SEQ ID NO: 22006
  peptide (1)..(534): Ceres Seq. ID no. 12674925
  misc_feature (259)..(450): Pfam Name: ATPase family associated with various cellular Pfam Description: ATPase family associated with various cellular
  misc_feature (1)..(534): Homolog of NCBI NO: 30693378 NR Description: AAA-type ATPase family [Arabidopsis thaliana] AT3g50930/F18B3_210 [Arabidopsis thaliana]
  misc_feature (1)..(534): Homolog of NCBI NO: 7485703 NR Description: hypothetical protein F18B3.210 - Arabidopsis >gi|4835244|emb|CAB42922.1| putative mitochondrial protein thaliana] >gi|13877697|gb|AAK43926.1|AF370607_1 putative
  misc_feature (1)..(534): Homolog of NCBI NO: 21592769 NR Description: BCS1 protein-like protein [Arabidopsis thaliana]
  misc_feature (6)..(465): Homolog of NCBI NO: 30693380 NR Description: AAA-type ATPase family [Arabidopsis thaliana]
  misc_feature (488)..(526): Homolog of NCBI NO: 30693380 NR Description: AAA-type ATPase family [Arabidopsis thaliana]
  misc_feature (6)..(465): Homolog of NCBI NO: 39104562 NR Description: putative BCS1 protein [Arabidopsis thaliana]
  misc_feature (488)..(526): Homolog of NCBI NO: 39104562 NR Description: putative BCS1 protein [Arabidopsis thaliana]
  misc_feature (6)..(346): Homolog of NCBI NO: 7485704 NR Description: hypothetical protein F18B3.220 - Arabidopsis >gi|4835245|emb|CAB42923.1| putative mitochondrial protein
  misc_feature (345)..(465): Homolog of NCBI NO: 7485704 NR Description: hypothetical protein F18B3.220 - Arabidopsis >gi|4835245|emb|CAB42923.1| putative mitochondrial protein
  misc_feature (488)..(526): Homolog of NCBI NO: 7485704 NR Description: hypothetical protein F18B3.220 - Arabidopsis >gi|4835245|emb|CAB42923.1| putative mitochondrial protein

SEQ ID NO: 84396 - protein, 504 aa, Arabidopsis thaliana; identical to SEQ ID NO: 22007
  peptide (1)..(504): Ceres Seq. ID no. 12674926
  misc_feature (229)..(420): Pfam Name: ATPase family associated with various cellular Pfam Description: ATPase family associated with various cellular
  misc_feature (1)..(504): Homolog of NCBI NO: 30693378 NR Description: AAA-type ATPase family [Arabidopsis thaliana] AT3g50930/F18B3_210 [Arabidopsis thaliana]
  misc_feature (1)..(504): Homolog of NCBI NO: 7485703 NR Description: hypothetical protein F18B3.210 - Arabidopsis >gi|4835244|emb|CAB42922.1| putative mitochondrial protein thaliana] >gi|13877697|gb|AAK43926.1|AF370607_1 putative
  misc_feature (1)..(504): Homolog of NCBI NO: 21592769 NR Description: BCS1 protein-like protein [Arabidopsis thaliana]
  misc_feature (1)..(435): Homolog of NCBI NO: 30693380 NR Description: AAA-type ATPase family [Arabidopsis thaliana]
  misc_feature (458)..(496): Homolog of NCBI NO: 30693380 NR Description: AAA-type ATPase family [Arabidopsis thaliana]
  misc_feature (1)..(435): Homolog of NCBI NO: 39104562 NR Description: putative BCS1 protein [Arabidopsis thaliana]
  misc_feature (458)..(496): Homolog of NCBI NO: 39104562 NR Description: putative BCS1 protein [Arabidopsis thaliana]
  misc_feature (1)..(316): Homolog of NCBI NO: 7485704 NR Description: hypothetical protein F18B3.220 - Arabidopsis >gi|4835245|emb|CAB42923.1| putative mitochondrial protein
  misc_feature (315)..(435): Homolog of NCBI NO: 7485704 NR Description: hypothetical protein F18B3.220 - Arabidopsis >gi|4835245|emb|CAB42923.1| putative mitochondrial protein
  misc_feature (458)..(496): Homolog of NCBI NO: 7485704 NR Description: hypothetical protein F18B3.220 - Arabidopsis >gi|4835245|emb|CAB42923.1| putative mitochondrial protein

SEQ ID NO: 84397 - DNA, 1147 bp, Arabidopsis thaliana
  misc_feature (1)..(1147): Ceres Seq. ID no. 12674979
  misc_feature: MA Experiment ID: 108434 Result: Down-regulated in Transcription
  misc_feature: MA Experiment 108434 PARAMETER Experiment Name: At_Root_Tips_cDNA_P Parameter: Tissue Value: Root Tips
  misc_feature: MA Experiment ID: 108473 Result: Down-regulated in Transcription
  misc_feature: MA Experiment 108473 PARAMETER Experiment Name: At_Drought_Flowers_cDNA_P Parameter: Timepoint (hr) Value: 7 d
  misc_feature: MA Experiment 108473 PARAMETER Experiment Name: At_Drought_Flowers_cDNA_P Parameter: Tissue Value: Flower
  misc_feature: MA Experiment 108473 PARAMETER Experiment Name: At_Drought_Flowers_cDNA_P Parameter: Treatment Value: Drought vs. No Drought
  misc_feature: MA Experiment ID: 108572 Result: Up-regulated in Transcription
  misc_feature: MA Experiment 108572 PARAMETER Experiment Name: At_Drought_cDNA_P Parameter: Timepoint (hr) Value: 1
  misc_feature: MA Experiment 108572 PARAMETER Experiment Name: At_Drought_cDNA_P Parameter: Tissue Value: Aerial
  misc_feature: MA Experiment 108572 PARAMETER Experiment Name: At_Drought_cDNA_P Parameter: Treatment Value: Drought vs. No Drought
  misc_feature: MA Experiment ID: 108594 Result: Down-regulated in Transcription
  misc_feature: MA Experiment 108594 PARAMETER Experiment Name: At_Ler-rhl_Root_cDNA_P Parameter: Plant Line Value: null
  misc_feature: MA Experiment ID: 108607 Result: Up-regulated in Transcription
  misc_feature: MA Experiment 108607 PARAMETER Experiment Name: At_100uM_ABA_cDNA_P Parameter: Timepoint (hr) Value: 4
  misc_feature: MA Experiment 108607 PARAMETER Experiment Name: At_100uM_ABA_cDNA_P Parameter: Tissue Value: Aerial
  misc_feature: MA Experiment 108607 PARAMETER Experiment Name: At_100uM_ABA_cDNA_P Parameter: Treatment Value: 100uM ABA vs. No Treatment
  misc_feature: MA Experiment ID: 20000090 Result: Down-regulated in Transcription
  misc_feature: MA Experiment ID: 20000111 Result: Down-regulated in Transcription
  misc_feature: MA Experiment 20000111 PARAMETER Experiment Name: At_42deg_Heat_cDNA_P Parameter: Temperature (deg C) Value: 42 vs. 22
  misc_feature: MA Experiment 20000111 PARAMETER Experiment Name: At_42deg_Heat_cDNA_P Parameter: Timepoint (hr) Value: 6
  misc_feature: MA Experiment 20000111 PARAMETER Experiment Name: At_42deg_Heat_cDNA_P Parameter: Tissue Value: Aerial
  misc_feature: MA Experiment ID: 20000112 Result: Down-regulated in Transcription
  misc_feature: MA Experiment 20000112 PARAMETER Experiment Name: At_42deg_Heat_cDNA_P Parameter: Temperature (deg C) Value: 42 vs. 22
  misc_feature: MA Experiment 20000112 PARAMETER Experiment Name: At_42deg_Heat_cDNA_P Parameter: Timepoint (hr) Value: 2
  misc_feature: MA Experiment 20000112 PARAMETER Experiment Name: At_42deg_Heat_cDNA_P Parameter: Tissue Value: Aerial
  misc_feature: MA Experiment ID: 20000113 Result: Down-regulated in Transcription
  misc_feature: MA Experiment 20000113 PARAMETER Experiment Name: At_42deg_Heat_cDNA_P Parameter: Temperature (deg C) Value: 42 vs. 22
  misc_feature: MA Experiment 20000113 PARAMETER Experiment Name: At_42deg_Heat_cDNA_P Parameter: Timepoint (hr) Value: 8
  misc_feature: MA Experiment 20000113 PARAMETER Experiment Name: At_42deg_Heat_cDNA_P Parameter: Tissue Value: Aerial
  misc_feature: MA Experiment ID: 20000117 Result: Down-regulated in Transcription
  misc_feature: MA Experiment 20000117 PARAMETER Experiment Name: At_100uM_ABA_Mutants_cDNA_P Parameter: Plant Line Value: Columbia
  misc_feature: MA Experiment 20000117 PARAMETER Experiment Name: At_100uM_ABA_Mutants_cDNA_P Parameter: Timepoint (hr) Value: 6
  misc_feature: MA Experiment 20000117 PARAMETER Experiment Name: At_100uM_ABA_Mutants_cDNA_P Parameter: Tissue Value: Aerial
  misc_feature: MA Experiment 20000117 PARAMETER Experiment Name: At_100uM_ABA_Mutants_cDNA_P Parameter: Treatment Value: 100uM ABA vs. No Treatment
  misc_feature: MA Experiment ID: 20000234 Result: Up-regulated in Transcription
  misc_feature: MA Experiment 20000234 PARAMETER Experiment Name: At_Siliques_P Parameter: Age (day) Value: 21
  misc_feature: MA Experiment 20000234 PARAMETER Experiment Name: At_Siliques_P Parameter: Organism Value: A. thaliana
  misc_feature: MA Experiment 20000234 PARAMETER Experiment Name: At_Siliques_P Parameter: Plant Line Value: WS
  misc_feature: MA Experiment 20000234 PARAMETER Experiment Name: At_Siliques_P Parameter: Tissue Value: Less Than 5mm Siliques vs. Whole Plant
  misc_feature: MA Experiment ID: 20000235 Result: Up-regulated in Transcription
  misc_feature: MA Experiment 20000235 PARAMETER Experiment Name: At_Siliques_P Parameter: Age (day) Value: 21
  misc_feature: MA Experiment 20000235 PARAMETER Experiment Name: At_Siliques_P Parameter: Organism Value: A. thaliana
  misc_feature: MA Experiment 20000235 PARAMETER Experiment Name: At_Siliques_P Parameter: Plant Line Value: WS
  misc_feature: MA Experiment 20000235 PARAMETER Experiment Name: At_Siliques_P Parameter: Tissue Value: 5-10mm Siliques vs. Whole Plant
  misc_feature: MA Experiment ID: 20000265 Result: Up-regulated in Transcription
  misc_feature: MA Experiment 20000265 PARAMETER Experiment Name: At_Open_Flower_P Parameter: Age (day) Value: 21
  misc_feature: MA Experiment 20000265 PARAMETER Experiment Name: At_Open_Flower_P Parameter: Plant Line Value: WS
  misc_feature: MA Experiment 20000265 PARAMETER Experiment Name: At_Open_Flower_P Parameter: Tissue Value: Closed Flower vs. Whole Plant
  misc_feature: MA Experiment ID: 20000286 Result: Up-regulated in Transcription
  misc_feature: MA Experiment 20000286 PARAMETER Experiment Name: At_Open_Flower_P Parameter: Age (day) Value: 21
  misc_feature: MA Experiment 20000286 PARAMETER Experiment Name: At_Open_Flower_P Parameter: Plant Line Value: WS
  misc_feature: MA Experiment 20000286 PARAMETER Experiment Name: At_Open_Flower_P Parameter: Tissue Value: Half Open vs. Whole Plant
  misc_feature: MA Experiment ID: 20000495 Result: Down-regulated in Transcription
  misc_feature: MA Experiment 20000495 PARAMETER Experiment Name: At_Guard_Cells_P Parameter: Harvest Date Value: 8/2/2002
  misc_feature: MA Experiment 20000495 PARAMETER Experiment Name: At_Guard_Cells_P Parameter: Organism Value: A. thaliana
  misc_feature: MA Experiment 20000495 PARAMETER Experiment Name: At_Guard_Cells_P Parameter: Tissue Value: Guard Cells vs. Leaves
  misc_feature: MA Experiment ID: 20000794 Result: Down-regulated in Transcription
  misc_feature: MA Experiment 20000794 PARAMETER Experiment Name: At_Petals_P Parameter: Age (day) Value: 23-25 days
  misc_feature: MA Experiment 20000794 PARAMETER Experiment Name: At_Petals_P Parameter: Plant Line Value: WS
  misc_feature: MA Experiment 20000794 PARAMETER Experiment Name: At_Petals_P Parameter: Tissue Value: Petals vs. Whole plant
  misc_feature: MA Experiment ID: 20001248 Result: Down-regulated in Transcription
  misc_feature: MA Experiment 20001248 PARAMETER Experiment Name: At_Far-red-induction_P Parameter: Age (day) Value: 7
  misc_feature: MA Experiment 20001248 PARAMETER Experiment Name: At_Far-red-induction_P Parameter: Light Value: Far-red vs. White
  misc_feature: MA Experiment 20001248 PARAMETER Experiment Name: At_Far-red-induction_P Parameter: Organism Value: A. thaliana
  misc_feature: MA Experiment 20001248 PARAMETER Experiment Name: At_Far-red-induction_P Parameter: Plant Line Value: Columbia
  misc_feature: MA Experiment 20001248 PARAMETER Experiment Name: At_Far-red-induction_P Parameter: Timepoint (hr) Value: 4
  misc_feature: MA Experiment 20001248 PARAMETER Experiment Name: At_Far-red-induction_P Parameter: Tissue Value: Whole Plant
  misc_feature: MA Experiment ID: 20001450 Result: Down-regulated in Transcription
  misc_feature: MA Experiment 20001450 PARAMETER Experiment Name: At_Far-red-induction_P Parameter: Age (day) Value: 7
  misc_feature: MA Experiment 20001450 PARAMETER Experiment Name: At_Far-red-induction_P Parameter: Light Value: Far-red vs. White
  misc_feature: MA Experiment 20001450 PARAMETER Experiment Name: At_Far-red-induction_P Parameter: Organism Value: A. thaliana
  misc_feature: MA Experiment 20001450 PARAMETER Experiment Name: At_Far-red-induction_P Parameter: Plant Line Value: Columbia
  misc_feature: MA Experiment 20001450 PARAMETER Experiment Name: At_Far-red-induction_P Parameter: Timepoint (hr) Value: 8
  misc_feature: MA Experiment 20001450 PARAMETER Experiment Name: At_Far-red-induction_P Parameter: Tissue Value: Whole Plant
  misc_feature: MA Experiment ID: 20001451 Result: Down-regulated in Transcription
  misc_feature: MA Experiment 20001451 PARAMETER Experiment Name: At_Far-red-induction_P Parameter: Age (day) Value: 7
  misc_feature: MA Experiment 20001451 PARAMETER Experiment Name: At_Far-red-induction_P Parameter: Light Value: Far-red vs. White
  misc_feature: MA Experiment 20001451 PARAMETER Experiment Name: At_Far-red-induction_P Parameter: Organism Value: A. thaliana
  misc_feature: MA Experiment 20001451 PARAMETER Experiment Name: At_Far-red-induction_P Parameter: Plant Line Value: Columbia
  misc_feature: MA Experiment 20001451 PARAMETER Experiment Name: At_Far-red-induction_P Parameter: Timepoint (hr) Value: 24
  misc_feature: MA Experiment 20001451 PARAMETER Experiment Name: At_Far-red-induction_P Parameter: Tissue Value: Whole Plant
  misc_feature: MA Experiment ID: 20001557 Result: Up-regulated in Transcription
  misc_feature: MA Experiment 20001557 PARAMETER Experiment Name: At_Drought_Soil_Dry_P Parameter: Age (day) Value: 27
  misc_feature: MA Experiment 20001557 PARAMETER Experiment Name: At_Drought_Soil_Dry_P Parameter: Organism Value: A. thaliana
  misc_feature: MA Experiment 20001557 PARAMETER Experiment Name: At_Drought_Soil_Dry_P Parameter: Plant Line Value: WS
  misc_feature: MA Experiment 20001557 PARAMETER Experiment Name: At_Drought_Soil_Dry_P Parameter: Post Timepoint (hr) Value: 3
  misc_feature: MA Experiment 20001557 PARAMETER Experiment Name: At_Drought_Soil_Dry_P Parameter: Post-Treatment Value: Re-Water vs. No Drought
  misc_feature: MA Experiment 20001557 PARAMETER Experiment Name: At_Drought_Soil_Dry_P Parameter: Timepoint (day) Value: 13
  misc_feature: MA Experiment 20001557 PARAMETER Experiment Name: At_Drought_Soil_Dry_P Parameter: Treatment Value: Drought vs. No Drought
  misc_feature: MA Experiment ID: 20001560 Result: Up-regulated in Transcription
  misc_feature: MA Experiment 20001560 PARAMETER Experiment Name: At_Drought_Soil_Dry_P Parameter: Age (day) Value: 28
  misc_feature: MA Experiment 20001560 PARAMETER Experiment Name: At_Drought_Soil_Dry_P Parameter: Organism Value: A. thaliana
  misc_feature: MA Experiment 20001560 PARAMETER Experiment Name: At_Drought_Soil_Dry_P Parameter: Plant Line Value: WS
  misc_feature: MA Experiment 20001560 PARAMETER Experiment Name: At_Drought_Soil_Dry_P Parameter: Post Timepoint (hr) Value: None
  misc_feature: MA Experiment 20001560 PARAMETER Experiment Name: At_Drought_Soil_Dry_P Parameter: Post-Treatment Value: None
  misc_feature: MA Experiment 20001560 PARAMETER Experiment Name: At_Drought_Soil_Dry_P Parameter: Timepoint (day) Value: 14
  misc_feature: MA Experiment 20001560 PARAMETER Experiment Name: At_Drought_Soil_Dry_P Parameter: Treatment Value: Drought vs. No Drought
  misc_feature: MA Experiment ID: 20001911 Result: Down-regulated in Transcription
  misc_feature: MA Experiment 20001911 PARAMETER Experiment Name: At_Drought_Reproduction_P Parameter: Age (day) Value: 40
  misc_feature: MA Experiment 20001911 PARAMETER Experiment Name: At_Drought_Reproduction_P Parameter: Organism Value: A. thaliana
  misc_feature: MA Experiment 20001911 PARAMETER Experiment Name: At_Drought_Reproduction_P Parameter: Plant Line Value: WS
  misc_feature: MA Experiment 20001911 PARAMETER Experiment Name: At_Drought_Reproduction_P Parameter: Timepoint (day) Value: 10
  misc_feature: MA Experiment 20001911 PARAMETER Experiment Name: At_Drought_Reproduction_P Parameter: Tissue Value: Flowers
  misc_feature: MA Experiment 20001911 PARAMETER Experiment Name: At_Drought_Reproduction_P Parameter: Treatment Value: Drought vs. No Drought
ttataaagaaaaacacggatcttggaattatctttaaaatcatcttgtgaatacagcaaattgggaaatatgagaaaaggattctctcaagaagaagcttctcctcgtctagacagacttatgttcgataagataaaagaagcattaggaggaagagctcatatgttgttatcaggagcagcgcctctacctcgtcatgtagaggagttcttgagaatcattcctgcctctaatctctctcaaggttatggattgactgagagttgtgggggaagcttcacgaccttagccggagtattttctatggtggggacagtgggtgtgccaatgcccacggtggaggcaaggctagtgtccgtaccagagatgggttacgacgccttttccgctgacgtgccgagaggagagatttgtcttagaggaaattcaatgttttctggttaccataaaagacaagatctaactgatcaagtcctaatcgatggatggttccacacaggagatattggagaatggcaagaagatggatcaatgaagatcatcgataggaagaagaacatcttcaagttgtctcaaggtgaatatgttgctgttgaaaacctcgaaaacacttactcaagatgtcccctcattgctcagatatgggtctatggcaacagcttcgagtcatttttggtaggtgtggttgtacctgatagaaaagctattgaagattgggctaaactcaattaccaatctcccaatgatttcgaatctctatgtcaaaatctcaaagctcaaaaatacttcttggatgagcttaactctaccgcaaagcaatatcaacttaaaggatttgaaatgttaaaagctattcatttagaaccaaacccttttgatattgaaagagatcttattactccaactttcaagctgaaaaggccacagctcctccaacattacaagggcatagttgatcaactttattcagaagcaaagaggtccatggcatagataattagataccgatcggctattcattttctgatgctatttgggtttgtatgatatgttacaaaattgtgttcggatcctctcatcatgtgattcttgttacactaaatttatagtttggaaactatatatatactattaagcaacgtttact

SEQ ID NO: 84398 - protein, 307 aa, Arabidopsis thaliana; identical to SEQ ID NO: 25258
  peptide (1)..(307): Ceres Seq. ID no. 12674980
  misc_feature (1)..(193): Pfam Name: AMP-binding enzyme Pfam Description: AMP-binding enzyme
  misc_feature (1)..(307): Homolog of NCBI NO: 22330132 NR Description: acyl CoA synthetase, putative; protein id: supported by cDNA: gi_17529275, supported by cDNA: gi_20453101, by cDNA: gi_20805864 [Arabidopsis thaliana]
  misc_feature (1)..(307): Homolog of NCBI NO: 7437844 NR Description: probable long-chain-fatty-acid-CoA ligase (EC
  misc_feature (1)..(303): Homolog of NCBI NO: 34911190 NR Description: putative acyl-CoA synthetase [Oryza sativa
  misc_feature (1)..(307): Homolog of NCBI NO: 15237023 NR Description: putative acyl-CoA synthetase; protein id: supported by cDNA: gi_20805870 [Arabidopsis thaliana]
  misc_feature (1)..(301): Homolog of NCBI NO: 15217631 NR Description: acyl-CoA synthetase, putative; protein id: supported by cDNA: gi_14532621, supported by cDNA: gi_19310628,
  misc_feature (1)..(307): Homolog of NCBI NO: 20805871 NR Description: long chain acyl-CoA synthetase 5 [Arabidopsis
  misc_feature (1)..(307): Homolog of NCBI NO: 7437845 NR Description: probable long-chain-fatty-acid-CoA ligase (EC
  misc_feature (1)..(307): Homolog of NCBI NO: 15236634 NR Description: acyl-CoA synthetase - like protein; protein id: supported by cDNA: gi_15146195, supported by cDNA: gi_20805868
  misc_feature (1)..(298): Homolog of NCBI NO: 7437841 NR Description: probable long-chain-fatty-acid-CoA ligase (EC
  misc_feature (1)..(303): Homolog of NCBI NO: 34898260 NR Description: similar to long-chain-fatty-acid--CoA ligase 1

SEQ ID NO: 84399 - protein, 290 aa, Arabidopsis thaliana; identical to SEQ ID NO: 25259
  peptide (1)..(290): Ceres Seq. ID no. 12674981
  misc_feature (1)..(176): Pfam Name: AMP-binding enzyme Pfam Description: AMP-binding enzyme
  misc_feature (1)..(290): Homolog of NCBI NO: 22330132 NR Description: acyl CoA synthetase, putative; protein id: supported by cDNA: gi_17529275, supported by cDNA: gi_20453101, by cDNA: gi_20805864 [Arabidopsis thaliana]
  misc_feature (1)..(290): Homolog of NCBI NO: 7437844 NR Description: probable long-chain-fatty-acid-CoA ligase (EC
  misc_feature (1)..(286): Homolog of NCBI NO: 34911190 NR Description: putative acyl-CoA synthetase [Oryza sativa
  misc_feature (1)..(290): Homolog of NCBI NO: 15237023 NR Description: putative acyl-CoA synthetase; protein id: supported by cDNA: gi_20805870 [Arabidopsis thaliana]
  misc_feature (1)..(284): Homolog of NCBI NO: 15217631 NR Description: acyl-CoA synthetase, putative; protein id: supported by cDNA: gi_14532621, supported by cDNA: gi_19310628,
  misc_feature (1)..(290): Homolog of NCBI NO: 20805871 NR Description: long chain acyl-CoA synthetase 5 [Arabidopsis
  misc_feature (1)..(290): Homolog of NCBI NO: 7437845 NR Description: probable long-chain-fatty-acid-CoA ligase (EC
  misc_feature (1)..(290): Homolog of NCBI NO: 15236634 NR Description: acyl-CoA synthetase - like protein; protein id: supported by cDNA: gi_15146195, supported by cDNA: gi_20805868
  misc_feature (1)..(281): Homolog of NCBI NO: 7437841 NR Description: probable long-chain-fatty-acid-CoA ligase (EC
  misc_feature (1)..(286): Homolog of NCBI NO: 34898260 NR Description: similar to long-chain-fatty-acid--CoA ligase 1

SEQ ID NO: 84400 - protein, 276 aa, Arabidopsis thaliana; identical to SEQ ID NO: 25260
  peptide (1)..(276): Ceres Seq. ID no. 12674982
  misc_feature (1)..(162): Pfam Name: AMP-binding enzyme Pfam Description: AMP-binding enzyme
  misc_feature (1)..(276): Homolog of NCBI NO: 22330132 NR Description: acyl CoA synthetase, putative; protein id: supported by cDNA: gi_17529275, supported by cDNA: gi_20453101, by cDNA: gi_20805864 [Arabidopsis thaliana]
  misc_feature (1)..(276): Homolog of NCBI NO: 7437844 NR Description: probable long-chain-fatty-acid-CoA ligase (EC
  misc_feature (1)..(272): Homolog of NCBI NO: 34911190 NR Description: putative acyl-CoA synthetase [Oryza sativa
  misc_feature (1)..(276): Homolog of NCBI NO: 15237023 NR Description: putative acyl-CoA synthetase; protein id: supported by cDNA: gi_20805870 [Arabidopsis thaliana]
  misc_feature (1)..(270): Homolog of NCBI NO: 15217631 NR Description: acyl-CoA synthetase, putative; protein id: supported by cDNA: gi_14532621, supported by cDNA: gi_19310628,
  misc_feature (1)..(276): Homolog of NCBI NO: 20805871 NR Description: long chain acyl-CoA synthetase 5 [Arabidopsis
  misc_feature (1)..(276): Homolog of NCBI NO: 7437845 NR Description: probable long-chain-fatty-acid-CoA ligase (EC
  misc_feature (1)..(276): Homolog of NCBI NO: 15236634 NR Description: acyl-CoA synthetase - like protein; protein id: supported by cDNA: gi_15146195, supported by cDNA: gi_20805868
  misc_feature (1)..(267): Homolog of NCBI NO: 7437841 NR Description: probable long-chain-fatty-acid-CoA ligase (EC
  misc_feature (1)..(272): Homolog of NCBI NO: 34898260 NR Description: similar to long-chain-fatty-acid--CoA ligase 1

SEQ ID NO: 84401 - DNA, 1217 bp, Arabidopsis thaliana
  misc_feature (1)..(1217): Ceres Seq. ID no. 12675002
  misc_feature: MA Experiment ID: 108434 Result: Down-regulated in Transcription
  misc_feature: MA Experiment 108434 PARAMETER Experiment Name: At_Root_Tips_cDNA_P Parameter: Tissue Value: Root Tips
  misc_feature: MA Experiment ID: 108488 Result: Down-regulated in Transcription
  misc_feature: MA Experiment ID: 108561 Result: Up-regulated in Transcription
  misc_feature: MA Experiment 108561 PARAMETER Experiment Name: At_100uM_ABA_cDNA_P Parameter: Timepoint (hr) Value: 6
  misc_feature: MA Experiment 108561 PARAMETER Experiment Name: At_100uM_ABA_cDNA_P Parameter: Tissue Value: Aerial
  misc_feature: MA Experiment 108561 PARAMETER Experiment Name: At_100uM_ABA_cDNA_P Parameter: Treatment Value: 100uM ABA vs. No Treatment
  misc_feature: MA Experiment ID: 108569 Result: Up-regulated in Transcription
  misc_feature: MA Experiment 108569 PARAMETER Experiment Name: At_0.001%_MeJA__cDNA_P Parameter: Timepoint (hr) Value: 6
  misc_feature: MA Experiment 108569 PARAMETER Experiment Name: At_0.001%_MeJA__cDNA_P Parameter: Tissue Value: Aerial
  misc_feature: MA Experiment 108569 PARAMETER Experiment Name: At_0.001%_MeJA__cDNA_P Parameter: Treatment Value: 0.001% MeJA vs. No Treatment
  misc_feature: MA Experiment ID: 108576 Result: Up-regulated in Transcription
  misc_feature: MA Experiment 108576 PARAMETER Experiment Name: At_42deg_Heat_cDNA_P Parameter: Temperature (deg C) Value: 42 vs. 22
  misc_feature: MA Experiment 108576 PARAMETER Experiment Name: At_42deg_Heat_cDNA_P Parameter: Timepoint (hr) Value: 1
  misc_feature: MA Experiment 108576 PARAMETER Experiment Name: At_42deg_Heat_cDNA_P Parameter: Tissue Value: Aerial
  misc_feature: MA Experiment ID: 108585 Result: Up-regulated in Transcription
  misc_feature: MA Experiment 108585 PARAMETER Experiment Name: At_5mM_NaNP_cDNA_P Parameter: Timepoint (hr) Value: 6
  misc_feature: MA Experiment 108585 PARAMETER Experiment Name: At_5mM_NaNP_cDNA_P Parameter: Tissue Value: Aerial
  misc_feature: MA Experiment 108585 PARAMETER Experiment Name: At_5mM_NaNP_cDNA_P Parameter: Treatment Value: null
  misc_feature: MA Experiment ID: 108594 Result: Down-regulated in Transcription
  misc_feature: MA Experiment 108594 PARAMETER Experiment Name: At_Ler-rhl_Root_cDNA_P Parameter: Plant Line Value: null
  misc_feature: MA Experiment ID: 108609 Result: Up-regulated in Transcription
  misc_feature: MA Experiment 108609 PARAMETER Experiment Name: At_100uM_ABA_cDNA_P Parameter: Timepoint (hr) Value: 24
  misc_feature: MA Experiment 108609 PARAMETER Experiment Name: At_100uM_ABA_cDNA_P Parameter: Tissue Value: Aerial
  misc_feature: MA Experiment 108609 PARAMETER Experiment Name: At_100uM_ABA_cDNA_P Parameter: Treatment Value: 100uM ABA vs. No Treatment
  misc_feature: MA Experiment ID: 20000071 Result: Up-regulated in Transcription
  misc_feature: MA Experiment 20000071 PARAMETER Experiment Name: At_100uM_ABA_Mutants_cDNA_P Parameter: Plant Line Value: CS8104
  misc_feature: MA Experiment 20000071 PARAMETER Experiment Name: At_100uM_ABA_Mutants_cDNA_P Parameter: Timepoint (hr) Value: 6
  misc_feature: MA Experiment 20000071 PARAMETER Experiment Name: At_100uM_ABA_Mutants_cDNA_P Parameter: Tissue Value: Aerial
  misc_feature: MA Experiment 20000071 PARAMETER Experiment Name: At_100uM_ABA_Mutants_cDNA_P Parameter: Treatment Value: 100uM ABA vs. No Treatment
  misc_feature: MA Experiment ID: 20000086 Result: Up-regulated in Transcription
  misc_feature: MA Experiment 20000086 PARAMETER Experiment Name: At_100uM_ABA_Mutants_cDNA_P Parameter: Plant Line Value: CS22
  misc_feature: MA Experiment 20000086 PARAMETER Experiment Name: At_100uM_ABA_Mutants_cDNA_P Parameter: Timepoint (hr) Value: 6
  misc_feature: MA Experiment 20000086 PARAMETER Experiment Name: At_100uM_ABA_Mutants_cDNA_P Parameter: Tissue Value: Aerial
  misc_feature: MA Experiment 20000086 PARAMETER Experiment Name: At_100uM_ABA_Mutants_cDNA_P Parameter: Treatment Value: 100uM ABA vs. No Treatment
  misc_feature: MA Experiment ID: 20000087 Result: Up-regulated in Transcription
  misc_feature: MA Experiment 20000087 PARAMETER Experiment Name: At_100uM_ABA_Mutants_cDNA_P Parameter: Plant Line Value: WS
  misc_feature: MA Experiment 20000087 PARAMETER Experiment Name: At_100uM_ABA_Mutants_cDNA_P Parameter: Timepoint (hr) Value: 6
  misc_feature: MA Experiment 20000087 PARAMETER Experiment Name: At_100uM_ABA_Mutants_cDNA_P Parameter: Tissue Value: Aerial
  misc_feature: MA Experiment 20000087 PARAMETER Experiment Name: At_100uM_ABA_Mutants_cDNA_P Parameter: Treatment Value: 100uM ABA vs. No Treatment
  misc_feature: MA Experiment ID: 20000088 Result: Up-regulated in Transcription
  misc_feature: MA Experiment 20000088 PARAMETER Experiment Name: At_100uM_ABA_Mutants_cDNA_P Parameter: Plant Line Value: Landsberg
  misc_feature: MA Experiment 20000088 PARAMETER Experiment Name: At_100uM_ABA_Mutants_cDNA_P Parameter: Timepoint (hr) Value: 6
  misc_feature: MA Experiment 20000088 PARAMETER Experiment Name: At_100uM_ABA_Mutants_cDNA_P Parameter: Tissue Value: Aerial
  misc_feature: MA Experiment 20000088 PARAMETER Experiment Name: At_100uM_ABA_Mutants_cDNA_P Parameter: Treatment Value: 100uM ABA vs. No Treatment
acatatgaacataacccaatctgaagatcaatcataaccttaaaccatctctcataattttagtatttctattctcaccaccaaaactcgttgatacatcacaccccaactgttgttactcatgtcctacagatcgatttaccgcactcttcgaccggtactatcatcttcggtacaatcctccggtttaggaattggaggattcaggggacatctcattagccacttgcccaatgttcggctattgagctctgacacgtcatctccggtaagtgggaataaccagccagaaaatcctatccgaacggccgatggtaaagttatatccacttattggggtatacctcctactaagatcactaaaccggacggttcagcttggaagtggaattgttttcagccatgggattcatacaaaccggatgtgtccattgatgtaactaaacatcataaaccctccaatttcactgacaaattcgcatattggaccgttcaaactctgaaaataccggttcaactattttttcagaggaagcacatgtgccatgcgatgttgctagagacggtggctgcggtgccgggaatggtcggggggatgcttttgcacttgaaatctctccggaggttcgaacatagcgggggatggatcaaagctttgctcgaagaggctgagaacgagcgtatgcatctcatgactttcatcgaactttcacaacccaaatggtacgaacgagcgattgtgttcacggtccaaggcgttttcttcaacgcatatttcctggcttatgtaatttcacccaaacttgctcatcgtatcactggatacttagaagaagaggctgtaaattcttacactgaatttctcaaagacattgatgccggaaaattcgaaaactcgccagctccagccatcgcaatcgattactggcggttgcctaaagatgcaacgcttagggatgtggtttatgttatacgagctgacgaagctcaccaccgtgatattaaccactatgcttcggatatacaattcaaaggacatgaactcaaggaagctccggctcctattggatatcattaaagattatgtgacaaagtcacaaagctgtgtatacatctatgaacatatgttgttgtggatctccatgatatttttattttatgttttcgatttatttaaaactgttattcgtttttattagctcaatatggatatttaa

SEQ ID NO: 84402 - protein, 318 aa, Arabidopsis thaliana
  peptide (1)..(318): Ceres Seq. ID no. 12675003
  misc_feature (34)..(316): Pfam Name: Alternative oxidase Pfam Description: Alternative oxidase
  misc_feature (1)..(318): Homolog of NCBI NO: 18398395 NR Description: oxidase, putative; protein id: At1g32350.1, by cDNA: 152458., supported by cDNA: gi_18176466 [Arabidopsis
  misc_feature (1)..(318): Homolog of NCBI NO: 21553592 NR Description: oxidase, putative [Arabidopsis thaliana]
  misc_feature (1)..(318): Homolog of NCBI NO: 18176467 NR Description: At1g32350/F5D14.4 [Arabidopsis thaliana]
  misc_feature (58)..(318): Homolog of NCBI NO: 6967043 NR Description: alternative oxidase [Populus tremula x Populus
  misc_feature (33)..(318): Homolog of NCBI NO: 29465624 NR Description: alternative oxidase 1b [Lycopersicon esculentum]
  misc_feature (65)..(318): Homolog of NCBI NO: 29465622 NR Description: alternative oxidase 1a [Lycopersicon esculentum]
  misc_feature (64)..(318): Homolog of NCBI NO: 3913066 NR Description: Alternative oxidase 2, mitochondrial precursor
  misc_feature (2)..(318): Homolog of NCBI NO: 11278947 NR Description: alternative respiratory pathway oxidase (EC
  misc_feature (66)..(318): Homolog of NCBI NO: 421824 NR Description: alternative respiratory pathway oxidase (EC
  misc_feature (66)..(318): Homolog of NCBI NO: 1872517 NR Description: alternative oxidase [Arabidopsis thaliana]
MSYRSIYRTLRPVLSSSVQSSGLGIGGFRGHLISHLPNVRLLSSDTSSPVSGNNQPENPIRTADGKVISTYWGIPPTKITKPDGSAWKWNCFQPWDSYKPDVSIDVTKHHKPSNFTDKFAYWTVQTLKIPVQLFFQRKHMCHAMLLETVAAVPGMVGGMLLHLKSLRRFEHSGGWIKALLEEAENERMHLMTFIELSQPKWYERAIVFTVQGVFFNAYFLAYVISPKLAHRITGYLEEEAVNSYTEFLKDIDAGKFENSPAPAIAIDYWRLPKDATLRDVVYVIRADEAHHRDINHYASDIQFKGHELKEAPAPIGYH

SEQ ID NO: 84403 - protein, 179 aa, Arabidopsis thaliana
  peptide (1)..(179): Ceres Seq. ID no. 12675004
  misc_feature (1)..(177): Pfam Name: Alternative oxidase Pfam Description: Alternative oxidase
  misc_feature (1)..(179): Homolog of NCBI NO: 18398395 NR Description: oxidase, putative; protein id: At1g32350.1, by cDNA: 152458., supported by cDNA: gi_18176466 [Arabidopsis
  misc_feature (1)..(179): Homolog of NCBI NO: 21553592 NR Description: oxidase, putative [Arabidopsis thaliana]
  misc_feature (1)..(179): Homolog of NCBI NO: 18176467 NR Description: At1g32350/F5D14.4 [Arabidopsis thaliana]
  misc_feature (1)..(179): Homolog of NCBI NO: 6967043 NR Description: alternative oxidase [Populus tremula x Populus
  misc_feature (1)..(179): Homolog of NCBI NO: 29465624 NR Description: alternative oxidase 1b [Lycopersicon esculentum]
  misc_feature (1)..(179): Homolog of NCBI NO: 29465622 NR Description: alternative oxidase 1a [Lycopersicon esculentum]
  misc_feature (1)..(179): Homolog of NCBI NO: 3913066 NR Description: Alternative oxidase 2, mitochondrial precursor
  misc_feature (1)..(179): Homolog of NCBI NO: 11278947 NR Description: alternative respiratory pathway oxidase (EC
  misc_feature (1)..(179): Homolog of NCBI NO: 421824 NR Description: alternative respiratory pathway oxidase (EC
  misc_feature (1)..(179): Homolog of NCBI NO: 1872517 NR Description: alternative oxidase [Arabidopsis thaliana]
MCHAMLLETVAAVPGMVGGMLLHLKSLRRFEHSGGWIKALLEEAENERMHLMTFIELSQPKWYERAIVFTVQGVFFNAYFLAYVISPKLAHRITGYLEEEAVNSYTEFLKDIDAGKFENSPAPAIAIDYWRLPKDATLRDVVYVIRADEAHHRDINHYASDIQFKGHELKEAPAPIGYH

SEQ ID NO: 84404 - protein, 175 aa, Arabidopsis thaliana
  peptide (1)..(175): Ceres Seq. ID no. 12675005
  misc_feature (1)..(173): Pfam Name: Alternative oxidase Pfam Description: Alternative oxidase
  misc_feature (1)..(175): Homolog of NCBI NO: 18398395 NR Description: oxidase, putative; protein id: At1g32350.1, by cDNA: 152458., supported by cDNA: gi_18176466 [Arabidopsis
  misc_feature (1)..(175): Homolog of NCBI NO: 21553592 NR Description: oxidase, putative [Arabidopsis thaliana]
  misc_feature (1)..(175): Homolog of NCBI NO: 18176467 NR Description: At1g32350/F5D14.4 [Arabidopsis thaliana]
  misc_feature (1)..(175): Homolog of NCBI NO: 6967043 NR Description: alternative oxidase [Populus tremula x Populus
  misc_feature (1)..(175): Homolog of NCBI NO: 29465624 NR Description: alternative oxidase 1b [Lycopersicon esculentum]
  misc_feature (1)..(175): Homolog of NCBI NO: 29465622 NR Description: alternative oxidase 1a [Lycopersicon esculentum]
  misc_feature (1)..(175): Homolog of NCBI NO: 3913066 NR Description: Alternative oxidase 2, mitochondrial precursor
  misc_feature (1)..(175): Homolog of NCBI NO: 11278947 NR Description: alternative respiratory pathway oxidase (EC
  misc_feature (1)..(175): Homolog of NCBI NO: 421824 NR Description: alternative respiratory pathway oxidase (EC
  misc_feature (1)..(175): Homolog of NCBI NO: 1872517 NR Description: alternative oxidase [Arabidopsis thaliana]
MLLETVAAVPGMVGGMLLHLKSLRRFEHSGGWIKALLEEAENERMHLMTFIELSQPKWYERAIVFTVQGVFFNAYFLAYVISPKLAHRITGYLEEEAVNSYTEFLKDIDAGKFENSPAPAIAIDYWRLPKDATLRDVVYVIRADEAHHRDINHYASDIQFKGHELKEAPAPIGYH

SEQ ID NO: 84405 - DNA, 1187 bp, Arabidopsis thaliana
  misc_feature (1)..(1187): Ceres Seq. ID no. 12675006
  misc_feature: MA Experiment ID: 108433 Result: Up-regulated in Transcription
  misc_feature: MA Experiment 108433 PARAMETER Experiment Name: At_rhl_Mutant2_cDNA_P Parameter: Age (day) Value: 7
  misc_feature: MA Experiment 108433 PARAMETER Experiment Name: At_rhl_Mutant2_cDNA_P Parameter: Organism Value: A. thaliana
  misc_feature: MA Experiment 108433 PARAMETER Experiment Name: At_rhl_Mutant2_cDNA_P Parameter: Plant Line Value: rhl Mutant vs. wt landsburg
  misc_feature: MA Experiment 108433 PARAMETER Experiment Name: At_rhl_Mutant2_cDNA_P Parameter: Tissue Value: Roots
  misc_feature: MA Experiment ID: 108461 Result: Up-regulated in Transcription
  misc_feature: MA Experiment 108461 PARAMETER Experiment Name: At_Germinating_Seeds_cDNA_P Parameter: Age (day) Value: 1 vs. 0
  misc_feature: MA Experiment 108461 PARAMETER Experiment Name: At_Germinating_Seeds_cDNA_P Parameter: Tissue Value: Germinating Seeds
  misc_feature: MA Experiment ID: 108462 Result: Up-regulated in Transcription
  misc_feature: MA Experiment 108462 PARAMETER Experiment Name: At_Germinating_Seeds_cDNA_P Parameter: Age (day) Value: 2 vs. 0
  misc_feature: MA Experiment 108462 PARAMETER Experiment Name: At_Germinating_Seeds_cDNA_P Parameter: Tissue Value: Germinating Seeds
  misc_feature: MA Experiment ID: 108464 Result: Up-regulated in Transcription
  misc_feature: MA Experiment 108464 PARAMETER Experiment Name: At_Germinating_Seeds_cDNA_P Parameter: Age (day) Value: 4 vs. 0
  misc_feature: MA Experiment 108464 PARAMETER Experiment Name: At_Germinating_Seeds_cDNA_P Parameter: Tissue Value: Germinating Seeds
  misc_feature: MA Experiment ID: 108488 Result: Down-regulated in Transcription
  misc_feature: MA Experiment ID: 108501 Result: Up-regulated in Transcription
  misc_feature: MA Experiment 108501 PARAMETER Experiment Name: At_ap2_floral_buds_cDNA_P Parameter: Plant Line Value: ap2 (Ler.)
  misc_feature: MA Experiment 108501 PARAMETER Experiment Name: At_ap2_floral_buds_cDNA_P Parameter: Tissue Value: Closed Flower
  misc_feature: MA Experiment ID: 108579 Result: Up-regulated in Transcription
  misc_feature: MA Experiment 108579 PARAMETER Experiment Name: At_4deg_Cold_cDNA_P Parameter: Temperature (deg C) Value: 4 vs. 22
  misc_feature: MA Experiment 108579 PARAMETER Experiment Name: At_4deg_Cold_cDNA_P Parameter: Timepoint (hr) Value: 6
  misc_feature: MA Experiment 108579 PARAMETER Experiment Name: At_4deg_Cold_cDNA_P Parameter: Tissue Value: Aerial
  misc_feature: MA Experiment ID: 108595 Result: Down-regulated in Transcription
  misc_feature: MA Experiment 108595 PARAMETER Experiment Name: At_Ler-pi_Ovule_cDNA_P Parameter: Plant Line Value: null
  misc_feature: MA Experiment ID: 108668 Result: Down-regulated in Transcription
  misc_feature: MA Experiment 108668 PARAMETER Experiment Name: At_2mM_SA_cDNA_P Parameter: Plant Line Value: WS
  misc_feature: MA Experiment 108668 PARAMETER Experiment Name: At_2mM_SA_cDNA_P Parameter: Timepoint (hr) Value: 6
  misc_feature: MA Experiment 108668 PARAMETER Experiment Name: At_2mM_SA_cDNA_P Parameter: Treatment Value: 2mM SA vs. No Treatment
  misc_feature: MA Experiment ID: 20000090 Result: Down-regulated in Transcription
  misc_feature: MA Experiment ID: 20000093 Result: Down-regulated in Transcription
  misc_feature: MA Experiment 20000093 PARAMETER Experiment Name: At_42deg_Heat_cDNA_P Parameter: Temperature (deg C) Value: 42 vs. 22
  misc_feature: MA Experiment 20000093 PARAMETER Experiment Name: At_42deg_Heat_cDNA_P Parameter: Timepoint (hr) Value: 0.5
  misc_feature: MA Experiment 20000093 PARAMETER Experiment Name: At_42deg_Heat_cDNA_P Parameter: Tissue Value: Aerial
  misc_feature: MA Experiment ID: 20000111 Result: Down-regulated in Transcription
  misc_feature: MA Experiment 20000111 PARAMETER Experiment Name: At_42deg_Heat_cDNA_P Parameter: Temperature (deg C) Value: 42 vs. 22
  misc_feature: MA Experiment 20000111 PARAMETER Experiment Name: At_42deg_Heat_cDNA_P Parameter: Timepoint (hr) Value: 6
  misc_feature: MA Experiment 20000111 PARAMETER Experiment Name: At_42deg_Heat_cDNA_P Parameter: Tissue Value: Aerial
  misc_feature: MA Experiment ID: 20000144 Result: Down-regulated in Transcription
  misc_feature: MA Experiment 20000144 PARAMETER Experiment Name: At_42deg_Heat_cDNA_P Parameter: Temperature (deg C) Value: 42 vs. 22
  misc_feature: MA Experiment 20000144 PARAMETER Experiment Name: At_42deg_Heat_cDNA_P Parameter: Timepoint (hr) Value: 1
  misc_feature: MA Experiment 20000144 PARAMETER Experiment Name: At_42deg_Heat_cDNA_P Parameter: Tissue Value: Aerial
  misc_feature: MA Experiment ID: 20000171 Result: Down-regulated in Transcription
  misc_feature: MA Experiment 20000171 PARAMETER Experiment Name: At_42deg_Heat_P Parameter: Age (day) Value: 14
  misc_feature: MA Experiment 20000171 PARAMETER Experiment Name: At_42deg_Heat_P Parameter: Organism Value: A. thaliana
  misc_feature: MA Experiment 20000171 PARAMETER Experiment Name: At_42deg_Heat_P Parameter: Plant Line Value: WS
  misc_feature: MA Experiment 20000171 PARAMETER Experiment Name: At_42deg_Heat_P Parameter: Temperature (deg C) Value: 42 vs. 22
  misc_feature: MA Experiment 20000171 PARAMETER Experiment Name: At_42deg_Heat_P Parameter: Timepoint (hr) Value: 1
  misc_feature: MA Experiment 20000171 PARAMETER Experiment Name: At_42deg_Heat_P Parameter: Tissue Value: Aerial
  misc_feature: MA Experiment ID: 20000179 Result: Up-regulated in Transcription
  misc_feature: MA Experiment 20000179 PARAMETER Experiment Name: At_Germinating_Seeds_P Parameter: Age (hr) Value: 6 vs. 0
  misc_feature: MA Experiment 20000179 PARAMETER Experiment Name: At_Germinating_Seeds_P Parameter: Tissue Value: Germinating Seeds
  misc_feature: MA Experiment ID: 20000180 Result: Up-regulated in Transcription
  misc_feature: MA Experiment 20000180 PARAMETER Experiment Name: At_Germinating_Seeds_P Parameter: Age (hr) Value: 24 vs. 0
  misc_feature: MA Experiment 20000180 PARAMETER Experiment Name: At_Germinating_Seeds_P Parameter: Tissue Value: Germinating Seeds
  misc_feature: MA Experiment ID: 20000182 Result: Down-regulated in Transcription
  misc_feature: MA Experiment 20000182 PARAMETER Experiment Name: At_2mM_SA_P Parameter: Age (day) Value: 14
  misc_feature: MA Experiment 20000182 PARAMETER Experiment Name: At_2mM_SA_P Parameter: Organism Value: A. thaliana
  misc_feature: MA Experiment 20000182 PARAMETER Experiment Name: At_2mM_SA_P Parameter: Plant Line Value: WS
  misc_feature: MA Experiment 20000182 PARAMETER Experiment Name: At_2mM_SA_P Parameter: Timepoint (hr) Value: 6
  misc_feature: MA Experiment 20000182 PARAMETER Experiment Name: At_2mM_SA_P Parameter: Tissue Value: Aerial
  misc_feature: MA Experiment 20000182 PARAMETER Experiment Name: At_2mM_SA_P Parameter: Treatment Value: 2mM SA vs. No Treatment
  misc_feature: MA Experiment ID: 20000184 Result: Up-regulated in Transcription
  misc_feature: MA Experiment 20000184 PARAMETER Experiment Name: At_Shoots__P Parameter: Age (day) Value: 7
  misc_feature: MA Experiment 20000184 PARAMETER Experiment Name: At_Shoots__P Parameter: Tissue Value: Shoots vs. Whole Plant
  misc_feature: MA Experiment ID: 20000185 Result: Up-regulated in Transcription
  misc_feature: MA Experiment 20000185 PARAMETER Experiment Name: At_Roots__P Parameter: Age (day) Value: 7 vs. 21
  misc_feature: MA Experiment 20000185 PARAMETER Experiment Name: At_Roots__P Parameter: Organism Value: A. thaliana
  misc_feature: MA Experiment 20000185 PARAMETER Experiment Name: At_Roots__P Parameter: Tissue Value: Roots vs. Whole Plant
  misc_feature: MA Experiment ID: 20000224 Result: Down-regulated in Transcription
  misc_feature: MA Experiment ID: 20000438 Result: Up-regulated in Transcription
  misc_feature: MA Experiment 20000438 PARAMETER Experiment Name: At_Shoots__P Parameter: Age (day) Value: 14
  misc_feature: MA Experiment 20000438 PARAMETER Experiment Name: At_Shoots__P Parameter: Tissue Value: Shoots vs. Whole Plant
  misc_feature: MA Experiment ID: 20000439 Result: Up-regulated in Transcription
  misc_feature: MA Experiment 20000439 PARAMETER Experiment Name: At_Roots__P Parameter: Age (day) Value: 14 vs. 21
  misc_feature: MA Experiment 20000439 PARAMETER Experiment Name: At_Roots__P Parameter: Organism Value: A. thaliana
  misc_feature: MA Experiment 20000439 PARAMETER Experiment Name: At_Roots__P Parameter: Tissue Value: Roots vs. Whole Plant
  misc_feature: MA Experiment ID: 20000794 Result: Up-regulated in Transcription
  misc_feature: MA Experiment 20000794 PARAMETER Experiment Name: At_Petals_P Parameter: Age (day) Value: 23-25 days
  misc_feature: MA Experiment 20000794 PARAMETER Experiment Name: At_Petals_P Parameter: Plant Line Value: WS
  misc_feature: MA Experiment 20000794 PARAMETER Experiment Name: At_Petals_P Parameter: Tissue Value: Petals vs. Whole plant
  misc_feature: MA Experiment ID: 20001757 Result: Down-regulated in Transcription
  misc_feature: MA Experiment 20001757 PARAMETER Experiment Name: At_50mM_NH4NO3_L-to-H_P Parameter: Timepoint (hr) Value: 6
  misc_feature: MA Experiment 20001757 PARAMETER Experiment Name: At_50mM_NH4NO3_L-to-H_P Parameter: Tissue Value: Leaf
  misc_feature: MA Experiment 20001757 PARAMETER Experiment Name: At_50mM_NH4NO3_L-to-H_P Parameter: Treatment Value: 50mM NH4NO3 vs 100mM Mannitol
aaaggctcactccaactccaactccaactccaactaacaacactcttcttcattcttcttcaatcaatggaatctgaaatcgcctccgagtttcttcctttctgccggatttacaaagacggtcgtgtagaacgactcatcggcaccgataccatcccggcctctctagatccaacatacgacgtcgtttcaaaagacgttatatactcaccggagaataacctctccgttcgtctcttcctccctcacaaatcaacaaaactcaccgccggtaacaagctccctctacttatctacatccacggcggagcttggatcatcgagtcacctttctccccactctaccacaattacctcactgaagtagtcaaatccgctaactgcctcgctgtctctgttcagtatcgccgtgcaccggaagatcctgttccggcggcttatgaagatgtatggtccgcgattcagtggatttttgctcattctaatggatctggtcctgtagattggattaacaaacacgccgatttcggtaaagttttcctcggcggagatagcgcaggcggtaacatatcgcatcacatggcgatgaaagctggtaaagagaagaagctagatctcaaaatcaaaggtattgctgttgttcatccagctttctggggaacagatccggttgatgaatacgatgtgcaagataaagaaacgagaagcggaatcgcggaaatttgggagaagattgcgagtccgaatagtgttaatgggacggatgatccgttgtttaatgtaaacggatccgggtcggatttttctgggttgggatgtgataaggttttggttgcggtagctgggaaagatgtgtttgttaggcaaggattggcttatgcggcgaagctggagaagtgtgagtgggaaggtactgttgaggtggttgaggaagaaggtgaggaccatgtgtttcatttgcagaatcctaaatctgataaggctttgaaattcttgaagaagtttgtcgagtttattattggttgaaacttgaaagaatgttttttgtgtaaatgttcttcatgatcatgtaatcttgtttttaagaaataaaatacatgaatttcagactgtgtgagagttatatgaacctgttaaatgtgtgttattattttcttcaacatgagaaaaaaatatgtgtaaaatat

SEQ ID NO: 84406 - protein, 341 aa, Arabidopsis thaliana
  peptide (1)..(341): Ceres Seq. ID no. 12675007
  misc_feature (68)..(119): Pfam Name: Carboxylesterase Pfam Description: Carboxylesterase
  misc_feature (23)..(341): Homolog of NCBI NO: 15222795 NR Description: unknown protein; protein id: At1g49660.1
  misc_feature (13)..(341): Homolog of NCBI NO: 18402731 NR Description: expressed protein; protein id: At1g49650.1, by cDNA: 12638. [Arabidopsis thaliana]
  misc_feature (13)..(341): Homolog of NCBI NO: 21537287 NR Description: putative esterase [Arabidopsis thaliana]
  misc_feature (23)..(340): Homolog of NCBI NO: 15222791 NR Description: hypothetical protein; protein id: At1g49640.1
  misc_feature (23)..(339): Homolog of NCBI NO: 15227669 NR Description: putative esterase; protein id: At2g03550.1
  misc_feature (23)..(341): Homolog of NCBI NO: 15228425 NR Description: putative protein; protein id: At3g48690.1, by cDNA: gi_18086340 [Arabidopsis thaliana]
  misc_feature (23)..(341): Homolog of NCBI NO: 18086341 NR Description: AT3g48690/T8P19_200 [Arabidopsis thaliana]
  misc_feature (27)..(339): Homolog of NCBI NO: 28393060 NR Description: putative esterase [Arabidopsis thaliana]
  misc_feature (23)..(341): Homolog of NCBI NO: 15228426 NR Description: putative protein; protein id: At3g48700.1
  misc_feature (23)..(339): Homolog of NCBI NO: 15221975 NR Description: hypothetical protein; protein id: At1g19190.1
KGSLQLQLQLQLTTLFFILLQSMESEIASEFLPFCRIYKDGRVERLIGTDTIPASLDPTYDVVSKDVIYSPENNLSVRLFLPHKSTKLTAGNKLPLLIYIHGGAWIIESPFSPLYHNYLTEVVKSANCLAVSVQYRRAPEDPVPAAYEDVWSAIQWIFAHSNGSGPVDWINKHADFGKVFLGGDSAGGNISHHMAMKAGKEKKLDLKIKGIAVVHPAFWGTDPVDEYDVQDKETRSGIAEIWEKIASPNSVNGTDDPLFNVNGSGSDFSGLGCDKVLVAVAGKDVFVRQGLAYAAKLEKCEWEGTVEVVEEEGEDHVFHLQNPKSDKALKFLKKFVEFIIG

SEQ ID NO: 84407 - protein, 319 aa, Arabidopsis thaliana; identical to SEQ ID NO: 75050
  peptide (1)..(319): Ceres Seq. ID no. 12675008
  misc_feature (46)..(97): Pfam Name: Carboxylesterase Pfam Description: Carboxylesterase
  misc_feature (1)..(319): Homolog of NCBI NO: 15222795 NR Description: unknown protein; protein id: At1g49660.1
  misc_feature (1)..(319): Homolog of NCBI NO: 18402731 NR Description: expressed protein; protein id: At1g49650.1, by cDNA: 12638. [Arabidopsis thaliana]
  misc_feature (1)..(319): Homolog of NCBI NO: 21537287 NR Description: putative esterase [Arabidopsis thaliana]
  misc_feature (1)..(318): Homolog of NCBI NO: 15222791 NR Description: hypothetical protein; protein id: At1g49640.1
  misc_feature (1)..(317): Homolog of NCBI NO: 15227669 NR Description: putative esterase; protein id: At2g03550.1
  misc_feature (1)..(319): Homolog of NCBI NO: 15228425 NR Description: putative protein; protein id: At3g48690.1, by cDNA: gi_18086340 [Arabidopsis thaliana]
  misc_feature (1)..(319): Homolog of NCBI NO: 18086341 NR Description: AT3g48690/T8P19_200 [Arabidopsis thaliana]
  misc_feature (5)..(317): Homolog of NCBI NO: 28393060 NR Description: putative esterase [Arabidopsis thaliana]
  misc_feature (1)..(319): Homolog of NCBI NO: 15228426 NR Description: putative protein; protein id: At3g48700.1
  misc_feature (1)..(317): Homolog of NCBI NO: 15221975 NR Description: hypothetical protein; protein id: At1g19190.1

SEQ ID NO: 84408 - DNA, 768 bp, Arabidopsis thaliana
  misc_feature (1)..(768): Ceres Seq. ID no. 12675017
  misc_feature: MA Experiment ID: 20000180 Result: Up-regulated in Transcription
  misc_feature: MA Experiment 20000180 PARAMETER Experiment Name: At_Germinating_Seeds_P Parameter: Age (hr) Value: 24 vs. 0
  misc_feature: MA Experiment 20000180 PARAMETER Experiment Name: At_Germinating_Seeds_P Parameter: Tissue Value: Germinating Seeds
  misc_feature: MA Experiment ID: 20000185 Result: Down-regulated in Transcription
  misc_feature: MA Experiment 20000185 PARAMETER Experiment Name: At_Roots__P Parameter: Age (day) Value: 7 vs. 21
  misc_feature: MA Experiment 20000185 PARAMETER Experiment Name: At_Roots__P Parameter: Organism Value: A. thaliana
  misc_feature: MA Experiment 20000185 PARAMETER Experiment Name: At_Roots__P Parameter: Tissue Value: Roots vs. Whole Plant
  misc_feature: MA Experiment ID: 20000437 Result: Down-regulated in Transcription
  misc_feature: MA Experiment 20000437 PARAMETER Experiment Name: At_Drought_P Parameter: Age (day) Value: 8
  misc_feature: MA Experiment 20000437 PARAMETER Experiment Name: At_Drought_P Parameter: Organism Value: A. thaliana
  misc_feature: MA Experiment 20000437 PARAMETER Experiment Name: At_Drought_P Parameter: Plant Line Value: WS
  misc_feature: MA Experiment 20000437 PARAMETER Experiment Name: At_Drought_P Parameter: Timepoint (hr) Value: 24
  misc_feature: MA Experiment 20000437 PARAMETER Experiment Name: At_Drought_P Parameter: Tissue Value: Whole Plant
  misc_feature: MA Experiment 20000437 PARAMETER Experiment Name: At_Drought_P Parameter: Treatment Value: Drought vs. No Drought
  misc_feature: MA Experiment ID: 20000438 Result: Up-regulated in Transcription
  misc_feature: MA Experiment 20000438 PARAMETER Experiment Name: At_Shoots__P Parameter: Age (day) Value: 14
  misc_feature: MA Experiment 20000438 PARAMETER Experiment Name: At_Shoots__P Parameter: Tissue Value: Shoots vs. Whole Plant
  misc_feature: MA Experiment ID: 20000439 Result: Down-regulated in Transcription
  misc_feature: MA Experiment 20000439 PARAMETER Experiment Name: At_Roots__P Parameter: Age (day) Value: 14 vs. 21
  misc_feature: MA Experiment 20000439 PARAMETER Experiment Name: At_Roots__P Parameter: Organism Value: A. thaliana
  misc_feature: MA Experiment 20000439 PARAMETER Experiment Name: At_Roots__P Parameter: Tissue Value: Roots vs. Whole Plant
  misc_feature: MA Experiment ID: 20000495 Result: Down-regulated in Transcription
  misc_feature: MA Experiment 20000495 PARAMETER Experiment Name: At_Guard_Cells_P Parameter: Harvest Date Value: 8/2/2002
  misc_feature: MA Experiment 20000495 PARAMETER Experiment Name: At_Guard_Cells_P Parameter: Organism Value: A. thaliana
  misc_feature: MA Experiment 20000495 PARAMETER Experiment Name: At_Guard_Cells_P Parameter: Tissue Value: Guard Cells vs. Leaves
  misc_feature: MA Experiment ID: 20000496 Result: Down-regulated in Transcription
  misc_feature: MA Experiment 20000496 PARAMETER Experiment Name: At_Guard_Cells_P Parameter: Harvest Date Value: 7/19/2002
  misc_feature: MA Experiment 20000496 PARAMETER Experiment Name: At_Guard_Cells_P Parameter: Organism Value: Canola
  misc_feature: MA Experiment 20000496 PARAMETER Experiment Name: At_Guard_Cells_P Parameter: Tissue Value: Guard Cells vs. Leaves
  misc_feature: MA Experiment ID: 20000794 Result: Down-regulated in Transcription
  misc_feature: MA Experiment 20000794 PARAMETER Experiment Name: At_Petals_P Parameter: Age (day) Value: 23-25 days
  misc_feature: MA Experiment 20000794 PARAMETER Experiment Name: At_Petals_P Parameter: Plant Line Value: WS
  misc_feature: MA Experiment 20000794 PARAMETER Experiment Name: At_Petals_P Parameter: Tissue Value: Petals vs. Whole plant
  misc_feature: MA Experiment ID: 20001248 Result: Down-regulated in Transcription
  misc_feature: MA Experiment 20001248 PARAMETER Experiment Name: At_Far-red-induction_P Parameter: Age (day) Value: 7
  misc_feature: MA Experiment 20001248 PARAMETER Experiment Name: At_Far-red-induction_P Parameter: Light Value: Far-red vs. White
  misc_feature: MA Experiment 20001248 PARAMETER Experiment Name: At_Far-red-induction_P Parameter: Organism Value: A. thaliana
  misc_feature: MA Experiment 20001248 PARAMETER Experiment Name: At_Far-red-induction_P Parameter: Plant Line Value: Columbia
  misc_feature: MA Experiment 20001248 PARAMETER Experiment Name: At_Far-red-induction_P Parameter: Timepoint (hr) Value: 4
  misc_feature: MA Experiment 20001248 PARAMETER Experiment Name: At_Far-red-induction_P Parameter: Tissue Value: Whole Plant
  misc_feature: MA Experiment ID: 20001557 Result: Down-regulated in Transcription
  misc_feature: MA Experiment 20001557 PARAMETER Experiment Name: At_Drought_Soil_Dry_P Parameter: Age (day) Value: 27
  misc_feature: MA Experiment 20001557 PARAMETER Experiment Name: At_Drought_Soil_Dry_P Parameter: Organism Value: A. thaliana
  misc_feature: MA Experiment 20001557 PARAMETER Experiment Name: At_Drought_Soil_Dry_P Parameter: Plant Line Value: WS
  misc_feature: MA Experiment 20001557 PARAMETER Experiment Name: At_Drought_Soil_Dry_P Parameter: Post Timepoint (hr) Value: 3
  misc_feature: MA Experiment 20001557 PARAMETER Experiment Name: At_Drought_Soil_Dry_P Parameter: Post-Treatment Value: Re-Water vs. No Drought
  misc_feature: MA Experiment 20001557 PARAMETER Experiment Name: At_Drought_Soil_Dry_P Parameter: Timepoint (day) Value: 13
  misc_feature: MA Experiment 20001557 PARAMETER Experiment Name: At_Drought_Soil_Dry_P Parameter: Treatment Value: Drought vs. No Drought
  misc_feature: MA Experiment ID: 20001757 Result: Up-regulated in Transcription
  misc_feature: MA Experiment 20001757 PARAMETER Experiment Name: At_50mM_NH4NO3_L-to-H_P Parameter: Timepoint (hr) Value: 6
  misc_feature: MA Experiment 20001757 PARAMETER Experiment Name: At_50mM_NH4NO3_L-to-H_P Parameter: Tissue Value: Leaf
  misc_feature: MA Experiment 20001757 PARAMETER Experiment Name: At_50mM_NH4NO3_L-to-H_P Parameter: Treatment Value: 50mM NH4NO3 vs 100mM Mannitol
  misc_feature: MA Experiment ID: 20001905 Result: Down-regulated in Transcription
  misc_feature: MA Experiment 20001905 PARAMETER Experiment Name: At_Drought_Reproduction_P Parameter: Age (day) Value: 40
  misc_feature: MA Experiment 20001905 PARAMETER Experiment Name: At_Drought_Reproduction_P Parameter: Organism Value: A. thaliana
  misc_feature: MA Experiment 20001905 PARAMETER Experiment Name: At_Drought_Reproduction_P Parameter: Plant Line Value: WS
  misc_feature: MA Experiment 20001905 PARAMETER Experiment Name: At_Drought_Reproduction_P Parameter: Timepoint (day) Value: 10
  misc_feature: MA Experiment 20001905 PARAMETER Experiment Name: At_Drought_Reproduction_P Parameter: Tissue Value: Rosettes
  misc_feature: MA Experiment 20001905 PARAMETER Experiment Name: At_Drought_Reproduction_P Parameter: Treatment Value: Drought vs. No Drought
ctcttatcttcttcaacctctcgactagtaaaagccgcgaaaatcaaaatcctccaaaactatggctctgattttgccctgtacattttgtacttcgcttcagaagaagaattttccgattaatcggagatatattacgaatttccgtcgaggagctacgactgcgacgtgtgagttccggattcctgtagaagtttccactccatcagatagaggatcgttggttgttccttcgcacaaagtcactgttcacgatcgacaacgaggagtggttcacgaattcgaggttccagaggatcagtatatattgcattcagctgaatctcagaacattagtcttccgtttgcttgcaggcatggttgttgtactagttgtgctgtacgtgtaaaatctggagagctgaggcagcctcaagcattgggaatatcagcagaactgaagtcccaggggtatgcacttctttgtgtgggtttccccacatctgaccttgaagtagaaacacaagacgaggacgaggtctactggctacaatttggaagatactttgctcgtggaccaattgaaagagacgattacgctcttgaactcgccatgggagatgaatagaaaccaaaagaagcatgtaaactgtaaagtggcagactttctgtattagaggtgactagtgagttcaactttcttagtcctgaatatcgtggtgcatcctcgtaaatctcttactgaactcaacgatattccgattaaacttctcaacaattcaacatttc

SEQ ID NO: 84409 - protein, 181 aa, Arabidopsis thaliana; identical to SEQ ID NO: 49924
  peptide (1)..(181): Ceres Seq. ID no. 12675018
  misc_feature (65)..(141): Pfam Name: 2Fe-2S iron-sulfur cluster binding domain Pfam Description: 2Fe-2S iron-sulfur cluster binding domain
  misc_feature (1)..(181): Homolog of NCBI NO: 15223230 NR Description: ferredoxin, putative; protein id: At1g32550.1, by cDNA: gi_19424038, supported by cDNA: gi_21281216 [Arabidopsis
  misc_feature (6)..(181): Homolog of NCBI NO: 13174248 NR Description: putative ferredoxin [Oryza sativa]
  misc_feature (58)..(168): Homolog of NCBI NO: 23127555 NR Description: hypothetical protein [Nostoc punctiforme]
  misc_feature (58)..(168): Homolog of NCBI NO: 17230411 NR Description: ferredoxin [Nostoc sp. PCC 7120]
  misc_feature (58)..(167): Homolog of NCBI NO: 16330840 NR Description: ferredoxin [Synechocystis sp. PCC 6803]
  misc_feature (58)..(167): Homolog of NCBI NO: 33865808 NR Description: Ferredoxin [Synechococcus sp. WH 8102]
  misc_feature (59)..(167): Homolog of NCBI NO: 37522751 NR Description: ferredoxin [Gloeobacter violaceus]
  misc_feature (76)..(168): Homolog of NCBI NO: 22299199 NR Description: ferredoxin [Thermosynechococcus elongatus BP-1]
  misc_feature (59)..(160): Homolog of NCBI NO: 33864459 NR Description: ferredoxin, PetF like protein [Prochlorococcus str. MIT 9313] >gi|33641239|emb|CAE22369.1| ferredoxin, PetF like
  misc_feature (60)..(165): Homolog of NCBI NO: 33861455 NR Description: ferredoxin, petF-like protein [Prochlorococcus

SEQ ID NO: 84410 - DNA, 2010 bp, Arabidopsis thaliana
  misc_feature (1)..(2010): Ceres Seq. ID no. 12675039
  misc_feature: MA Experiment ID: 20000173 Result: Down-regulated in Transcription
  misc_feature: MA Experiment 20000173 PARAMETER Experiment Name: At_42deg_Heat_P Parameter: Age (day) Value: 14
  misc_feature: MA Experiment 20000173 PARAMETER Experiment Name: At_42deg_Heat_P Parameter: Organism Value: A. thaliana
  misc_feature: MA Experiment 20000173 PARAMETER Experiment Name: At_42deg_Heat_P Parameter: Plant Line Value: WS
  misc_feature: MA Experiment 20000173 PARAMETER Experiment Name: At_42deg_Heat_P Parameter: Temperature (deg C) Value: 42 vs. 22
  misc_feature: MA Experiment 20000173 PARAMETER Experiment Name: At_42deg_Heat_P Parameter: Timepoint (hr) Value: 6
  misc_feature: MA Experiment 20000173 PARAMETER Experiment Name: At_42deg_Heat_P Parameter: Tissue Value: Aerial
  misc_feature: MA Experiment ID: 20000439 Result: Up-regulated in Transcription
  misc_feature: MA Experiment 20000439 PARAMETER Experiment Name: At_Roots__P Parameter: Age (day) Value: 14 vs. 21
  misc_feature: MA Experiment 20000439 PARAMETER Experiment Name: At_Roots__P Parameter: Organism Value: A. thaliana
  misc_feature: MA Experiment 20000439 PARAMETER Experiment Name: At_Roots__P Parameter: Tissue Value: Roots vs. Whole Plant
tcttcctcctgcaacctcttcttccctctctcagtttgatttgaccggagtatatggcggaagtacgatcacgatcacggagaacggagagcaattgggctacaatatgctgctcagctttctcgtgtctccagctctactgggcacgtattgttctccgtaaatggttcaatgtttctgcttctgaatcagattatagtgctgatagtgacgatgactacgaagatagatcacaagaatttgatccaattagctctggagttaccaatcctcgtgttgatactgacggtaatgtgatatataggcctaagcttagaagacgaaattctgaaactttcaggatgcagtatatagataccaaagcaatcagaatctgtgctgggacatggaatgttggagggagagttccttcatctgacttggatattgatggttggctagacactcttgaacctgctgacatttatgttcttggtcttcaggaaatcgttcccttaaatgctggaaacatttttggtatggaggatgaccagcctgctttggaatgggagaacttgatacgtgatgccttaaaccgagttcaacctagaaagctgaagattaaaagtcacagtgatcccccttctccatcaaagtttaagcaacccgaagaggttccttatagtgtagaagatatgtttgttgaaaccagtcatgatgcttgcgatggaattagttcaatggataacaaactcaactctgttgaaagcacggacgtaccaatcgtaagcgaagattcacttactaatatagacgttttgggttctaccaatgacaatgcgtcttgcttaccaatacaagaatatctacagagacaattttcaacaccaaatacgccagaccgctctctgtcgatgcagattaatagtgattccaaaagggaagaaagatttagttacactgaaagggtaggtttgagctggccagagcctccattaaggctcctaaatcaatatgtttccgaaagacgtggttccttcaagtcagtgaatctgactatcacgaatctgagaaaaccatcgtatgttcggattgtgagcaaacagatggttggagtgtttctcaccatttgggttcggaggaacttgcgcaagcacataagcaacctttgtgtgtctactgttggtgttggtattatgggctacattggtaacaaggggtctgtatctgtgagcatgtcaatctatcaaacaccattttgtttcttgtgcacgcatctgtcatctggagaaaaggatacagatcaagagaaaagaaacgatgatgtacgtgaaatccacagaagaacgcagtttcttcctcattctttaaatgccaatgagcttccaagaagcatctgtaatcatgaaagaataatctggctgggagatctgaactatcggattaacttgtcgtatgagaagacacatgaacttattgcaagaaaggaatggcaaaggttggtagagtacgaccagctttcaagagaaatgacaaaagggaacctattcgagggatggtcagagggaactttagattttgcaccaacatataaatacgaaatcgattcagaaaattacatcggagatgacccggaatccgggaaacgtagaccggcctggtgtgaccgcatcatttggaacggaaagggaatgaagctcttcaattacagaagaaacgagattaaactatcggatcaccggcctgtcacagccacgttcttggccgaggttgaggttttgtctccacggaaacttcaacatgcgcttacacttacatatgctgagattcaaggccttgacgcctaaacaaccacttccgtcagatcccatttgtgtatagtaatttaacgatttgtatgcccttcatgtataatagtgttcacgtacacagaaatattgtagatagaaatactgactgaaaacaaagaccgtatctttgatgatataaacattggcaattgagttgagatgtaaactatagtgttagtgt

SEQ ID NO: 84411 - protein, 590 aa, Arabidopsis thaliana
  peptide (1)..(590): Ceres Seq. ID no. 12675040
  misc_feature (107)..(562): Pfam Name: Endonuclease/Exonuclease/phosphatase family Pfam Description: Endonuclease/Exonuclease/phosphatase family
  misc_feature (325)..(586): Homolog of NCBI NO: 25352249 NR Description: hypothetical protein F14O23.9 [imported] - thaliana >gi|7239498|gb|AAF43224.1|AC012654_8 Contains similarity
  misc_feature (86)..(325): Homolog of NCBI NO: 25352249 NR Description: hypothetical protein F14O23.9 [imported] - thaliana >gi|7239498|gb|AAF43224.1|AC012654_8 Contains similarity
  misc_feature (27)..(80): Homolog of NCBI NO: 25352249 NR Description: hypothetical protein F14O23.9 [imported] - thaliana >gi|7239498|gb|AAF43224.1|AC012654_8 Contains similarity
  misc_feature (325)..(586): Homolog of NCBI NO: 18409892 NR Description: RIBOSOMAL PROTEIN, putative; protein id: supported by cDNA: gi_15081806 [Arabidopsis thaliana]
  misc_feature (86)..(325): Homolog of NCBI NO: 18409892 NR Description: RIBOSOMAL PROTEIN, putative; protein id: supported by cDNA: gi_15081806 [Arabidopsis thaliana]
  misc_feature (27)..(68): Homolog of NCBI NO: 18409892 NR Description: RIBOSOMAL PROTEIN, putative; protein id: supported by cDNA: gi_15081806 [Arabidopsis thaliana]
  misc_feature (325)..(586): Homolog of NCBI NO: 15081807 NR Description: At1g71710/F14O23_9 [Arabidopsis thaliana]
  misc_feature (86)..(325): Homolog of NCBI NO: 15081807 NR Description: At1g71710/F14O23_9 [Arabidopsis thaliana]
  misc_feature (27)..(68): Homolog of NCBI NO: 15081807 NR Description: At1g71710/F14O23_9 [Arabidopsis thaliana]
  misc_feature (325)..(586): Homolog of NCBI NO: 12323727 NR Description: putative inositol polyphosphate phosphatase, 5'
MAEVRSRSRRTESNWATICCSAFSCLQLYWARIVLRKWFNVSASESDYSADSDDDYEDRSQEFDPISSGVTNPRVDTDGNVIYRPKLRRRNSETFRMQYIDTKAIRICAGTWNVGGRVPSSDLDIDGWLDTLEPADIYVLGLQEIVPLNAGNIFGMEDDQPALEWENLIRDALNRVQPRKLKIKSHSDPPSPSKFKQPEEVPYSVEDMFVETSHDACDGISSMDNKLNSVESTDVPIVSEDSLTNIDVLGSTNDNASCLPIQEYLQRQFSTPNTPDRSLSMQINSDSKREERFSYTERVGLSWPEPPLRLLNQYVSERRGSFKSVNLTITNLRKPSYVRIVSKQMVGVFLTIWVRRNLRKHISNLCVSTVGVGIMGYIGNKGSVSVSMSIYQTPFCFLCTHLSSGEKDTDQEKRNDDVREIHRRTQFLPHSLNANELPRSICNHERIIWLGDLNYRINLSYEKTHELIARKEWQRLVEYDQLSREMTKGNLFEGWSEGTLDFAPTYKYEIDSENYIGDDPESGKRRPAWCDRIIWNGKGMKLFNYRRNEIKLSDHRPVTATFLAEVEVLSPRKLQHALTLTYAEIQGLDA

SEQ ID NO: 84412 - protein, 494 aa, Arabidopsis thaliana
  peptide (1)..(494): Ceres Seq. ID no. 12675041
  misc_feature (11)..(466): Pfam Name: Endonuclease/Exonuclease/phosphatase family Pfam Description: Endonuclease/Exonuclease/phosphatase family
  misc_feature (229)..(490): Homolog of NCBI NO: 25352249 NR Description: hypothetical protein F14O23.9 [imported] - thaliana >gi|7239498|gb|AAF43224.1|AC012654_8 Contains similarity
  misc_feature (1)..(229): Homolog of NCBI NO: 25352249 NR Description: hypothetical protein F14O23.9 [imported] - thaliana >gi|7239498|gb|AAF43224.1|AC012654_8 Contains similarity
  misc_feature (229)..(490): Homolog of NCBI NO: 18409892 NR Description: RIBOSOMAL PROTEIN, putative; protein id: supported by cDNA: gi_15081806 [Arabidopsis thaliana]
  misc_feature (1)..(229): Homolog of NCBI NO: 18409892 NR Description: RIBOSOMAL PROTEIN, putative; protein id: supported by cDNA: gi_15081806 [Arabidopsis thaliana]
  misc_feature (229)..(490): Homolog of NCBI NO: 15081807 NR Description: At1g71710/F14O23_9 [Arabidopsis thaliana]
  misc_feature (1)..(229): Homolog of NCBI NO: 15081807 NR Description: At1g71710/F14O23_9 [Arabidopsis thaliana]
  misc_feature (229)..(490): Homolog of NCBI NO: 12323727 NR Description: putative inositol polyphosphate phosphatase, 5'
  misc_feature (1)..(229): Homolog of NCBI NO: 12323727 NR Description: putative inositol polyphosphate phosphatase, 5'
  misc_feature (37)..(494): Homolog of NCBI NO: 34906250 NR Description: P0489A01.10 [Oryza sativa (japonica
  misc_feature (1)..(207): Homolog of NCBI NO: 7487772 NR Description: hypothetical protein T6K21.190 - Arabidopsis >gi|2894610|emb|CAA17144.1| putative protein [Arabidopsis >gi|7268553|emb|CAB78803.1| putative protein [Arabidopsis
MQYIDTKAIRICAGTWNVGGRVPSSDLDIDGWLDTLEPADIYVLGLQEIVPLNAGNIFGMEDDQPALEWENLIRDALNRVQPRKLKIKSHSDPPSPSKFKQPEEVPYSVEDMFVETSHDACDGISSMDNKLNSVESTDVPIVSEDSLTNIDVLGSTNDNASCLPIQEYLQRQFSTPNTPDRSLSMQINSDSKREERFSYTERVGLSWPEPPLRLLNQYVSERRGSFKSVNLTITNLRKPSYVRIVSKQMVGVFLTIWVRRNLRKHISNLCVSTVGVGIMGYIGNKGSVSVSMSIYQTPFCFLCTHLSSGEKDTDQEKRNDDVREIHRRTQFLPHSLNANELPRSICNHERIIWLGDLNYRINLSYEKTHELIARKEWQRLVEYDQLSREMTKGNLFEGWSEGTLDFAPTYKYEIDSENYIGDDPESGKRRPAWCDRIIWNGKGMKLFNYRRNEIKLSDHRPVTATFLAEVEVLSPRKLQHALTLTYAEIQGLDA

SEQ ID NO: 84413 - protein, 435 aa, Arabidopsis thaliana
  peptide (1)..(435): Ceres Seq. ID no. 12675042
  misc_feature (1)..(407): Pfam Name: Endonuclease/Exonuclease/phosphatase family Pfam Description: Endonuclease/Exonuclease/phosphatase family
  misc_feature (170)..(431): Homolog of NCBI NO: 25352249 NR Description: hypothetical protein F14O23.9 [imported] - thaliana >gi|7239498|gb|AAF43224.1|AC012654_8 Contains similarity
  misc_feature (1)..(170): Homolog of NCBI NO: 25352249 NR Description: hypothetical protein F14O23.9 [imported] - thaliana >gi|7239498|gb|AAF43224.1|AC012654_8 Contains similarity
  misc_feature (170)..(431): Homolog of NCBI NO: 18409892 NR Description: RIBOSOMAL PROTEIN, putative; protein id: supported by cDNA: gi_15081806 [Arabidopsis thaliana]
  misc_feature (1)..(170): Homolog of NCBI NO: 18409892 NR Description: RIBOSOMAL PROTEIN, putative; protein id: supported by cDNA: gi_15081806 [Arabidopsis thaliana]
  misc_feature (170)..(431): Homolog of NCBI NO: 15081807 NR Description: At1g71710/F14O23_9 [Arabidopsis thaliana]
  misc_feature (1)..(170): Homolog of NCBI NO: 15081807 NR Description: At1g71710/F14O23_9 [Arabidopsis thaliana]
  misc_feature (170)..(431): Homolog of NCBI NO: 12323727 NR Description: putative inositol polyphosphate phosphatase, 5'
  misc_feature (1)..(170): Homolog of NCBI NO: 12323727 NR Description: putative inositol polyphosphate phosphatase, 5'
  misc_feature (1)..(435): Homolog of NCBI NO: 34906250 NR Description: P0489A01.10 [Oryza sativa (japonica
  misc_feature (1)..(148): Homolog of NCBI NO: 7487772 NR Description: hypothetical protein T6K21.190 - Arabidopsis >gi|2894610|emb|CAA17144.1| putative protein [Arabidopsis >gi|7268553|emb|CAB78803.1| putative protein [Arabidopsis
MEDDQPALEWENLIRDALNRVQPRKLKIKSHSDPPSPSKFKQPEEVPYSVEDMFVETSHDACDGISSMDNKLNSVESTDVPIVSEDSLTNIDVLGSTNDNASCLPIQEYLQRQFSTPNTPDRSLSMQINSDSKREERFSYTERVGLSWPEPPLRLLNQYVSERRGSFKSVNLTITNLRKPSYVRIVSKQMVGVFLTIWVRRNLRKHISNLCVSTVGVGIMGYIGNKGSVSVSMSIYQTPFCFLCTHLSSGEKDTDQEKRNDDVREIHRRTQFLPHSLNANELPRSICNHERIIWLGDLNYRINLSYEKTHELIARKEWQRLVEYDQLSREMTKGNLFEGWSEGTLDFAPTYKYEIDSENYIGDDPESGKRRPAWCDRIIWNGKGMKLFNYRRNEIKLSDHRPVTATFLAEVEVLSPRKLQHALTLTYAEIQGLDA

SEQ ID NO: 84414 - DNA, 1368 bp, Arabidopsis thaliana
  misc_feature (1)..(1368): Ceres Seq. ID no. 12675051
  misc_feature: MA Experiment ID: 20000182 Result: Up-regulated in Transcription
  misc_feature: MA Experiment 20000182 PARAMETER Experiment Name: At_2mM_SA_P Parameter: Age (day) Value: 14
  misc_feature: MA Experiment 20000182 PARAMETER Experiment Name: At_2mM_SA_P Parameter: Organism Value: A. thaliana
  misc_feature: MA Experiment 20000182 PARAMETER Experiment Name: At_2mM_SA_P Parameter: Plant Line Value: WS
  misc_feature: MA Experiment 20000182 PARAMETER Experiment Name: At_2mM_SA_P Parameter: Timepoint (hr) Value: 6
  misc_feature: MA Experiment 20000182 PARAMETER Experiment Name: At_2mM_SA_P Parameter: Tissue Value: Aerial
  misc_feature: MA Experiment 20000182 PARAMETER Experiment Name: At_2mM_SA_P Parameter: Treatment Value: 2mM SA vs. No Treatment
  misc_feature: MA Experiment ID: 20000235 Result: Down-regulated in Transcription
  misc_feature: MA Experiment 20000235 PARAMETER Experiment Name: At_Siliques_P Parameter: Age (day) Value: 21
  misc_feature: MA Experiment 20000235 PARAMETER Experiment Name: At_Siliques_P Parameter: Organism Value: A. thaliana
  misc_feature: MA Experiment 20000235 PARAMETER Experiment Name: At_Siliques_P Parameter: Plant Line Value: WS
  misc_feature: MA Experiment 20000235 PARAMETER Experiment Name: At_Siliques_P Parameter: Tissue Value: 5-10mm Siliques vs. Whole Plant
  misc_feature: MA Experiment ID: 20000264 Result: Down-regulated in Transcription
  misc_feature: MA Experiment 20000264 PARAMETER Experiment Name: At_Open_Flower_P Parameter: Age (day) Value: 21
  misc_feature: MA Experiment 20000264 PARAMETER Experiment Name: At_Open_Flower_P Parameter: Plant Line Value: WS
  misc_feature: MA Experiment 20000264 PARAMETER Experiment Name: At_Open_Flower_P Parameter: Tissue Value: Open Flower vs. Whole Plant
  misc_feature: MA Experiment ID: 20000265 Result: Down-regulated in Transcription
  misc_feature: MA Experiment 20000265 PARAMETER Experiment Name: At_Open_Flower_P Parameter: Age (day) Value: 21
  misc_feature: MA Experiment 20000265 PARAMETER Experiment Name: At_Open_Flower_P Parameter: Plant Line Value: WS
  misc_feature: MA Experiment 20000265 PARAMETER Experiment Name: At_Open_Flower_P Parameter: Tissue Value: Closed Flower vs. Whole Plant
  misc_feature: MA Experiment ID: 20000286 Result: Down-regulated in Transcription
  misc_feature: MA Experiment 20000286 PARAMETER Experiment Name: At_Open_Flower_P Parameter: Age (day) Value: 21
  misc_feature: MA Experiment 20000286 PARAMETER Experiment Name: At_Open_Flower_P Parameter: Plant Line Value: WS
  misc_feature: MA Experiment 20000286 PARAMETER Experiment Name: At_Open_Flower_P Parameter: Tissue Value: Half Open vs. Whole Plant
  misc_feature: MA Experiment ID: 20000495 Result: Down-regulated in Transcription
  misc_feature: MA Experiment 20000495 PARAMETER Experiment Name: At_Guard_Cells_P Parameter: Harvest Date Value: 8/2/2002
  misc_feature: MA Experiment 20000495 PARAMETER Experiment Name: At_Guard_Cells_P Parameter: Organism Value: A. thaliana
  misc_feature: MA Experiment 20000495 PARAMETER Experiment Name: At_Guard_Cells_P Parameter: Tissue Value: Guard Cells vs. Leaves
  misc_feature: MA Experiment ID: 20000573 Result: Up-regulated in Transcription
  misc_feature: MA Experiment 20000573 PARAMETER Experiment Name: At_100uM_ABA_Mutants__P Parameter: Organism Value: A. thaliana
  misc_feature: MA Experiment 20000573 PARAMETER Experiment Name: At_100uM_ABA_Mutants__P Parameter: Plant Line Value: CS22 vs. Ler wt
  misc_feature: MA Experiment 20000573 PARAMETER Experiment Name: At_100uM_ABA_Mutants__P Parameter: Timepoint (hr) Value: N/A
  misc_feature: MA Experiment 20000573 PARAMETER Experiment Name: At_100uM_ABA_Mutants__P Parameter: Tissue Value: Whole Plant
  misc_feature: MA Experiment 20000573 PARAMETER Experiment Name: At_100uM_ABA_Mutants__P Parameter: Treatment Value: None
  misc_feature: MA Experiment ID: 20000574 Result: Up-regulated in Transcription
  misc_feature: MA Experiment 20000574 PARAMETER Experiment Name: At_100uM_ABA_Mutants__P Parameter: Organism Value: A. thaliana
  misc_feature: MA Experiment 20000574 PARAMETER Experiment Name: At_100uM_ABA_Mutants__P Parameter: Plant Line Value: CS23 vs. Ler wt
  misc_feature: MA Experiment 20000574 PARAMETER Experiment Name: At_100uM_ABA_Mutants__P Parameter: Timepoint (hr) Value: N/A
  misc_feature: MA Experiment 20000574 PARAMETER Experiment Name: At_100uM_ABA_Mutants__P Parameter: Tissue Value: Whole Plant
  misc_feature: MA Experiment 20000574 PARAMETER Experiment Name: At_100uM_ABA_Mutants__P Parameter: Treatment Value: None
  misc_feature: MA Experiment ID: 20000576 Result: Down-regulated in Transcription
  misc_feature: MA Experiment 20000576 PARAMETER Experiment Name: At_100uM_ABA_Mutants__P Parameter: Organism Value: A. thaliana
  misc_feature: MA Experiment 20000576 PARAMETER Experiment Name: At_100uM_ABA_Mutants__P Parameter: Plant Line Value: CS23
  misc_feature: MA Experiment 20000576 PARAMETER Experiment Name: At_100uM_ABA_Mutants__P Parameter: Timepoint (hr) Value: 6
  misc_feature: MA Experiment 20000576 PARAMETER Experiment Name: At_100uM_ABA_Mutants__P Parameter: Tissue Value: Whole Plant
  misc_feature: MA Experiment 20000576 PARAMETER Experiment Name: At_100uM_ABA_Mutants__P Parameter: Treatment Value: 1uM ABA vs. No Treatment
  misc_feature: MA Experiment ID: 20000606 Result: Up-regulated in Transcription
  misc_feature: MA Experiment 20000606 PARAMETER Experiment Name: At_CS8548_Mutant_P Parameter: Age (day) Value: 14
  misc_feature: MA Experiment 20000606 PARAMETER Experiment Name: At_CS8548_Mutant_P Parameter: Plant Line Value: CS8548 vs. wt
  misc_feature: MA Experiment 20000606 PARAMETER Experiment Name: At_CS8548_Mutant_P Parameter: Tissue Value: Whole Plant
  misc_feature: MA Experiment ID: 20000794 Result: Down-regulated in Transcription
  misc_feature: MA Experiment 20000794 PARAMETER Experiment Name: At_Petals_P Parameter: Age (day) Value: 23-25 days
  misc_feature: MA Experiment 20000794 PARAMETER Experiment Name: At_Petals_P Parameter: Plant Line Value: WS
  misc_feature: MA Experiment 20000794 PARAMETER Experiment Name: At_Petals_P Parameter: Tissue Value: Petals vs. Whole plant
  misc_feature: MA Experiment ID: 20001451 Result: Down-regulated in Transcription
  misc_feature: MA Experiment 20001451 PARAMETER Experiment Name: At_Far-red-induction_P Parameter: Age (day) Value: 7
  misc_feature: MA Experiment 20001451 PARAMETER Experiment Name: At_Far-red-induction_P Parameter: Light Value: Far-red vs. White
  misc_feature: MA Experiment 20001451 PARAMETER Experiment Name: At_Far-red-induction_P Parameter: Organism Value: A. thaliana
  misc_feature: MA Experiment 20001451 PARAMETER Experiment Name: At_Far-red-induction_P Parameter: Plant Line Value: Columbia
  misc_feature: MA Experiment 20001451 PARAMETER Experiment Name: At_Far-red-induction_P Parameter: Timepoint (hr) Value: 24
  misc_feature: MA Experiment 20001451 PARAMETER Experiment Name: At_Far-red-induction_P Parameter: Tissue Value: Whole Plant
  misc_feature: MA Experiment ID: 20001768 Result: Up-regulated in Transcription
  misc_feature: MA Experiment 20001768 PARAMETER Experiment Name: At_Far-red-enriched-adult_P Parameter: Age (day) Value: 28
  misc_feature: MA Experiment 20001768 PARAMETER Experiment Name: At_Far-red-enriched-adult_P Parameter: Light Value: Far-red enriched vs. White
  misc_feature: MA Experiment 20001768 PARAMETER Experiment Name: At_Far-red-enriched-adult_P Parameter: Organism Value: A. thaliana
  misc_feature: MA Experiment 20001768 PARAMETER Experiment Name: At_Far-red-enriched-adult_P Parameter: Plant Line Value: Columbia
  misc_feature: MA Experiment 20001768 PARAMETER Experiment Name: At_Far-red-enriched-adult_P Parameter: Timepoint (hr) Value: 1
  misc_feature: MA Experiment 20001768 PARAMETER Experiment Name: At_Far-red-enriched-adult_P Parameter: Tissue Value: Aerial
  misc_feature: MA Experiment ID: 20001773 Result: Down-regulated in Transcription
  misc_feature: MA Experiment 20001773 PARAMETER Experiment Name: At_Far-red-enriched-adult_P Parameter: Age (day) Value: 30
  misc_feature: MA Experiment 20001773 PARAMETER Experiment Name: At_Far-red-enriched-adult_P Parameter: Light Value: Far-red enriched vs. White
  misc_feature: MA Experiment 20001773 PARAMETER Experiment Name: At_Far-red-enriched-adult_P Parameter: Organism Value: A. thaliana
  misc_feature: MA Experiment 20001773 PARAMETER Experiment Name: At_Far-red-enriched-adult_P Parameter: Plant Line Value: Columbia
  misc_feature: MA Experiment 20001773 PARAMETER Experiment Name: At_Far-red-enriched-adult_P Parameter: Timepoint (hr) Value: 48
  misc_feature: MA Experiment 20001773 PARAMETER Experiment Name: At_Far-red-enriched-adult_P Parameter: Tissue Value: Aerial
gaaaaatgaagggtttaaggaaatttcagcaaatggccaacgatcagaagaatagtgagtcttttccagcgaaggaagatcataagaaggatgatgcggcagctccagcagaagtagaccataaggatgaattctcggcatcacagccacatccggtcgaaaacatagttttagttgggcgtacagggaacggcaaaagcgccacggggaacagcatcgtcagatcaaaggtgtttaagtcgaaaacaaaatcatcaggtgttacgatggaatgccatgcagttaaagcagtgacaccagaaggccctatactcaatgtgattgacactcctggtctatttgatttgtcggtatctgctgaatttatcggtaaagaaatagttaaatgcctaactctagcggatggagggctacacgctgtgctcttagttttatctgtaaggactcgaattagtcaagaggaagagatggtacttagtaccttgcaggttcttttcggtagtaagattgttgattaccttatcgttgttttcacggggggagatgtattggaagatgacggtatgacattggaggattacttgggtgataacatgccggacttcctaaagagagttctcatattgtgtggccaacgaatgattctgtttgataacaaaaccaaggatgatgagaaaaagacaaagcaagtccatgaacttctcaaacttatcgacttggtcagaaagcagaacaacaatattccgtataccgatgagatgtaccatatgataaaggaagaaaatgaaaggcacaagaaagaacaagaggagctagaatcaaaagggcattcagaagagcagctcgcagcattgatgaaggagttacagataatgaatgaacgaaacctcaaggcaatggcagagatgatggagaaaaatatgaaaatagctatggaggcgcaggagaagctctttgagcaaagagaaaaagctcaggagatgagctaccagcaaaaaatggaaatgcaggagaagttaaagcagatggaaggacgtatgcgtgctgaaatggaagcgcaaatgctcagccgtcagcagtgcagcattctctgatcattcactgtgcgctcttccaccctcacactttgccttcttaatgacaaatagagaaccattgcctagactttgtgtttctaacgcggaacattttctatgttcctcgtttgagcatgctcttggacttttggcctgttatgagtcagcttttgcttttctttcattttcatttatgttatttatctaaattgattaggccagtcgtagcctaatctttgtttgatttgctacgtatttttagtgtaataaatatgtgtgtaagtgttatgtg

SEQ ID NO: 84415 - protein, 363 aa, Arabidopsis thaliana
  peptide (1)..(363): Ceres Seq. ID no. 12675052
  misc_feature (53)..(268): Pfam Name: AIG1 family Pfam Description: AIG1 family
  misc_feature (2)..(363): Homolog of NCBI NO: 10092442 NR Description: disease resistance protein AIG1; 916-2572
  misc_feature (11)..(363): Homolog of NCBI NO: 15217731 NR Description: AIG1; protein id: At1g33960.1, supported by cDNA: [Arabidopsis thaliana] >gi|1703219|sp|P54120|AIG1_ARATH AIG1 >gi|1127804|gb|AAC49282.1| AIG1
  misc_feature (53)..(335): Homolog of NCBI NO: 15220922 NR Description: AIG1-like protein; protein id: At1g33950.1
  misc_feature (11)..(363): Homolog of NCBI NO: 15217724 NR Description: AIG1-like protein; protein id: At1g33930.1
  misc_feature (45)..(331): Homolog of NCBI NO: 15217719 NR Description: AIG1-like protein; protein id: At1g33900.1
  misc_feature (38)..(337): Homolog of NCBI NO: 15217717 NR Description: AIG1-like protein; protein id: At1g33890.1
  misc_feature (43)..(358): Homolog of NCBI NO: 18399081 NR Description: expressed protein; protein id: At1g33970.1,
  misc_feature (43)..(358): Homolog of NCBI NO: 25373414 NR Description: hypothetical protein F12G12.21 - Arabidopsis >gi|10086478|gb|AAG12538.1|AC015446_19 Similar to AIG1 protein thaliana] >gi|10092443|gb|AAG12846.1|AC079286_3 disease
  misc_feature (43)..(358): Homolog of NCBI NO: 24417378 NR Description: unknown [Arabidopsis thaliana]
  misc_feature (51)..(361): Homolog of NCBI NO: 15225799 NR Description: similar to avrRpt2-induced protein 1; protein id:
KMKGLRKFQQMANDQKNSESFPAKEDHKKDDAAAPAEVDHKDEFSASQPHPVENIVLVGRTGNGKSATGNSIVRSKVFKSKTKSSGVTMECHAVKAVTPEGPILNVIDTPGLFDLSVSAEFIGKEIVKCLTLADGGLHAVLLVLSVRTRISQEEEMVLSTLQVLFGSKIVDYLIVVFTGGDVLEDDGMTLEDYLGDNMPDFLKRVLILCGQRMILFDNKTKDDEKKTKQVHELLKLIDLVRKQNNNIPYTDEMYHMIKEENERHKKEQEELESKGHSEEQLAALMKELQIMNERNLKAMAEMMEKNMKIAMEAQEKLFEQREKAQEMSYQQKMEMQEKLKQMEGRMRAEMEAQMLSRQQCSIL

SEQ ID NO: 84416 - protein, 362 aa, Arabidopsis thaliana
  peptide (1)..(362): Ceres Seq. ID no. 12675053
  misc_feature (52)..(267): Pfam Name: AIG1 family Pfam Description: AIG1 family
  misc_feature (1)..(362): Homolog of NCBI NO: 10092442 NR Description: disease resistance protein AIG1; 916-2572
  misc_feature (10)..(362): Homolog of NCBI NO: 15217731 NR Description: AIG1; protein id: At1g33960.1, supported by cDNA: [Arabidopsis thaliana] >gi|1703219|sp|P54120|AIG1_ARATH AIG1 >gi|1127804|gb|AAC49282.1| AIG1
  misc_feature (52)..(334): Homolog of NCBI NO: 15220922 NR Description: AIG1-like protein; protein id: At1g33950.1
  misc_feature (10)..(362): Homolog of NCBI NO: 15217724 NR Description: AIG1-like protein; protein id: At1g33930.1
  misc_feature (44)..(330): Homolog of NCBI NO: 15217719 NR Description: AIG1-like protein; protein id: At1g33900.1
  misc_feature (37)..(336): Homolog of NCBI NO: 15217717 NR Description: AIG1-like protein; protein id: At1g33890.1
  misc_feature (42)..(357): Homolog of NCBI NO: 18399081 NR Description: expressed protein; protein id: At1g33970.1,
  misc_feature (42)..(357): Homolog of NCBI NO: 25373414 NR Description: hypothetical protein F12G12.21 - Arabidopsis >gi|10086478|gb|AAG12538.1|AC015446_19 Similar to AIG1 protein thaliana] >gi|10092443|gb|AAG12846.1|AC079286_3 disease
  misc_feature (42)..(357): Homolog of NCBI NO: 24417378 NR Description: unknown [Arabidopsis thaliana]
  misc_feature (50)..(360): Homolog of NCBI NO: 15225799 NR Description: similar to avrRpt2-induced protein 1; protein id:
MKGLRKFQQMANDQKNSESFPAKEDHKKDDAAAPAEVDHKDEFSASQPHPVENIVLVGRTGNGKSATGNSIVRSKVFKSKTKSSGVTMECHAVKAVTPEGPILNVIDTPGLFDLSVSAEFIGKEIVKCLTLADGGLHAVLLVLSVRTRISQEEEMVLSTLQVLFGSKIVDYLIVVFTGGDVLEDDGMTLEDYLGDNMPDFLKRVLILCGQRMILFDNKTKDDEKKTKQVHELLKLIDLVRKQNNNIPYTDEMYHMIKEENERHKKEQEELESKGHSEEQLAALMKELQIMNERNLKAMAEMMEKNMKIAMEAQEKLFEQREKAQEMSYQQKMEMQEKLKQMEGRMRAEMEAQMLSRQQCSIL

SEQ ID NO: 84417 - protein, 353 aa, Arabidopsis thaliana
  peptide (1)..(353): Ceres Seq. ID no. 12675054
  misc_feature (43)..(258): Pfam Name: AIG1 family Pfam Description: AIG1 family
  misc_feature (1)..(353): Homolog of NCBI NO: 10092442 NR Description: disease resistance protein AIG1; 916-2572
  misc_feature (1)..(353): Homolog of NCBI NO: 15217731 NR Description: AIG1; protein id: At1g33960.1, supported by cDNA: [Arabidopsis thaliana] >gi|1703219|sp|P54120|AIG1_ARATH AIG1 >gi|1127804|gb|AAC49282.1| AIG1
  misc_feature (43)..(325): Homolog of NCBI NO: 15220922 NR Description: AIG1-like protein; protein id: At1g33950.1
  misc_feature (1)..(353): Homolog of NCBI NO: 15217724 NR Description: AIG1-like protein; protein id: At1g33930.1
  misc_feature (35)..(321): Homolog of NCBI NO: 15217719 NR Description: AIG1-like protein; protein id: At1g33900.1
  misc_feature (28)..(327): Homolog of NCBI NO: 15217717 NR Description: AIG1-like protein; protein id: At1g33890.1
  misc_feature (33)..(348): Homolog of NCBI NO: 18399081 NR Description: expressed protein; protein id: At1g33970.1,
  misc_feature (33)..(348): Homolog of NCBI NO: 25373414 NR Description: hypothetical protein F12G12.21 - Arabidopsis >gi|10086478|gb|AAG12538.1|AC015446_19 Similar to AIG1 protein thaliana] >gi|10092443|gb|AAG12846.1|AC079286_3 disease
  misc_feature (33)..(348): Homolog of NCBI NO: 24417378 NR Description: unknown [Arabidopsis thaliana]
  misc_feature (41)..(351): Homolog of NCBI NO: 15225799 NR Description: similar to avrRpt2-induced protein 1; protein id:
MANDQKNSESFPAKEDHKKDDAAAPAEVDHKDEFSASQPHPVENIVLVGRTGNGKSATGNSIVRSKVFKSKTKSSGVTMECHAVKAVTPEGPILNVIDTPGLFDLSVSAEFIGKEIVKCLTLADGGLHAVLLVLSVRTRISQEEEMVLSTLQVLFGSKIVDYLIVVFTGGDVLEDDGMTLEDYLGDNMPDFLKRVLILCGQRMILFDNKTKDDEKKTKQVHELLKLIDLVRKQNNNIPYTDEMYHMIKEENERHKKEQEELESKGHSEEQLAALMKELQIMNERNLKAMAEMMEKNMKIAMEAQEKLFEQREKAQEMSYQQKMEMQEKLKQMEGRMRAEMEAQMLSRQQCSIL

SEQ ID NO: 84418 - DNA, 968 bp, Arabidopsis thaliana
  misc_feature (1)..(968): Ceres Seq. ID no. 12675094
  misc_feature: MA Experiment ID: 108573 Result: Up-regulated in Transcription
  misc_feature: MA Experiment 108573 PARAMETER Experiment Name: At_Drought_cDNA_P Parameter: Timepoint (hr) Value: 6
  misc_feature: MA Experiment 108573 PARAMETER Experiment Name: At_Drought_cDNA_P Parameter: Tissue Value: Aerial
  misc_feature: MA Experiment 108573 PARAMETER Experiment Name: At_Drought_cDNA_P Parameter: Treatment Value: Drought vs. No Drought
  misc_feature: MA Experiment ID: 20000224 Result: Down-regulated in Transcription
gaggtttctctctctctgaaaaagtgcttttgctgcgtttccatgctctcggaaggaacttggctgaatcgttggagaattatcgatctggcgtcgttggtgcatctctagctgcgccaattcatcggatccggtttgatttctccctttcgcgaatctagccttccgtgatcttagcagccatgttctatggcacagctgtatgggacccttggcttatcgttggccagattatttgcctccaatgctcttactatctcactcttggactcttcaccatggtctttcttggccttcgtgttcctcgccttagtcttgtctacttcttcgattacgctactctcactacttccaccttcaccggttggtctgttattgcctcattcctcttctcttcactcgctggggctgtgtacatgatatttttggtggagcgagcacggaaatgcttagatttctctgcaactctctacatcatacatctcttcttttgcatcatgtatggaggatggccttcctctatggcgtggtgggttgttaatggaaccggactcgctgttatggctttgctagctgagtacttgtgcattaaacgcgaacagcgagagatccctatggatcgcttccactcaagggtttgaagattggtgaaagaacaagtgatgaagattcttgtgggttagcagcgcgactcgtagagcctagtagagcctagtactcttaacaattgtgatgtacagagatgaaatcagaggagtagaatgggcgaaaggaagttcagctagccaagcaacaatgttggacactggtgcaccaactctgactgcaatttttagtgacttcaaatactaagactttggaatacgtttcaatttgttcttttgtatgaaaaaaacattagactcgaataggttattgatttcatgttgcttcttttttttgtttatactggattttctcttctatcc

SEQ ID NO: 84419 - protein, 152 aa, Arabidopsis thaliana; identical to SEQ ID NO: 27739
  peptide (1)..(152): Ceres Seq. ID no. 12675095
  misc_feature (1)..(152): Homolog of NCBI NO: 18412584 NR Description: Expressed protein; protein id: At1g79975.1, by cDNA: 7260. [Arabidopsis thaliana] >gi|25373347|pir||B96831
  misc_feature (1)..(150): Homolog of NCBI NO: 12324600 NR Description: unknown protein; 19658-19089 [Arabidopsis
  misc_feature (1)..(146): Homolog of NCBI NO: 14270398 NR Description: hypothetical protein [Homo sapiens]
  misc_feature (7)..(146): Homolog of NCBI NO: 11561813 NR Description: dJ453C12.4.1 (novel protein (similar to
  misc_feature (7)..(146): Homolog of NCBI NO: 23618848 NR Description: chromosome 20 open reading frame 169; similar to cDNA 2610042O14 gene (M. musculus) [Homo sapiens] unnamed protein product [Homo sapiens]
  misc_feature (1)..(75): Homolog of NCBI NO: 34912286 NR Description: P0451D05.3 [Oryza sativa (japonica
  misc_feature (1)..(145): Homolog of NCBI NO: 34860687 NR Description: similar to chromosome 20 open reading frame 169
  misc_feature (7)..(145): Homolog of NCBI NO: 12833500 NR Description: unnamed protein product [Mus musculus]
  misc_feature (7)..(145): Homolog of NCBI NO: 12838117 NR Description: unnamed protein product [Mus musculus]
  misc_feature (7)..(146): Homolog of NCBI NO: 27469691 NR Description: Similar to chromosome 20 open reading frame 169

SEQ ID NO: 84420 - protein, 120 aa, Arabidopsis thaliana; identical to SEQ ID NO: 27740
  peptide (1)..(120): Ceres Seq. ID no. 12675096
  misc_feature (1)..(120): Homolog of NCBI NO: 18412584 NR Description: Expressed protein; protein id: At1g79975.1, by cDNA: 7260. [Arabidopsis thaliana] >gi|25373347|pir||B96831
  misc_feature (1)..(118): Homolog of NCBI NO: 12324600 NR Description: unknown protein; 19658-19089 [Arabidopsis
  misc_feature (1)..(114): Homolog of NCBI NO: 14270398 NR Description: hypothetical protein [Homo sapiens]
  misc_feature (1)..(114): Homolog of NCBI NO: 11561813 NR Description: dJ453C12.4.1 (novel protein (similar to
  misc_feature (1)..(114): Homolog of NCBI NO: 23618848 NR Description: chromosome 20 open reading frame 169; similar to cDNA 2610042O14 gene (M. musculus) [Homo sapiens] unnamed protein product [Homo sapiens]
  misc_feature (1)..(43): Homolog of NCBI NO: 34912286 NR Description: P0451D05.3 [Oryza sativa (japonica
  misc_feature (1)..(113): Homolog of NCBI NO: 34860687 NR Description: similar to chromosome 20 open reading frame 169
  misc_feature (1)..(113): Homolog of NCBI NO: 12833500 NR Description: unnamed protein product [Mus musculus]
  misc_feature (1)..(113): Homolog of NCBI NO: 12838117 NR Description: unnamed protein product [Mus musculus]
  misc_feature (1)..(114): Homolog of NCBI NO: 27469691 NR Description: Similar to chromosome 20 open reading frame 169

SEQ ID NO: 84421 - protein, 76 aa, Arabidopsis thaliana; identical to SEQ ID NO: 27741
  peptide (1)..(76): Ceres Seq. ID no. 12675097

SEQ ID NO: 84422 - DNA, 1177 bp, Arabidopsis thaliana
  misc_feature (1)..(1177): Ceres Seq. ID no. 12675118
  misc_feature: MA Experiment ID: 108433 Result: Down-regulated in Transcription
  misc_feature: MA Experiment 108433 PARAMETER Experiment Name: At_rhl_Mutant2_cDNA_P Parameter: Age (day) Value: 7
  misc_feature: MA Experiment 108433 PARAMETER Experiment Name: At_rhl_Mutant2_cDNA_P Parameter: Organism Value: A. thaliana
  misc_feature: MA Experiment 108433 PARAMETER Experiment Name: At_rhl_Mutant2_cDNA_P Parameter: Plant Line Value: rhl Mutant vs. wt landsburg
  misc_feature: MA Experiment 108433 PARAMETER Experiment Name: At_rhl_Mutant2_cDNA_P Parameter: Tissue Value: Roots
  misc_feature: MA Experiment ID: 108434 Result: Up-regulated in Transcription
  misc_feature: MA Experiment 108434 PARAMETER Experiment Name: At_Root_Tips_cDNA_P Parameter: Tissue Value: Root Tips
  misc_feature: MA Experiment ID: 108461 Result: Up-regulated in Transcription
  misc_feature: MA Experiment 108461 PARAMETER Experiment Name: At_Germinating_Seeds_cDNA_P Parameter: Age (day) Value: 1 vs. 0
  misc_feature: MA Experiment 108461 PARAMETER Experiment Name: At_Germinating_Seeds_cDNA_P Parameter: Tissue Value: Germinating Seeds
  misc_feature: MA Experiment ID: 20000089 Result: Down-regulated in Transcription
  misc_feature: MA Experiment ID: 20000117 Result: Down-regulated in Transcription
  misc_feature: MA Experiment 20000117 PARAMETER Experiment Name: At_100uM_ABA_Mutants_cDNA_P Parameter: Plant Line Value: Columbia
  misc_feature: MA Experiment 20000117 PARAMETER Experiment Name: At_100uM_ABA_Mutants_cDNA_P Parameter: Timepoint (hr) Value: 6
  misc_feature: MA Experiment 20000117 PARAMETER Experiment Name: At_100uM_ABA_Mutants_cDNA_P Parameter: Tissue Value: Aerial
  misc_feature: MA Experiment 20000117 PARAMETER Experiment Name: At_100uM_ABA_Mutants_cDNA_P Parameter: Treatment Value: 100uM ABA vs. No Treatment
  misc_feature: MA Experiment ID: 20000180 Result: Up-regulated in Transcription
  misc_feature: MA Experiment 20000180 PARAMETER Experiment Name: At_Germinating_Seeds_P Parameter: Age (hr) Value: 24 vs. 0
  misc_feature: MA Experiment 20000180 PARAMETER Experiment Name: At_Germinating_Seeds_P Parameter: Tissue Value: Germinating Seeds
  misc_feature: MA Experiment ID: 20000185 Result: Up-regulated in Transcription
  misc_feature: MA Experiment 20000185 PARAMETER Experiment Name: At_Roots__P Parameter: Age (day) Value: 7 vs. 21
  misc_feature: MA Experiment 20000185 PARAMETER Experiment Name: At_Roots__P Parameter: Organism Value: A. thaliana
  misc_feature: MA Experiment 20000185 PARAMETER Experiment Name: At_Roots__P Parameter: Tissue Value: Roots vs. Whole Plant
  misc_feature: MA Experiment ID: 20000495 Result: Up-regulated in Transcription
  misc_feature: MA Experiment 20000495 PARAMETER Experiment Name: At_Guard_Cells_P Parameter: Harvest Date Value: 8/2/2002
  misc_feature: MA Experiment 20000495 PARAMETER Experiment Name: At_Guard_Cells_P Parameter: Organism Value: A. thaliana
  misc_feature: MA Experiment 20000495 PARAMETER Experiment Name: At_Guard_Cells_P Parameter: Tissue Value: Guard Cells vs. Leaves
  misc_feature: MA Experiment ID: 20000794 Result: Down-regulated in Transcription
  misc_feature: MA Experiment 20000794 PARAMETER Experiment Name: At_Petals_P Parameter: Age (day) Value: 23-25 days
  misc_feature: MA Experiment 20000794 PARAMETER Experiment Name: At_Petals_P Parameter: Plant Line Value: WS
  misc_feature: MA Experiment 20000794 PARAMETER Experiment Name: At_Petals_P Parameter: Tissue Value: Petals vs. Whole plant
aattttaataatcttgaatttagagaaaaagggtaaagcttgtcatcaacttattcgacagtttatataaaaaccgagtcatctttcatcggaagtacttccctccggcccattttctgacgccggcgatactctctttcacctctttctttctttcttctctgtcttttttgctttgtttctctccagtgaggaaaatggcggagtcattacgattctccgactgaaaaaagaagttaaaacctttgaaagaagaggaagaatttgaaagaaaggaaaatgctttgccggaaaaactcaagcttggtggacagaggaaatgttccggtttatctgaatgtctacgatcttactcccattaatggctatgcttactggcttggtcttggcgtttaccattctggtgttgaagttcatggtatagagtatgcttatggagctcatgaatatccaagcactgggatattcgaaggggagccgaagcaatgtgaaggctttacgtttaggaaatcgattttgattggtaaaacggatcttggtcctttggaagtcagagctactatggagcaacttgctgacaactacaaaggaagttcttacaatcttatcaccaagaactgcaaccatttctgcgatgaaacttgtattaagttaactgggaatccaattcctagttgggttaaccgccttgcccgaatcggcttcatgtgcaactgtgtgcttcctgcgactataaacgcgaccaggtttggaaacaacagagtcaatcaagacaaatcatgtgaagcagaaaatgagaagaagaaactgacgagtgtatcgagcagagagaggtctaccattgctactccttcgtcgtcttcttcgtctccttcagttcaagttcgcggtcgaagcaggaaaaggcgtcctcgtgctctgcaaccttcatcgccattgactctcggatcttcctccgtttgactataagtaaaatgaaatttggctttgtttggtaaatccatttttgatctctcaactagagagaccactctgtatttcttctattaattgcgagtgtgctctgtaatcttgttaatatgcaaacctttttcttttcttttttttgtaatcttatttgcattttcttttcagattttggactttatttttacagtcagatatcaaattctcggtc

SEQ ID NO: 84423 - protein, 227 aa, Arabidopsis thaliana; identical to SEQ ID NO: 25172
  peptide (1)..(227): Ceres Seq. ID no. 12675119
  misc_feature (15)..(138): Pfam Name: Eukaryotic protein of unknown function (DUF862) Pfam Description: Eukaryotic protein of unknown function (DUF862)
  misc_feature (1)..(227): Homolog of NCBI NO: 18412886 NR Description: expressed protein; protein id: At1g80690.1, by cDNA: 40037. [Arabidopsis thaliana]
  misc_feature (1)..(227): Homolog of NCBI NO: 25354458 NR Description: hypothetical protein F23A5.4 [imported] - thaliana >gi|6503281|gb|AAF14657.1|AC011713_5 Contains similarity
  misc_feature (1)..(222): Homolog of NCBI NO: 18420889 NR Description: putative protein; protein id: At5g25170.1,
  misc_feature (1)..(218): Homolog of NCBI NO: 18400749 NR Description: expressed protein; protein id: At2g25190.1, by cDNA: 14105., supported by cDNA: gi_13877550, supported by gi_20148724 [Arabidopsis thaliana] >gi|25354456|pir||D84645
  misc_feature (1)..(220): Homolog of NCBI NO: 15236618 NR Description: putative protein; protein id: At4g31980.1
  misc_feature (1)..(220): Homolog of NCBI NO: 17529024 NR Description: unknown protein [Arabidopsis thaliana]
  misc_feature (13)..(204): Homolog of NCBI NO: 21593644 NR Description: unknown [Arabidopsis thaliana]
  misc_feature (13)..(198): Homolog of NCBI NO: 18401869 NR Description: expressed protein; protein id: At1g47740.1, by cDNA: 40816. [Arabidopsis thaliana] unknown protein [Arabidopsis thaliana]
  misc_feature (13)..(198): Homolog of NCBI NO: 9802596 NR Description: T2E6.19 [Arabidopsis thaliana]
  misc_feature (16)..(186): Homolog of NCBI NO: 30684058 NR Description: expressed protein [Arabidopsis thaliana] AT4g17486/AT4g17486 [Arabidopsis thaliana]

SEQ ID NO: 84424 - protein, 133 aa, Arabidopsis thaliana; identical to SEQ ID NO: 25173
  peptide (1)..(133): Ceres Seq. ID no. 12675120
  misc_feature (1)..(133): Homolog of NCBI NO: 18412886 NR Description: expressed protein; protein id: At1g80690.1, by cDNA: 40037. [Arabidopsis thaliana]
  misc_feature (1)..(133): Homolog of NCBI NO: 25354458 NR Description: hypothetical protein F23A5.4 [imported] - thaliana >gi|6503281|gb|AAF14657.1|AC011713_5 Contains similarity
  misc_feature (1)..(128): Homolog of NCBI NO: 18420889 NR Description: putative protein; protein id: At5g25170.1,
  misc_feature (1)..(124): Homolog of NCBI NO: 18400749 NR Description: expressed protein; protein id: At2g25190.1, by cDNA: 14105., supported by cDNA: gi_13877550, supported by gi_20148724 [Arabidopsis thaliana] >gi|25354456|pir||D84645
  misc_feature (1)..(126): Homolog of NCBI NO: 15236618 NR Description: putative protein; protein id: At4g31980.1
  misc_feature (1)..(126): Homolog of NCBI NO: 17529024 NR Description: unknown protein [Arabidopsis thaliana]
  misc_feature (1)..(110): Homolog of NCBI NO: 21593644 NR Description: unknown [Arabidopsis thaliana]
  misc_feature (1)..(104): Homolog of NCBI NO: 18401869 NR Description: expressed protein; protein id: At1g47740.1, by cDNA: 40816. [Arabidopsis thaliana] unknown protein [Arabidopsis thaliana]
  misc_feature (1)..(104): Homolog of NCBI NO: 9802596 NR Description: T2E6.19 [Arabidopsis thaliana]
  misc_feature (1)..(92): Homolog of NCBI NO: 30684058 NR Description: expressed protein [Arabidopsis thaliana] AT4g17486/AT4g17486 [Arabidopsis thaliana]

SEQ ID NO: 84425 - DNA, 1826 bp, Arabidopsis thaliana
  misc_feature (1)..(1826): Ceres Seq. ID no. 12675121
  misc_feature: MA Experiment ID: 20000113 Result: Down-regulated in Transcription
  misc_feature: MA Experiment 20000113 PARAMETER Experiment Name: At_42deg_Heat_cDNA_P Parameter: Temperature (deg C) Value: 42 vs. 22
  misc_feature: MA Experiment 20000113 PARAMETER Experiment Name: At_42deg_Heat_cDNA_P Parameter: Timepoint (hr) Value: 8
  misc_feature: MA Experiment 20000113 PARAMETER Experiment Name: At_42deg_Heat_cDNA_P Parameter: Tissue Value: Aerial
  misc_feature: MA Experiment ID: 20000315 Result: Down-regulated in Transcription
  misc_feature: MA Experiment 20000315 PARAMETER Experiment Name: At_14day_Shoots-Roots_Sub_P Parameter: Age (day) Value: 14
  misc_feature: MA Experiment 20000315 PARAMETER Experiment Name: At_14day_Shoots-Roots_Sub_P Parameter: Organism Value: A. thaliana
  misc_feature: MA Experiment 20000315 PARAMETER Experiment Name: At_14day_Shoots-Roots_Sub_P Parameter: Plant Line Value: WS
  misc_feature: MA Experiment 20000315 PARAMETER Experiment Name: At_14day_Shoots-Roots_Sub_P Parameter: Tissue Value: Shoots vs. Whole Plant
  misc_feature: MA Experiment ID: 20000328 Result: Down-regulated in Transcription
  misc_feature: MA Experiment 20000328 PARAMETER Experiment Name: At_42deg_Heat_Sub_P Parameter: Age (day) Value: 14
  misc_feature: MA Experiment 20000328 PARAMETER Experiment Name: At_42deg_Heat_Sub_P Parameter: Organism Value: A. thaliana
  misc_feature: MA Experiment 20000328 PARAMETER Experiment Name: At_42deg_Heat_Sub_P Parameter: Plant Line Value: WS
  misc_feature: MA Experiment 20000328 PARAMETER Experiment Name: At_42deg_Heat_Sub_P Parameter: Temperature (deg C) Value: 42 vs. 22
  misc_feature: MA Experiment 20000328 PARAMETER Experiment Name: At_42deg_Heat_Sub_P Parameter: Timepoint (hr) Value: 6
  misc_feature: MA Experiment 20000328 PARAMETER Experiment Name: At_42deg_Heat_Sub_P Parameter: Tissue Value: Aerial
gcttctaaaattttctggtagatctgagtccacaatcatcagaaatcaactttgtgaattgaaggccgatcactcctttgactttgttcttagggttcatcctcaaaggtgtttaatgagctcttagaagctatgggaatggcgtccatgagctctggtactgaaagccttcgtctttgcgtgtttgacttaagaagaggccaacacgaaggacaggaactggacaagatcttgttcttctatcctcctgatctaaccttctccactcagctatcggttataggtctcagtgaagggcttatcacgttcacgagacttttctccccggaggcagcttgtgaggtaattgaagcagagagacattcccatgttttctatgaggccgagcccgatatctggatggtcatgattgtagagaaaaataaggagattgaagctgtatggaggattgatgcattgcggagagtgcttaaggaagtgcactctctctttgttatgtttcaagggtcaattagggcattgcttgagaaagaaccaactggaggacttgtaagatcgcacttgtatccattcatcacagactatttaaatgatcttttcgttgggaaaaaacaacagttaccttccttccgtgacactttgaaagagcgtggaacagttcagatgctaactttagctagagatgcggcacttgaagttcagtctctcgtcggagtgctagattcatgtgctgggaccgttcgatgccactctgtgattctatttcatgatctactggtgtcaacaactctctcacctgatgataccgtcgacttgtttgcattttctgtcatgagattaaccacaaacgcgctatcatctggcacaagttcctggtcatatctacgcaaaggatccggttcacctcaaatatcttctagatctactacggtgccccctcttggttcaggtggtacattgccttcgggaaatggtagtagcacaggtcgtgttattagacctttgcagcacgataagtggtcgaaggggaaagatgggtttcttgtaactgatatttggggtttagatgccaccccgacaattttgatacagaagacacaggaaagtttttaccttttgacttatcagtacaagagtctcaccttggttcttctcgtgcctatcgctgcaattgttaatggagagctagacatctcattcgtgaagcagcaagttattgaaaacgcatcgaccaaaatcttgaaagtcgaagagaagctatcgaaagggtggggcggtgagaatgcttaccatgtaagcggttaccgttacttactagttgataatgacatggaagtttccagagcttctccaccaggaaaggtagcaacactagcaaaggagtctttgcttgcactaaacaagctaagggaagaagtggatacagaaaaaaaccgctcgaagcaagagaaagacatggaaatatgcattcgagcgaagaacaacacatgggtcatcgcgcgtctaaacagaggtaaagagctttacatggctttagagaaagcaagtgaaactcttcttgatgctacagactctgtccaaagattcagcaacaggtactgcagcggggcattccccatggattagattctgcaattgtttgttttgatagaagttgcaaaggaaagtgtttttgaagtgttttgagatatgttttagattttcaattataagatataaaagaaaccgttacaaagaatgagaatttggtgacttttgtatccacaactaaaagtaaacgtggaacttgacccttgacggtttgaataaaaccttcgcttaatctc

SEQ ID NO: 84426 - protein, 497 aa, Arabidopsis thaliana; identical to SEQ ID NO: 76743
  peptide (1)..(497): Ceres Seq. ID no. 12675122
  misc_feature (1)..(497): Homolog of NCBI NO: 25372816 NR Description: F23A5.27 [imported] - Arabidopsis thaliana
  misc_feature (1)..(497): Homolog of NCBI NO: 15220866 NR Description: myrosinase precursor, putative; protein id:
  misc_feature (3)..(497): Homolog of NCBI NO: 30684673 NR Description: expressed protein [Arabidopsis thaliana]
  misc_feature (1)..(497): Homolog of NCBI NO: 38175489 NR Description: putative myrosinase precursor [Oryza sativa
  misc_feature (125)..(497): Homolog of NCBI NO: 18394314 NR Description: expressed protein; protein id: At1g16020.1,
  misc_feature (125)..(497): Homolog of NCBI NO: 21618002 NR Description: unknown [Arabidopsis thaliana]
  misc_feature (234)..(488): Homolog of NCBI NO: 14517360 NR Description: At1g80910/F23A5_21 [Arabidopsis thaliana]
  misc_feature (3)..(312): Homolog of NCBI NO: 18394314 NR Description: expressed protein; protein id: At1g16020.1,
  misc_feature (3)..(312): Homolog of NCBI NO: 21618002 NR Description: unknown [Arabidopsis thaliana]
  misc_feature (192)..(497): Homolog of NCBI NO: 18266049 NR Description: myrosinase precursor [Brassica oleracea]

SEQ ID NO: 84427 - protein, 495 aa, Arabidopsis thaliana; identical to SEQ ID NO: 76744
  peptide (1)..(495): Ceres Seq. ID no. 12675123
  misc_feature (1)..(495): Homolog of NCBI NO: 25372816 NR Description: F23A5.27 [imported] - Arabidopsis thaliana
  misc_feature (1)..(495): Homolog of NCBI NO: 15220866 NR Description: myrosinase precursor, putative; protein id:
  misc_feature (1)..(495): Homolog of NCBI NO: 30684673 NR Description: expressed protein [Arabidopsis thaliana]
  misc_feature (1)..(495): Homolog of NCBI NO: 38175489 NR Description: putative myrosinase precursor [Oryza sativa
  misc_feature (123)..(495): Homolog of NCBI NO: 18394314 NR Description: expressed protein; protein id: At1g16020.1,
  misc_feature (123)..(495): Homolog of NCBI NO: 21618002 NR Description: unknown [Arabidopsis thaliana]
  misc_feature (232)..(486): Homolog of NCBI NO: 14517360 NR Description: At1g80910/F23A5_21 [Arabidopsis thaliana]
  misc_feature (1)..(310): Homolog of NCBI NO: 18394314 NR Description: expressed protein; protein id: At1g16020.1,
  misc_feature (1)..(310): Homolog of NCBI NO: 21618002 NR Description: unknown [Arabidopsis thaliana]
  misc_feature (190)..(495): Homolog of NCBI NO: 18266049 NR Description: myrosinase precursor [Brassica oleracea]

SEQ ID NO: 84428 - protein, 492 aa, Arabidopsis thaliana; identical to SEQ ID NO: 76745
  peptide (1)..(492): Ceres Seq. ID no. 12675124
  misc_feature (1)..(492): Homolog of NCBI NO: 25372816 NR Description: F23A5.27 [imported] - Arabidopsis thaliana
  misc_feature (1)..(492): Homolog of NCBI NO: 15220866 NR Description: myrosinase precursor, putative; protein id:
  misc_feature (1)..(492): Homolog of NCBI NO: 30684673 NR Description: expressed protein [Arabidopsis thaliana]
  misc_feature (1)..(492): Homolog of NCBI NO: 38175489 NR Description: putative myrosinase precursor [Oryza sativa
  misc_feature (120)..(492): Homolog of NCBI NO: 18394314 NR Description: expressed protein; protein id: At1g16020.1,
  misc_feature (120)..(492): Homolog of NCBI NO: 21618002 NR Description: unknown [Arabidopsis thaliana]
  misc_feature (229)..(483): Homolog of NCBI NO: 14517360 NR Description: At1g80910/F23A5_21 [Arabidopsis thaliana]
  misc_feature (1)..(307): Homolog of NCBI NO: 18394314 NR Description: expressed protein; protein id: At1g16020.1,
  misc_feature (1)..(307): Homolog of NCBI NO: 21618002 NR Description: unknown [Arabidopsis thaliana]
  misc_feature (187)..(492): Homolog of NCBI NO: 18266049 NR Description: myrosinase precursor [Brassica oleracea]

SEQ ID NO: 84429 - DNA, 1206 bp, Arabidopsis thaliana
  misc_feature (1)..(1206): Ceres Seq. ID no. 12675174
  misc_feature: MA Experiment ID: 108461 Result: Up-regulated in Transcription
  misc_feature: MA Experiment 108461 PARAMETER Experiment Name: At_Germinating_Seeds_cDNA_P Parameter: Age (day) Value: 1 vs. 0
  misc_feature: MA Experiment 108461 PARAMETER Experiment Name: At_Germinating_Seeds_cDNA_P Parameter: Tissue Value: Germinating Seeds
  misc_feature: MA Experiment ID: 20000179 Result: Up-regulated in Transcription
  misc_feature: MA Experiment 20000179 PARAMETER Experiment Name: At_Germinating_Seeds_P Parameter: Age (hr) Value: 6 vs. 0
  misc_feature: MA Experiment 20000179 PARAMETER Experiment Name: At_Germinating_Seeds_P Parameter: Tissue Value: Germinating Seeds
  misc_feature: MA Experiment ID: 20000180 Result: Up-regulated in Transcription
  misc_feature: MA Experiment 20000180 PARAMETER Experiment Name: At_Germinating_Seeds_P Parameter: Age (hr) Value: 24 vs. 0
  misc_feature: MA Experiment 20000180 PARAMETER Experiment Name: At_Germinating_Seeds_P Parameter: Tissue Value: Germinating Seeds
  misc_feature: MA Experiment ID: 20000265 Result: Up-regulated in Transcription
  misc_feature: MA Experiment 20000265 PARAMETER Experiment Name: At_Open_Flower_P Parameter: Age (day) Value: 21
  misc_feature: MA Experiment 20000265 PARAMETER Experiment Name: At_Open_Flower_P Parameter: Plant Line Value: WS
  misc_feature: MA Experiment 20000265 PARAMETER Experiment Name: At_Open_Flower_P Parameter: Tissue Value: Closed Flower vs. Whole Plant
  misc_feature: MA Experiment ID: 20000794 Result: Up-regulated in Transcription
  misc_feature: MA Experiment 20000794 PARAMETER Experiment Name: At_Petals_P Parameter: Age (day) Value: 23-25 days
  misc_feature: MA Experiment 20000794 PARAMETER Experiment Name: At_Petals_P Parameter: Plant Line Value: WS
  misc_feature: MA Experiment 20000794 PARAMETER Experiment Name: At_Petals_P Parameter: Tissue Value: Petals vs. Whole plant
aagaagacgatagacagcaaaaagcgttgggcgagaagaagatgacgtgcttctcttctgctactcctcatcgccatcatcttctactttcttctccatctacttccaaatccctgcttcgatttccctcatcttatctgaaacctagccccagtcttctcttccatggctcatctcgctctctcctctcctgttcagacggcagcaacaaccgtcctcctccctccggtgacaccgtcccaaataacttctgtatcattgagggatcagagacagttcaagactttgtgcagatgcagcttcaggaaatccaagataacataaggagtagacgcaataagatatttctcctcatggaggaagtgaggaggttacgtgtgcagcaacgtatcaagagtgttaaagccatcaatgaggacagtgagctcgaggctaccgagatgcctgagatcacatcttctattcctttcctccctaatgtgacaccaaagactttgaaacaactctattcgaccagcgttgcattgatatcgggaattatcttctttggtggtctcattgcacctaatctggaactgaaggtaggacttggaggaacctcttatgaagattttataaggagcttacatctacccttgcaattaagccaggtagatccaattgtggcatctttttctggcggggccgtgggagtcatttcaaccttgatgctaatcgaagttaacaatgttaaacaacaagagaagaagaggtgcaaatactgccttgggactggatacttgccatgcgctcgatgctcagctagtggtgtgtgtttgagcattgatcccatcacaagacctagagctacaaaccagcttatgcaggtcgcgaccacaaaaagatgtctaaattgttccggcgcaggaaaggtgatgtgtccgacatgtctttgcaccgggatggtaacagctagcgagcatgacccccgctttgaccctttcgattagaaaacaatggcctcctttgaaattggtccttgcaaaagctaagccaagcctatgagaactgaggagagccaaacctcgtcatataaatgttttacataataaaagtaattacataataaaagtaacattagaatttttaacttttgtctatagtaaacatgggaaagtatcggttatgtaaagtacttcttcacaaactaaaaaaattcaccagatg

SEQ ID NO: 84430 - protein, 328 aa, Arabidopsis thaliana
  peptide (1)..(328): Ceres Seq. ID no. 12675175
  misc_feature (14)..(328): Homolog of NCBI NO: 22326624 NR Description: putative protein; protein id: At5g06130.1, by cDNA: gi_18176019 [Arabidopsis thaliana] unknown protein [Arabidopsis thaliana]
  misc_feature (14)..(328): Homolog of NCBI NO: 8978349 NR Description: gene_id:K16F4.10~pir||T00468~similar to unknown
  misc_feature (73)..(328): Homolog of NCBI NO: 30681288 NR Description: expressed protein [Arabidopsis thaliana]
  misc_feature (75)..(328): Homolog of NCBI NO: 15240312 NR Description: putative protein; protein id: At5g61670.1, by cDNA: 112078., supported by cDNA: gi_20453123 [Arabidopsis >gi|9758482|dbj|BAB09011.1| gene_id:K11J9.20~unknown protein
EDDRQQKALGEKKMTCFSSATPHRHHLLLSSPSTSKSLLRFPSSYLKPSPSLLFHGSSRSLLSCSDGSNNRPPPSGDTVPNNFCIIEGSETVQDFVQMQLQEIQDNIRSRRNKIFLLMEEVRRLRVQQRIKSVKAINEDSELEATEMPEITSSIPFLPNVTPKTLKQLYSTSVALISGIIFFGGLIAPNLELKVGLGGTSYEDFIRSLHLPLQLSQVDPIVASFSGGAVGVISTLMLIEVNNVKQQEKKRCKYCLGTGYLPCARCSASGVCLSIDPITRPRATNQLMQVATTKRCLNCSGAGKVMCPTCLCTGMVTASEHDPRFDPFD

SEQ ID NO: 84431 - protein, 315 aa, Arabidopsis thaliana; identical to SEQ ID NO: 41300
  peptide (1)..(315): Ceres Seq. ID no. 12675176
  misc_feature (1)..(315): Homolog of NCBI NO: 22326624 NR Description: putative protein; protein id: At5g06130.1, by cDNA: gi_18176019 [Arabidopsis thaliana] unknown protein [Arabidopsis thaliana]
  misc_feature (1)..(315): Homolog of NCBI NO: 8978349 NR Description: gene_id:K16F4.10~pir||T00468~similar to unknown
  misc_feature (60)..(315): Homolog of NCBI NO: 30681288 NR Description: expressed protein [Arabidopsis thaliana]
  misc_feature (62)..(315): Homolog of NCBI NO: 15240312 NR Description: putative protein; protein id: At5g61670.1, by cDNA: 112078., supported by cDNA: gi_20453123 [Arabidopsis >gi|9758482|dbj|BAB09011.1| gene_id:K11J9.20~unknown protein

SEQ ID NO: 84432 - protein, 231 aa, Arabidopsis thaliana; identical to SEQ ID NO: 41301
  peptide (1)..(231): Ceres Seq. ID no. 12675177
  misc_feature (1)..(231): Homolog of NCBI NO: 22326624 NR Description: putative protein; protein id: At5g06130.1, by cDNA: gi_18176019 [Arabidopsis thaliana] unknown protein [Arabidopsis thaliana]
  misc_feature (1)..(231): Homolog of NCBI NO: 8978349 NR Description: gene_id:K16F4.10~pir||T00468~similar to unknown
  misc_feature (1)..(231): Homolog of NCBI NO: 30681288 NR Description: expressed protein [Arabidopsis thaliana]
  misc_feature (1)..(231): Homolog of NCBI NO: 15240312 NR Description: putative protein; protein id: At5g61670.1, by cDNA: 112078., supported by cDNA: gi_20453123 [Arabidopsis >gi|9758482|dbj|BAB09011.1| gene_id:K11J9.20~unknown protein

SEQ ID NO: 84433 - DNA, 1434 bp, Arabidopsis thaliana
  misc_feature (1)..(1434): Ceres Seq. ID no. 12675226
  misc_feature: MA Experiment ID: 20000173 Result: Up-regulated in Transcription
  misc_feature: MA Experiment 20000173 PARAMETER Experiment Name: At_42deg_Heat_P Parameter: Age (day) Value: 14
  misc_feature: MA Experiment 20000173 PARAMETER Experiment Name: At_42deg_Heat_P Parameter: Organism Value: A. thaliana
  misc_feature: MA Experiment 20000173 PARAMETER Experiment Name: At_42deg_Heat_P Parameter: Plant Line Value: WS
  misc_feature: MA Experiment 20000173 PARAMETER Experiment Name: At_42deg_Heat_P Parameter: Temperature (deg C) Value: 42 vs. 22
  misc_feature: MA Experiment 20000173 PARAMETER Experiment Name: At_42deg_Heat_P Parameter: Timepoint (hr) Value: 6
  misc_feature: MA Experiment 20000173 PARAMETER Experiment Name: At_42deg_Heat_P Parameter: Tissue Value: Aerial
  misc_feature: MA Experiment ID: 20000185 Result: Down-regulated in Transcription
  misc_feature: MA Experiment 20000185 PARAMETER Experiment Name: At_Roots__P Parameter: Age (day) Value: 7 vs. 21
  misc_feature: MA Experiment 20000185 PARAMETER Experiment Name: At_Roots__P Parameter: Organism Value: A. thaliana
  misc_feature: MA Experiment 20000185 PARAMETER Experiment Name: At_Roots__P Parameter: Tissue Value: Roots vs. Whole Plant
  misc_feature: MA Experiment ID: 20000234 Result: Down-regulated in Transcription
  misc_feature: MA Experiment 20000234 PARAMETER Experiment Name: At_Siliques_P Parameter: Age (day) Value: 21
  misc_feature: MA Experiment 20000234 PARAMETER Experiment Name: At_Siliques_P Parameter: Organism Value: A. thaliana
  misc_feature: MA Experiment 20000234 PARAMETER Experiment Name: At_Siliques_P Parameter: Plant Line Value: WS
  misc_feature: MA Experiment 20000234 PARAMETER Experiment Name: At_Siliques_P Parameter: Tissue Value: Less Than 5mm Siliques vs. Whole Plant
  misc_feature: MA Experiment ID: 20000265 Result: Down-regulated in Transcription
  misc_feature: MA Experiment 20000265 PARAMETER Experiment Name: At_Open_Flower_P Parameter: Age (day) Value: 21
  misc_feature: MA Experiment 20000265 PARAMETER Experiment Name: At_Open_Flower_P Parameter: Plant Line Value: WS
  misc_feature: MA Experiment 20000265 PARAMETER Experiment Name: At_Open_Flower_P Parameter: Tissue Value: Closed Flower vs. Whole Plant
  misc_feature: MA Experiment ID: 20000437 Result: Up-regulated in Transcription
  misc_feature: MA Experiment 20000437 PARAMETER Experiment Name: At_Drought_P Parameter: Age (day) Value: 8
  misc_feature: MA Experiment 20000437 PARAMETER Experiment Name: At_Drought_P Parameter: Organism Value: A. thaliana
  misc_feature: MA Experiment 20000437 PARAMETER Experiment Name: At_Drought_P Parameter: Plant Line Value: WS
  misc_feature: MA Experiment 20000437 PARAMETER Experiment Name: At_Drought_P Parameter: Timepoint (hr) Value: 24
  misc_feature: MA Experiment 20000437 PARAMETER Experiment Name: At_Drought_P Parameter: Tissue Value: Whole Plant
  misc_feature: MA Experiment 20000437 PARAMETER Experiment Name: At_Drought_P Parameter: Treatment Value: Drought vs. No Drought
  misc_feature: MA Experiment ID: 20000438 Result: Up-regulated in Transcription
  misc_feature: MA Experiment 20000438 PARAMETER Experiment Name: At_Shoots__P Parameter: Age (day) Value: 14
  misc_feature: MA Experiment 20000438 PARAMETER Experiment Name: At_Shoots__P Parameter: Tissue Value: Shoots vs. Whole Plant
  misc_feature: MA Experiment ID: 20000495 Result: Down-regulated in Transcription
  misc_feature: MA Experiment 20000495 PARAMETER Experiment Name: At_Guard_Cells_P Parameter: Harvest Date Value: 8/2/2002
  misc_feature: MA Experiment 20000495 PARAMETER Experiment Name: At_Guard_Cells_P Parameter: Organism Value: A. thaliana
  misc_feature: MA Experiment 20000495 PARAMETER Experiment Name: At_Guard_Cells_P Parameter: Tissue Value: Guard Cells vs. Leaves
  misc_feature: MA Experiment ID: 20000573 Result: Down-regulated in Transcription
  misc_feature: MA Experiment 20000573 PARAMETER Experiment Name: At_100uM_ABA_Mutants__P Parameter: Organism Value: A. thaliana
  misc_feature: MA Experiment 20000573 PARAMETER Experiment Name: At_100uM_ABA_Mutants__P Parameter: Plant Line Value: CS22 vs. Ler wt
  misc_feature: MA Experiment 20000573 PARAMETER Experiment Name: At_100uM_ABA_Mutants__P Parameter: Timepoint (hr) Value: N/A
  misc_feature: MA Experiment 20000573 PARAMETER Experiment Name: At_100uM_ABA_Mutants__P Parameter: Tissue Value: Whole Plant
  misc_feature: MA Experiment 20000573 PARAMETER Experiment Name: At_100uM_ABA_Mutants__P Parameter: Treatment Value: None
  misc_feature: MA Experiment ID: 20001248 Result: Down-regulated in Transcription
  misc_feature: MA Experiment 20001248 PARAMETER Experiment Name: At_Far-red-induction_P Parameter: Age (day) Value: 7
  misc_feature: MA Experiment 20001248 PARAMETER Experiment Name: At_Far-red-induction_P Parameter: Light Value: Far-red vs. White
  misc_feature: MA Experiment 20001248 PARAMETER Experiment Name: At_Far-red-induction_P Parameter: Organism Value: A. thaliana
  misc_feature: MA Experiment 20001248 PARAMETER Experiment Name: At_Far-red-induction_P Parameter: Plant Line Value: Columbia
  misc_feature: MA Experiment 20001248 PARAMETER Experiment Name: At_Far-red-induction_P Parameter: Timepoint (hr) Value: 4
  misc_feature: MA Experiment 20001248 PARAMETER Experiment Name: At_Far-red-induction_P Parameter: Tissue Value: Whole Plant
  misc_feature: MA Experiment ID: 20001557 Result: Down-regulated in Transcription
  misc_feature: MA Experiment 20001557 PARAMETER Experiment Name: At_Drought_Soil_Dry_P Parameter: Age (day) Value: 27
  misc_feature: MA Experiment 20001557 PARAMETER Experiment Name: At_Drought_Soil_Dry_P Parameter: Organism Value: A. thaliana
  misc_feature: MA Experiment 20001557 PARAMETER Experiment Name: At_Drought_Soil_Dry_P Parameter: Plant Line Value: WS
  misc_feature: MA Experiment 20001557 PARAMETER Experiment Name: At_Drought_Soil_Dry_P Parameter: Post Timepoint (hr) Value: 3
  misc_feature: MA Experiment 20001557 PARAMETER Experiment Name: At_Drought_Soil_Dry_P Parameter: Post-Treatment Value: Re-Water vs. No Drought
  misc_feature: MA Experiment 20001557 PARAMETER Experiment Name: At_Drought_Soil_Dry_P Parameter: Timepoint (day) Value: 13
  misc_feature: MA Experiment 20001557 PARAMETER Experiment Name: At_Drought_Soil_Dry_P Parameter: Treatment Value: Drought vs. No Drought
  misc_feature: MA Experiment ID: 20001558 Result: Down-regulated in Transcription
  misc_feature: MA Experiment 20001558 PARAMETER Experiment Name: At_Drought_Soil_Dry_P Parameter: Age (day) Value: 27
  misc_feature: MA Experiment 20001558 PARAMETER Experiment Name: At_Drought_Soil_Dry_P Parameter: Organism Value: A. thaliana
  misc_feature: MA Experiment 20001558 PARAMETER Experiment Name: At_Drought_Soil_Dry_P Parameter: Plant Line Value: WS
  misc_feature: MA Experiment 20001558 PARAMETER Experiment Name: At_Drought_Soil_Dry_P Parameter: Post Timepoint (hr) Value: 6
  misc_feature: MA Experiment 20001558 PARAMETER Experiment Name: At_Drought_Soil_Dry_P Parameter: Post-Treatment Value: Re-Water vs. No Drought
  misc_feature: MA Experiment 20001558 PARAMETER Experiment Name: At_Drought_Soil_Dry_P Parameter: Timepoint (day) Value: 13
  misc_feature: MA Experiment 20001558 PARAMETER Experiment Name: At_Drought_Soil_Dry_P Parameter: Treatment Value: Drought vs. No Drought
  misc_feature: MA Experiment ID: 20001560 Result: Down-regulated in Transcription
  misc_feature: MA Experiment 20001560 PARAMETER Experiment Name: At_Drought_Soil_Dry_P Parameter: Age (day) Value: 28
  misc_feature: MA Experiment 20001560 PARAMETER Experiment Name: At_Drought_Soil_Dry_P Parameter: Organism Value: A. thaliana
  misc_feature: MA Experiment 20001560 PARAMETER Experiment Name: At_Drought_Soil_Dry_P Parameter: Plant Line Value: WS
  misc_feature: MA Experiment 20001560 PARAMETER Experiment Name: At_Drought_Soil_Dry_P Parameter: Post Timepoint (hr) Value: None
  misc_feature: MA Experiment 20001560 PARAMETER Experiment Name: At_Drought_Soil_Dry_P Parameter: Post-Treatment Value: None
  misc_feature: MA Experiment 20001560 PARAMETER Experiment Name: At_Drought_Soil_Dry_P Parameter: Timepoint (day) Value: 14
  misc_feature: MA Experiment 20001560 PARAMETER Experiment Name: At_Drought_Soil_Dry_P Parameter: Treatment Value: Drought vs. No Drought
  misc_feature: MA Experiment ID: 20001905 Result: Up-regulated in Transcription
  misc_feature: MA Experiment 20001905 PARAMETER Experiment Name: At_Drought_Reproduction_P Parameter: Age (day) Value: 40
  misc_feature: MA Experiment 20001905 PARAMETER Experiment Name: At_Drought_Reproduction_P Parameter: Organism Value: A. thaliana
  misc_feature: MA Experiment 20001905 PARAMETER Experiment Name: At_Drought_Reproduction_P Parameter: Plant Line Value: WS
  misc_feature: MA Experiment 20001905 PARAMETER Experiment Name: At_Drought_Reproduction_P Parameter: Timepoint (day) Value: 10
  misc_feature: MA Experiment 20001905 PARAMETER Experiment Name: At_Drought_Reproduction_P Parameter: Tissue Value: Rosettes
  misc_feature: MA Experiment 20001905 PARAMETER Experiment Name: At_Drought_Reproduction_P Parameter: Treatment Value: Drought vs. No Drought
  misc_feature: MA Experiment ID: 20001911 Result: Up-regulated in Transcription
  misc_feature: MA Experiment 20001911 PARAMETER Experiment Name: At_Drought_Reproduction_P Parameter: Age (day) Value: 40
  misc_feature: MA Experiment 20001911 PARAMETER Experiment Name: At_Drought_Reproduction_P Parameter: Organism Value: A. thaliana
  misc_feature: MA Experiment 20001911 PARAMETER Experiment Name: At_Drought_Reproduction_P Parameter: Plant Line Value: WS
  misc_feature: MA Experiment 20001911 PARAMETER Experiment Name: At_Drought_Reproduction_P Parameter: Timepoint (day) Value: 10
  misc_feature: MA Experiment 20001911 PARAMETER Experiment Name: At_Drought_Reproduction_P Parameter: Tissue Value: Flowers
  misc_feature: MA Experiment 20001911 PARAMETER Experiment Name: At_Drought_Reproduction_P Parameter: Treatment Value: Drought vs. No Drought
gaatcacaattaaacccaattcaggaaaaagatttcatctttgagtttttcattcatctatcggttgtttccattctcaggttttgattgataatcatagattggtagtgatttgggagtttcttgattgtgtaatcatggcggaggctattggtgctgtatctttggtgggtcatcgaccttcaattgtgaggattacagtgaagaatgaattgaaaacgcagaaatcacagagcattgttcgctttccggtgaaggtagattatagtgcgaaaggtgttctctctcatttgatgacgcagagtgtgaaaaagaatcgaatgtcggtgtttccgatcagggctcttgctatggaattgacgaaagagaagaagaaagacgatcggttaccgaaaacttggaattatcttgattctggtgctgatgataagcctagtttatggcctcctgagaacaaagctgataagccttcattgcataatcctttacttaggcaagagcggatgggttgtggttggttaggtgctatatttgagtgggaaggagtattgattgaagacaatcctgacttggataaccaatcatggcttactttagctcaagaagaagggaaatctcctcctccggcttttatgctcagacgtgtcgaagggatgaagaacgagcaggccatatctgaggttctgtgttggtcgagagatcctgttcaagtgagaaggatggctaagcgtaaagaagagatctttaaagctctacatggaggagtgtatagactaagagatgggtcgcaggaatttgtcaatgtcttgatgaataataagatccctatggctttggtatcgactcgtcctcgggaaacattggagaatgcagttggatcgataggtatcagaaagttcttcagtgtgatagttgcatcggaagatgtttacagaggtaaaccagatcctgagatgttcatttacgcagcacagcttcttgatttcataccggaacgttgcattgtatttggaaactcaaaccagaccatagaggcagctcacgatgggaggatgaaatgtgtggctgtggcgagtaaacacccgatttatgagcttggtgcagctgagctggtggtaagaagactagacgagttatcgattatcgatttgaagaaacttgctgataccgatttgacagagttcgaaccggaattggagatggaaaaggaagatgagcgtgagctgccttcatcggctgtagcagttgatgatttctgatggaagtgatcttctgtaatgttgtacagttttatggatttggattcttcctcgtgtaattcacaaaatgttatagtttctgtgtataattggaacaagttaaacgagggataaatataaaatgtatactcctagttttaatgttgtgtacgttatatatcatttgatttgaaca

SEQ ID NO: 84434 - protein, 373 aa, Arabidopsis thaliana; identical to SEQ ID NO: 38131
  peptide (1)..(373): Ceres Seq. ID no. 12675227
  misc_feature (127)..(314): Pfam Name: haloacid dehalogenase-like hydrolase Pfam Description: haloacid dehalogenase-like hydrolase
  misc_feature (1)..(373): Homolog of NCBI NO: 15234236 NR Description: putative protein; protein id: At4g11570.1, by cDNA: gi_16648788, supported by cDNA: gi_20466124 [Arabidopsis
  misc_feature (101)..(356): Homolog of NCBI NO: 10444400 NR Description: genetic modifier [Zea mays]
  misc_feature (101)..(356): Homolog of NCBI NO: 18542168 NR Description: putative genetic modifier [Zea mays]
  misc_feature (43)..(346): Homolog of NCBI NO: 38345597 NR Description: OSJNBb0012E24.15 [Oryza sativa (japonica
  misc_feature (129)..(371): Homolog of NCBI NO: 18399067 NR Description: expressed protein; protein id: At3g10970.1, by cDNA: 33407., supported by cDNA: gi_14532505 [Arabidopsis
  misc_feature (129)..(371): Homolog of NCBI NO: 21592870 NR Description: unknown [Arabidopsis thaliana]
  misc_feature (129)..(371): Homolog of NCBI NO: 14532506 NR Description: AT3g10970/F9F8_21 [Arabidopsis thaliana]
  misc_feature (176)..(371): Homolog of NCBI NO: 6016697 NR Description: unknown protein [Arabidopsis thaliana]
  misc_feature (128)..(332): Homolog of NCBI NO: 37521914 NR Description: hypothetical protein glr2345 [Gloeobacter
  misc_feature (131)..(331): Homolog of NCBI NO: 21672855 NR Description: hydrolase, haloacid dehalogenase-like family

SEQ ID NO: 84435 - protein, 321 aa, Arabidopsis thaliana; identical to SEQ ID NO: 38132
  peptide (1)..(321): Ceres Seq. ID no. 12675228
  misc_feature (75)..(262): Pfam Name: haloacid dehalogenase-like hydrolase Pfam Description: haloacid dehalogenase-like hydrolase
  misc_feature (1)..(321): Homolog of NCBI NO: 15234236 NR Description: putative protein; protein id: At4g11570.1, by cDNA: gi_16648788, supported by cDNA: gi_20466124 [Arabidopsis
  misc_feature (49)..(304): Homolog of NCBI NO: 10444400 NR Description: genetic modifier [Zea mays]
  misc_feature (49)..(304): Homolog of NCBI NO: 18542168 NR Description: putative genetic modifier [Zea mays]
  misc_feature (1)..(294): Homolog of NCBI NO: 38345597 NR Description: OSJNBb0012E24.15 [Oryza sativa (japonica
  misc_feature (77)..(319): Homolog of NCBI NO: 18399067 NR Description: expressed protein; protein id: At3g10970.1, by cDNA: 33407., supported by cDNA: gi_14532505 [Arabidopsis
  misc_feature (77)..(319): Homolog of NCBI NO: 21592870 NR Description: unknown [Arabidopsis thaliana]
  misc_feature (77)..(319): Homolog of NCBI NO: 14532506 NR Description: AT3g10970/F9F8_21 [Arabidopsis thaliana]
  misc_feature (124)..(319): Homolog of NCBI NO: 6016697 NR Description: unknown protein [Arabidopsis thaliana]
  misc_feature (76)..(280): Homolog of NCBI NO: 37521914 NR Description: hypothetical protein glr2345 [Gloeobacter
  misc_feature (79)..(279): Homolog of NCBI NO: 21672855 NR Description: hydrolase, haloacid dehalogenase-like family

SEQ ID NO: 84436 - protein, 312 aa, Arabidopsis thaliana; identical to SEQ ID NO: 38133
  peptide (1)..(312): Ceres Seq. ID no. 12675229
  misc_feature (66)..(253): Pfam Name: haloacid dehalogenase-like hydrolase Pfam Description: haloacid dehalogenase-like hydrolase
  misc_feature (1)..(312): Homolog of NCBI NO: 15234236 NR Description: putative protein; protein id: At4g11570.1, by cDNA: gi_16648788, supported by cDNA: gi_20466124 [Arabidopsis
  misc_feature (40)..(295): Homolog of NCBI NO: 10444400 NR Description: genetic modifier [Zea mays]
  misc_feature (40)..(295): Homolog of NCBI NO: 18542168 NR Description: putative genetic modifier [Zea mays]
  misc_feature (1)..(285): Homolog of NCBI NO: 38345597 NR Description: OSJNBb0012E24.15 [Oryza sativa (japonica
  misc_feature (68)..(310): Homolog of NCBI NO: 18399067 NR Description: expressed protein; protein id: At3g10970.1, by cDNA: 33407., supported by cDNA: gi_14532505 [Arabidopsis
  misc_feature (68)..(310): Homolog of NCBI NO: 21592870 NR Description: unknown [Arabidopsis thaliana]
  misc_feature (68)..(310): Homolog of NCBI NO: 14532506 NR Description: AT3g10970/F9F8_21 [Arabidopsis thaliana]
  misc_feature (115)..(310): Homolog of NCBI NO: 6016697 NR Description: unknown protein [Arabidopsis thaliana]
  misc_feature (67)..(271): Homolog of NCBI NO: 37521914 NR Description: hypothetical protein glr2345 [Gloeobacter
  misc_feature (70)..(270): Homolog of NCBI NO: 21672855 NR Description: hydrolase, haloacid dehalogenase-like family

SEQ ID NO: 84437 - DNA, 1132 bp, Arabidopsis thaliana
  misc_feature (1)..(1132): Ceres Seq. ID no. 12675230
  misc_feature: MA Experiment ID: 20000112 Result: Down-regulated in Transcription
  misc_feature: MA Experiment 20000112 PARAMETER Experiment Name: At_42deg_Heat_cDNA_P Parameter: Temperature (deg C) Value: 42 vs. 22
  misc_feature: MA Experiment 20000112 PARAMETER Experiment Name: At_42deg_Heat_cDNA_P Parameter: Timepoint (hr) Value: 2
  misc_feature: MA Experiment 20000112 PARAMETER Experiment Name: At_42deg_Heat_cDNA_P Parameter: Tissue Value: Aerial
  misc_feature: Pfam Name: Mito_carr Pfam Description: Mitochondrial carrier protein
gaactatctctttttgctttacaaagataggtgtgtcaataataaaggagtgaatatgataagttcaaaatgtagcacggattgtgatgctgaggtttcttcttcagggaataacttagacgaagactgcttatctatcgttgaaaataaacagttgcttgagaaagatagaaatgacaaagagactgaagtttgtttgtcctctccagaaacgactacttacgcttttgctaaacagagacatgcttttgctggtgcgttggcaggcataagcgtcagtctttgtcttcatccacttgataccgttaagacaatgattcagtcatgccgcttggaggagaagtctctatgcaatactgggagatcaattatatcagaaagaggtttttctggactttatcgagggattgctagcaacattgcctcatcagctcctatctctgccctctatacgttcacttatgaaaccgttaaaggaactctgcttcctctttttcctaaggaatattgctccctagcccactgcttagctggtggttctgcaagcattgcaacttcttttatcttcacgcctagtgagcgcataaaacagcagatgcaagtcagttcacattatcgcaattgctggaccgcattggttggaatcatccaaaagggtggtctgctttctttatatgctggatggactgcagtgctatgtagaaatatcccgcactcaatcattaagttctatgtctatgaaaacatgaagcaaatggtattaccatccccaggcccttgtggtgaaatggctcaacccacaacattacaaacgcttacctgtggaggactagcgggatctgctgctgctttcttcacaaccccatttgatgtagtaaaaacaagattacaaactcagattcccggatctagaaaccaacatcctagtgtctatcaaactcttcaatcaatacgaaggcaagaaggtctgagagggctatacagaggcttgatccccagactagtgatgtacatgtcgcaaggagctatattctttgcttcgtatgaattttacaagagcgtactctctctagcagcggcgcagcctaatacgtcagctctctctggcacaaaacaaaagatggagatagcc

SEQ ID NO: 84438 - protein, 377 aa, Arabidopsis thaliana
  peptide (1)..(377): Ceres Seq. ID no. 12675231
  misc_feature: Pfam Name: Mito_carr Pfam Description: Mitochondrial carrier protein
  misc_feature (1)..(242): Homolog of NCBI NO: 15233381 NR Description: mitochondrial carrier protein family; protein id: [Arabidopsis thaliana] >gi|7486119|pir||T10564 hypothetical
  misc_feature (329)..(376): Homolog of NCBI NO: 15233381 NR Description: mitochondrial carrier protein family; protein id: [Arabidopsis thaliana] >gi|7486119|pir||T10564 hypothetical
  misc_feature (84)..(373): Homolog of NCBI NO: 18420458 NR Description: mitochondrial carrier protein family; protein id: supported by cDNA: 32654., supported by cDNA: gi_15028274, by cDNA: gi_19310698 [Arabidopsis thaliana]
  misc_feature (84)..(356): Homolog of NCBI NO: 34394981 NR Description: mitochondrial aspartate-glutamate carrier
  misc_feature (84)..(365): Homolog of NCBI NO: 15222270 NR Description: mitochondrial carrier protein family; protein id: [Arabidopsis thaliana] >gi|22655236|gb|AAM98208.1| mitochondrial
  misc_feature (82)..(349): Homolog of NCBI NO: 34905862 NR Description: P0458E05.7 [Oryza sativa (japonica
  misc_feature (84)..(353): Homolog of NCBI NO: 15227718 NR Description: mitochondrial carrier protein family; protein id: supported by cDNA: 150522., supported by cDNA: gi_17381041, by cDNA: gi_20465858 [Arabidopsis thaliana]
  misc_feature (84)..(349): Homolog of NCBI NO: 31208625 NR Description: ENSANGP00000011068 [Anopheles gambiae]
  misc_feature (84)..(353): Homolog of NCBI NO: 21553549 NR Description: putative mitochondrial carrier protein
  misc_feature (84)..(375): Homolog of NCBI NO: 25406950 NR Description: hypothetical protein [imported] - Arabidopsis >gi|8954043|gb|AAF82217.1|AC067971_25 Strong similarity to a carrier protein from Ribes nigrum gb|AJ007580. It gene.
NYLFLLYKDRCVNNKGVNMISSKCSTDCDAEVSSSGNNLDEDCLSIVENKQLLEKDRNDKETEVCLSSPETTTYAFAKQRHAFAGALAGISVSLCLHPLDTVKTMIQSCRLEEKSLCNTGRSIISERGFSGLYRGIASNIASSAPISALYTFTYETVKGTLLPLFPKEYCSLAHCLAGGSASIATSFIFTPSERIKQQMQVSSHYRNCWTALVGIIQKGGLLSLYAGWTAVLCRNIPHSIIKFYVYENMKQMVLPSPGPCGEMAQPTTLQTLTCGGLAGSAAAFFTTPFDVVKTRLQTQIPGSRNQHPSVYQTLQSIRRQEGLRGLYRGLIPRLVMYMSQGAIFFASYEFYKSVLSLAAAQPNTSALSGTKQKMEIA

SEQ ID NO: 84439 - protein, 359 aa, Arabidopsis thaliana
  peptide (1)..(359): Ceres Seq. ID no. 12675232
  misc_feature: Pfam Name: Mito_carr Pfam Description: Mitochondrial carrier protein
  misc_feature (1)..(224): Homolog of NCBI NO: 15233381 NR Description: mitochondrial carrier protein family; protein id: [Arabidopsis thaliana] >gi|7486119|pir||T10564 hypothetical
  misc_feature (311)..(358): Homolog of NCBI NO: 15233381 NR Description: mitochondrial carrier protein family; protein id: [Arabidopsis thaliana] >gi|7486119|pir||T10564 hypothetical
  misc_feature (66)..(355): Homolog of NCBI NO: 18420458 NR Description: mitochondrial carrier protein family; protein id: supported by cDNA: 32654., supported by cDNA: gi_15028274, by cDNA: gi_19310698 [Arabidopsis thaliana]
  misc_feature (66)..(338): Homolog of NCBI NO: 34394981 NR Description: mitochondrial aspartate-glutamate carrier
  misc_feature (66)..(347): Homolog of NCBI NO: 15222270 NR Description: mitochondrial carrier protein family; protein id: [Arabidopsis thaliana] >gi|22655236|gb|AAM98208.1| mitochondrial
  misc_feature (64)..(331): Homolog of NCBI NO: 34905862 NR Description: P0458E05.7 [Oryza sativa (japonica
  misc_feature (66)..(335): Homolog of NCBI NO: 15227718 NR Description: mitochondrial carrier protein family; protein id: supported by cDNA: 150522., supported by cDNA: gi_17381041, by cDNA: gi_20465858 [Arabidopsis thaliana]
  misc_feature (66)..(331): Homolog of NCBI NO: 31208625 NR Description: ENSANGP00000011068 [Anopheles gambiae]
  misc_feature (66)..(335): Homolog of NCBI NO: 21553549 NR Description: putative mitochondrial carrier protein
  misc_feature (66)..(357): Homolog of NCBI NO: 25406950 NR Description: hypothetical protein [imported] - Arabidopsis >gi|8954043|gb|AAF82217.1|AC067971_25 Strong similarity to a carrier protein from Ribes nigrum gb|AJ007580. It gene.
MISSKCSTDCDAEVSSSGNNLDEDCLSIVENKQLLEKDRNDKETEVCLSSPETTTYAFAKQRHAFAGALAGISVSLCLHPLDTVKTMIQSCRLEEKSLCNTGRSIISERGFSGLYRGIASNIASSAPISALYTFTYETVKGTLLPLFPKEYCSLAHCLAGGSASIATSFIFTPSERIKQQMQVSSHYRNCWTALVGIIQKGGLLSLYAGWTAVLCRNIPHSIIKFYVYENMKQMVLPSPGPCGEMAQPTTLQTLTCGGLAGSAAAFFTTPFDVVKTRLQTQIPGSRNQHPSVYQTLQSIRRQEGLRGLYRGLIPRLVMYMSQGAIFFASYEFYKSVLSLAAAQPNTSALSGTKQKMEIA

SEQ ID NO: 84440 - protein, 273 aa, Arabidopsis thaliana
  peptide (1)..(273): Ceres Seq. ID no. 12675233
  misc_feature: Pfam Name: Mito_carr Pfam Description: Mitochondrial carrier protein
  misc_feature (1)..(138): Homolog of NCBI NO: 15233381 NR Description: mitochondrial carrier protein family; protein id: [Arabidopsis thaliana] >gi|7486119|pir||T10564 hypothetical
  misc_feature (225)..(272): Homolog of NCBI NO: 15233381 NR Description: mitochondrial carrier protein family; protein id: [Arabidopsis thaliana] >gi|7486119|pir||T10564 hypothetical
  misc_feature (1)..(269): Homolog of NCBI NO: 18420458 NR Description: mitochondrial carrier protein family; protein id: supported by cDNA: 32654., supported by cDNA: gi_15028274, by cDNA: gi_19310698 [Arabidopsis thaliana]
  misc_feature (1)..(252): Homolog of NCBI NO: 34394981 NR Description: mitochondrial aspartate-glutamate carrier
  misc_feature (1)..(261): Homolog of NCBI NO: 15222270 NR Description: mitochondrial carrier protein family; protein id: [Arabidopsis thaliana] >gi|22655236|gb|AAM98208.1| mitochondrial
  misc_feature (1)..(245): Homolog of NCBI NO: 34905862 NR Description: P0458E05.7 [Oryza sativa (japonica
  misc_feature (1)..(249): Homolog of NCBI NO: 15227718 NR Description: mitochondrial carrier protein family; protein id: supported by cDNA: 150522., supported by cDNA: gi_17381041, by cDNA: gi_20465858 [Arabidopsis thaliana]
  misc_feature (1)..(245): Homolog of NCBI NO: 31208625 NR Description: ENSANGP00000011068 [Anopheles gambiae]
  misc_feature (1)..(249): Homolog of NCBI NO: 21553549 NR Description: putative mitochondrial carrier protein
  misc_feature (1)..(271): Homolog of NCBI NO: 25406950 NR Description: hypothetical protein [imported] - Arabidopsis >gi|8954043|gb|AAF82217.1|AC067971_25 Strong similarity to a carrier protein from Ribes nigrum gb|AJ007580. It gene.
MIQSCRLEEKSLCNTGRSIISERGFSGLYRGIASNIASSAPISALYTFTYETVKGTLLPLFPKEYCSLAHCLAGGSASIATSFIFTPSERIKQQMQVSSHYRNCWTALVGIIQKGGLLSLYAGWTAVLCRNIPHSIIKFYVYENMKQMVLPSPGPCGEMAQPTTLQTLTCGGLAGSAAAFFTTPFDVVKTRLQTQIPGSRNQHPSVYQTLQSIRRQEGLRGLYRGLIPRLVMYMSQGAIFFASYEFYKSVLSLAAAQPNTSALSGTKQKMEIA

SEQ ID NO: 84441 - DNA, 2030 bp, Arabidopsis thaliana
  misc_feature (1)..(2030): Ceres Seq. ID no. 12675234
  misc_feature: MA Experiment ID: 20000171 Result: Up-regulated in Transcription
  misc_feature: MA Experiment 20000171 PARAMETER Experiment Name: At_42deg_Heat_P Parameter: Age (day) Value: 14
  misc_feature: MA Experiment 20000171 PARAMETER Experiment Name: At_42deg_Heat_P Parameter: Organism Value: A. thaliana
  misc_feature: MA Experiment 20000171 PARAMETER Experiment Name: At_42deg_Heat_P Parameter: Plant Line Value: WS
  misc_feature: MA Experiment 20000171 PARAMETER Experiment Name: At_42deg_Heat_P Parameter: Temperature (deg C) Value: 42 vs. 22
  misc_feature: MA Experiment 20000171 PARAMETER Experiment Name: At_42deg_Heat_P Parameter: Timepoint (hr) Value: 1
  misc_feature: MA Experiment 20000171 PARAMETER Experiment Name: At_42deg_Heat_P Parameter: Tissue Value: Aerial
  misc_feature: MA Experiment ID: 20000179 Result: Down-regulated in Transcription
  misc_feature: MA Experiment 20000179 PARAMETER Experiment Name: At_Germinating_Seeds_P Parameter: Age (hr) Value: 6 vs. 0
  misc_feature: MA Experiment 20000179 PARAMETER Experiment Name: At_Germinating_Seeds_P Parameter: Tissue Value: Germinating Seeds
  misc_feature: MA Experiment ID: 20000180 Result: Down-regulated in Transcription
  misc_feature: MA Experiment 20000180 PARAMETER Experiment Name: At_Germinating_Seeds_P Parameter: Age (hr) Value: 24 vs. 0
  misc_feature: MA Experiment 20000180 PARAMETER Experiment Name: At_Germinating_Seeds_P Parameter: Tissue Value: Germinating Seeds
  misc_feature: MA Experiment ID: 20000794 Result: Up-regulated in Transcription
  misc_feature: MA Experiment 20000794 PARAMETER Experiment Name: At_Petals_P Parameter: Age (day) Value: 23-25 days
  misc_feature: MA Experiment 20000794 PARAMETER Experiment Name: At_Petals_P Parameter: Plant Line Value: WS
  misc_feature: MA Experiment 20000794 PARAMETER Experiment Name: At_Petals_P Parameter: Tissue Value: Petals vs. Whole plant
attgcaattttcacataacaaatctttttctttccccttgctcactccaagtctccaagcccccaaattttttcacaatcaatcatttctttgttgcgaaccaaacttgtgatatggcgacaccgaatcaggaagcaatcgacactttcatcagcatcaccggcgcttctgacgccgtcgcccttcagaaactcgaggagcatcgtggtgatcttaatcaagcagtgaatgcatatttcagcgaaggagatcgaaatgtagtacgtgaagcgccggttaatgatgatgatgaaatggatatagatgatgtgattccggctccacaatctcctctctctatgttcaatgcagctagaacaattggccgtcctcccttttcgcttttggattcggactttgctagacgtgtatttgatagcgatcctcttatgccacgccctccgtttgttagtcatcctagagaggttaggcagatacctatagaggttaaggatagcagtgggccatctggacgatctagtgatgctcctactattgaagatgtgacagaaacagctcatgttcagggtccagtaactacccaaggaactgttattattgatgaagagagtgatgatgatattccttttgcaccaatgggacgaagtaggcaagacagacctgctggttctgtagccaataataataatcaagattacaatgatatagaagaagaaatgatcagagctgccattgaggcctcaaagaaagaggctgagggatcaagtaaccctttacttgaagagaggccacttcacatggaagatgatgatgacatagcaatagctgttacaatgtcattgaagtcagcggaggaagaagttttgcgcagtcaagggtataaggcctcaacctcggaaataggagcttctgcagtgactgctgctcaaggacctcaggatacccaggccctgaacggaagattggcagcacctagttcaccatttgatgatgactctgatgatgttgatgagcaacctcttgttagacacaggccaagacgtgcagcatccggatctctggctccacctaacgctgatcgttcccggagtgggagtcctgaagaagaacatgcaagtattaatccagcggagcgtggcagtgggtttccttctgagtggggaggcatttcatctgaggaacatgatgaagctgtcatgctcgaggcagccatgtttggtggcattcctgaaactggatataatcatcttccattcttacctcctcagccgagggcccaaccacgtccaccctcaccttcgctgacagctcagaggttgatacgggaacagcaggatgatgagtatgttgcgtccctgcaagctgaccgagataaagaaatgaagtccattagagatgctgaggcacgtcagctagaggaagaaactgcgagaaaggcttttctggaggaagaaaagaaaaaagaggaagaagctcaaagaaaactcgaggaggaacaggcttctgctagtggatagagaaagatcagccaaaacacctgcagctttattacatcagaaaaatgagctagaaagacaactagatgcaaaagaagcgtctttacctaaggagcctcaagctgatgaagagaatgccattacccttctaatccggatgccggatggaacacgtcggggccgccggttccttaaatctgacaaactccaaacccttttcaactttatagacattgccagagtggtgaaacccaacacttacagactggtgaggccatatccgaggcatgcgtttggagatggggaaagtgagtcgaccttaaacgatcttggattgaccagcaaacaagaagcattgttccttgagcttatctagttttaagctcttaaatatataagaagaattacatttgtcttctgcttagaaaactctttaattttcaagttattttttttatctttctttatacaaaagaaaaagtatttgttgagggtggaggattatatggtttataaaaccgtcgtcgtttagtc

SEQ ID NO: 84442 - protein, 504 aa, Arabidopsis thaliana
  peptide (1)..(504): Ceres Seq. ID no. 12675235
  misc_feature (98)..(499): Homolog of NCBI NO: 7487672 NR Description: hypothetical protein T5C23.170 - Arabidopsis >gi|4539465|emb|CAB39945.1| putative protein [Arabidopsis >gi|7267874|emb|CAB78217.1| putative protein [Arabidopsis
  misc_feature (38)..(504): Homolog of NCBI NO: 13160609 NR Description: Ara4-interacting protein [Arabidopsis thaliana]
  misc_feature (212)..(499): Homolog of NCBI NO: 18413644 NR Description: putative protein; protein id: At4g11740.1, by cDNA: gi_14596000, supported by cDNA: gi_17978734 [Arabidopsis >gi|14596001|gb|AAK68728.1| Unknown protein [Arabidopsis
  misc_feature (38)..(499): Homolog of NCBI NO: 7486575 NR Description: hypothetical protein F7H19.230 - Arabidopsis >gi|3292830|emb|CAA19820.1| putative protein [Arabidopsis >gi|7269151|emb|CAB79259.1| putative protein [Arabidopsis
  misc_feature (38)..(501): Homolog of NCBI NO: 18416058 NR Description: putative protein; protein id: At4g23040.1, by cDNA: gi_13430703 [Arabidopsis thaliana] unknown protein [Arabidopsis thaliana]
  misc_feature (38)..(415): Homolog of NCBI NO: 30678726 NR Description: expressed protein [Arabidopsis thaliana]
  misc_feature (38)..(282): Homolog of NCBI NO: 4325337 NR Description: F15P23.3 gene product [Arabidopsis thaliana]
  misc_feature (440)..(496): Homolog of NCBI NO: 17137596 NR Description: Fas-associated factor CG10372-PA [Drosophila
  misc_feature (440)..(496): Homolog of NCBI NO: 3688609 NR Description: Fly Fas-associated factor (FFAF) [Drosophila
CNFHITNLFLSPCSLQVSKPPNFFTINHFFVANQTCDMATPNQEAIDTFISITGASDAVALQKLEEHRGDLNQAVNAYFSEGDRNVVREAPVNDDDEMDIDDVIPAPQSPLSMFNAARTIGRPPFSLLDSDFARRVFDSDPLMPRPPFVSHPREVRQIPIEVKDSSGPSGRSSDAPTIEDVTETAHVQGPVTTQGTVIIDEESDDDIPFAPMGRSRQDRPAGSVANNNNQDYNDIEEEMIRAAIEASKKEAEGSSNPLLEERPLHMEDDDDIAIAVTMSLKSAEEEVLRSQGYKASTSEIGASAVTAAQGPQDTQALNGRLAAPSSPFDDDSDDVDEQPLVRHRPRRAASGSLAPPNADRSRSGSPEEEHASINPAERGSGFPSEWGGISSEEHDEAVMLEAAMFGGIPETGYNHLPFLPPQPRAQPRPPSPSLTAQRLIREQQDDEYVASLQADRDKEMKSIRDAEARQLEEETARKAFLEEEKKKEEEAQRKLEEEQASASG

SEQ ID NO: 84443 - protein, 467 aa, Arabidopsis thaliana
  peptide (1)..(467): Ceres Seq. ID no. 12675236
  misc_feature (61)..(462): Homolog of NCBI NO: 7487672 NR Description: hypothetical protein T5C23.170 - Arabidopsis >gi|4539465|emb|CAB39945.1| putative protein [Arabidopsis >gi|7267874|emb|CAB78217.1| putative protein [Arabidopsis
  misc_feature (1)..(467): Homolog of NCBI NO: 13160609 NR Description: Ara4-interacting protein [Arabidopsis thaliana]
  misc_feature (175)..(462): Homolog of NCBI NO: 18413644 NR Description: putative protein; protein id: At4g11740.1, by cDNA: gi_14596000, supported by cDNA: gi_17978734 [Arabidopsis >gi|14596001|gb|AAK68728.1| Unknown protein [Arabidopsis
  misc_feature (1)..(462): Homolog of NCBI NO: 7486575 NR Description: hypothetical protein F7H19.230 - Arabidopsis >gi|3292830|emb|CAA19820.1| putative protein [Arabidopsis >gi|7269151|emb|CAB79259.1| putative protein [Arabidopsis
  misc_feature (1)..(464): Homolog of NCBI NO: 18416058 NR Description: putative protein; protein id: At4g23040.1, by cDNA: gi_13430703 [Arabidopsis thaliana] unknown protein [Arabidopsis thaliana]
  misc_feature (1)..(378): Homolog of NCBI NO: 30678726 NR Description: expressed protein [Arabidopsis thaliana]
  misc_feature (1)..(245): Homolog of NCBI NO: 4325337 NR Description: F15P23.3 gene product [Arabidopsis thaliana]
  misc_feature (403)..(459): Homolog of NCBI NO: 17137596 NR Description: Fas-associated factor CG10372-PA [Drosophila
  misc_feature (403)..(459): Homolog of NCBI NO: 3688609 NR Description: Fly Fas-associated factor (FFAF) [Drosophila
MATPNQEAIDTFISITGASDAVALQKLEEHRGDLNQAVNAYFSEGDRNVVREAPVNDDDEMDIDDVIPAPQSPLSMFNAARTIGRPPFSLLDSDFARRVFDSDPLMPRPPFVSHPREVRQIPIEVKDSSGPSGRSSDAPTIEDVTETAHVQGPVTTQGTVIIDEESDDDIPFAPMGRSRQDRPAGSVANNNNQDYNDIEEEMIRAAIEASKKEAEGSSNPLLEERPLHMEDDDDIAIAVTMSLKSAEEEVLRSQGYKASTSEIGASAVTAAQGPQDTQALNGRLAAPSSPFDDDSDDVDEQPLVRHRPRRAASGSLAPPNADRSRSGSPEEEHASINPAERGSGFPSEWGGISSEEHDEAVMLEAAMFGGIPETGYNHLPFLPPQPRAQPRPPSPSLTAQRLIREQQDDEYVASLQADRDKEMKSIRDAEARQLEEETARKAFLEEEKKKEEEAQRKLEEEQASASG

SEQ ID NO: 84444 - protein, 407 aa, Arabidopsis thaliana
  peptide (1)..(407): Ceres Seq. ID no. 12675237
  misc_feature (1)..(402): Homolog of NCBI NO: 7487672 NR Description: hypothetical protein T5C23.170 - Arabidopsis >gi|4539465|emb|CAB39945.1| putative protein [Arabidopsis >gi|7267874|emb|CAB78217.1| putative protein [Arabidopsis
  misc_feature (1)..(407): Homolog of NCBI NO: 13160609 NR Description: Ara4-interacting protein [Arabidopsis thaliana]
  misc_feature (115)..(402): Homolog of NCBI NO: 18413644 NR Description: putative protein; protein id: At4g11740.1, by cDNA: gi_14596000, supported by cDNA: gi_17978734 [Arabidopsis >gi|14596001|gb|AAK68728.1| Unknown protein [Arabidopsis
  misc_feature (1)..(402): Homolog of NCBI NO: 7486575 NR Description: hypothetical protein F7H19.230 - Arabidopsis >gi|3292830|emb|CAA19820.1| putative protein [Arabidopsis >gi|7269151|emb|CAB79259.1| putative protein [Arabidopsis
  misc_feature (1)..(404): Homolog of NCBI NO: 18416058 NR Description: putative protein; protein id: At4g23040.1, by cDNA: gi_13430703 [Arabidopsis thaliana] unknown protein [Arabidopsis thaliana]
  misc_feature (1)..(318): Homolog of NCBI NO: 30678726 NR Description: expressed protein [Arabidopsis thaliana]
  misc_feature (1)..(185): Homolog of NCBI NO: 4325337 NR Description: F15P23.3 gene product [Arabidopsis thaliana]
  misc_feature (343)..(399): Homolog of NCBI NO: 17137596 NR Description: Fas-associated factor CG10372-PA [Drosophila
  misc_feature (343)..(399): Homolog of NCBI NO: 3688609 NR Description: Fly Fas-associated factor (FFAF) [Drosophila
MDIDDVIPAPQSPLSMFNAARTIGRPPFSLLDSDFARRVFDSDPLMPRPPFVSHPREVRQIPIEVKDSSGPSGRSSDAPTIEDVTETAHVQGPVTTQGTVIIDEESDDDIPFAPMGRSRQDRPAGSVANNNNQDYNDIEEEMIRAAIEASKKEAEGSSNPLLEERPLHMEDDDDIAIAVTMSLKSAEEEVLRSQGYKASTSEIGASAVTAAQGPQDTQALNGRLAAPSSPFDDDSDDVDEQPLVRHRPRRAASGSLAPPNADRSRSGSPEEEHASINPAERGSGFPSEWGGISSEEHDEAVMLEAAMFGGIPETGYNHLPFLPPQPRAQPRPPSPSLTAQRLIREQQDDEYVASLQADRDKEMKSIRDAEARQLEEETARKAFLEEEKKKEEEAQRKLEEEQASASG

SEQ ID NO: 84445 - DNA, 2401 bp, Arabidopsis thaliana
  misc_feature (1)..(2401): Ceres Seq. ID no. 12675246
  misc_feature: MA Experiment ID: 20000179 Result: Down-regulated in Transcription
  misc_feature: MA Experiment 20000179 PARAMETER Experiment Name: At_Germinating_Seeds_P Parameter: Age (hr) Value: 6 vs. 0
  misc_feature: MA Experiment 20000179 PARAMETER Experiment Name: At_Germinating_Seeds_P Parameter: Tissue Value: Germinating Seeds
  misc_feature: MA Experiment ID: 20000180 Result: Down-regulated in Transcription
  misc_feature: MA Experiment 20000180 PARAMETER Experiment Name: At_Germinating_Seeds_P Parameter: Age (hr) Value: 24 vs. 0
  misc_feature: MA Experiment 20000180 PARAMETER Experiment Name: At_Germinating_Seeds_P Parameter: Tissue Value: Germinating Seeds
  misc_feature: MA Experiment ID: 20000182 Result: Up-regulated in Transcription
  misc_feature: MA Experiment 20000182 PARAMETER Experiment Name: At_2mM_SA_P Parameter: Age (day) Value: 14
  misc_feature: MA Experiment 20000182 PARAMETER Experiment Name: At_2mM_SA_P Parameter: Organism Value: A. thaliana
  misc_feature: MA Experiment 20000182 PARAMETER Experiment Name: At_2mM_SA_P Parameter: Plant Line Value: WS
  misc_feature: MA Experiment 20000182 PARAMETER Experiment Name: At_2mM_SA_P Parameter: Timepoint (hr) Value: 6
  misc_feature: MA Experiment 20000182 PARAMETER Experiment Name: At_2mM_SA_P Parameter: Tissue Value: Aerial
  misc_feature: MA Experiment 20000182 PARAMETER Experiment Name: At_2mM_SA_P Parameter: Treatment Value: 2mM SA vs. No Treatment
  misc_feature: MA Experiment ID: 20000437 Result: Up-regulated in Transcription
  misc_feature: MA Experiment 20000437 PARAMETER Experiment Name: At_Drought_P Parameter: Age (day) Value: 8
  misc_feature: MA Experiment 20000437 PARAMETER Experiment Name: At_Drought_P Parameter: Organism Value: A. thaliana
  misc_feature: MA Experiment 20000437 PARAMETER Experiment Name: At_Drought_P Parameter: Plant Line Value: WS
  misc_feature: MA Experiment 20000437 PARAMETER Experiment Name: At_Drought_P Parameter: Timepoint (hr) Value: 24
  misc_feature: MA Experiment 20000437 PARAMETER Experiment Name: At_Drought_P Parameter: Tissue Value: Whole Plant
  misc_feature: MA Experiment 20000437 PARAMETER Experiment Name: At_Drought_P Parameter: Treatment Value: Drought vs. No Drought
  misc_feature: MA Experiment ID: 20000495 Result: Up-regulated in Transcription
  misc_feature: MA Experiment 20000495 PARAMETER Experiment Name: At_Guard_Cells_P Parameter: Harvest Date Value: 8/2/2002
  misc_feature: MA Experiment 20000495 PARAMETER Experiment Name: At_Guard_Cells_P Parameter: Organism Value: A. thaliana
  misc_feature: MA Experiment 20000495 PARAMETER Experiment Name: At_Guard_Cells_P Parameter: Tissue Value: Guard Cells vs. Leaves
  misc_feature: MA Experiment ID: 20001905 Result: Up-regulated in Transcription
  misc_feature: MA Experiment 20001905 PARAMETER Experiment Name: At_Drought_Reproduction_P Parameter: Age (day) Value: 40
  misc_feature: MA Experiment 20001905 PARAMETER Experiment Name: At_Drought_Reproduction_P Parameter: Organism Value: A. thaliana
  misc_feature: MA Experiment 20001905 PARAMETER Experiment Name: At_Drought_Reproduction_P Parameter: Plant Line Value: WS
  misc_feature: MA Experiment 20001905 PARAMETER Experiment Name: At_Drought_Reproduction_P Parameter: Timepoint (day) Value: 10
  misc_feature: MA Experiment 20001905 PARAMETER Experiment Name: At_Drought_Reproduction_P Parameter: Tissue Value: Rosettes
  misc_feature: MA Experiment 20001905 PARAMETER Experiment Name: At_Drought_Reproduction_P Parameter: Treatment Value: Drought vs. No Drought
  misc_feature: MA Experiment ID: 20001911 Result: Up-regulated in Transcription
  misc_feature: MA Experiment 20001911 PARAMETER Experiment Name: At_Drought_Reproduction_P Parameter: Age (day) Value: 40
  misc_feature: MA Experiment 20001911 PARAMETER Experiment Name: At_Drought_Reproduction_P Parameter: Organism Value: A. thaliana
  misc_feature: MA Experiment 20001911 PARAMETER Experiment Name: At_Drought_Reproduction_P Parameter: Plant Line Value: WS
  misc_feature: MA Experiment 20001911 PARAMETER Experiment Name: At_Drought_Reproduction_P Parameter: Timepoint (day) Value: 10
  misc_feature: MA Experiment 20001911 PARAMETER Experiment Name: At_Drought_Reproduction_P Parameter: Tissue Value: Flowers
  misc_feature: MA Experiment 20001911 PARAMETER Experiment Name: At_Drought_Reproduction_P Parameter: Treatment Value: Drought vs. No Drought
acacgtctgagaaaacaactcattcaaagtttgaaaactcatgggctcgctggagccgacccaggaacggcaaaaatctagaagcgccaagttttcttcaactctttaacgtcgttgttgtcttcgtcaccaagtaaaccctagatccacaatttcaacggaaatttcattcttcttcttcttcctcgcgaatctgtttttttttttgatattcgattctactttccctttccatcaaaaaacatttcgtcgacgatttcacgcgatgtccttctccgattctggatcgtcctcttatggcggagagtacaagaatttcagacaaatcaccagagaaagattactttgtgaaatgcttaggccagaaagaaatggaagctctaaattaacttggaaggtacttgtaatggacaagttcactgtgaagataatgtcatctgcttgcaaaatgtctgagatcacacaagaaggcatttctttggttgaggttataactaaacataggcaacctatgacagcaatggaagtcatatactttattcaaccgaccgaagagaatgtcactgcgtttttatcagatatgactggaaaatcaccactttacaagaaggcttttgttttctttagttctcctgtttcgagaagcttagttaatctcattaagaaggacatgagagcaatgaaacgaattgggggattgaaagagatgaacttggagtatattagcatggacatccagggctttgttacaaataatgaaaatgctttagaagagcttttctgtgacgacgaaaaccatcaaagagcagatgcttgcttaaatgtggtagctaaaagaattgctacagttttggcctcactaaaggaatatccctttgttcgctaccgcggagccaaagctcttgatgccacaacaatgacaacttaccgagagttgattcctacaaagcttgctgctagtgtatggaattgtcttgcaagatacaaacagacaatcgaagattttcctcagactgaaacatgcgaactacttatcttggatcgatccatagaccagatcgcacctctcattcatgagtggacatatgatgcgatgtgccacgatttgcttaatatggaaggaaataaatacacacacgagtgtataggttccgagtaaaactggtgataaacctgagaagaaagaggttcttctagatgaggaagattccatttgggtggagcttcgtgatgctcatattgcagatgcaagtgaaagattgcatgaaaagatgacaaacttcgtgtcgaagaacaaagctgcgcaattgaaacacagttcaaaagactttggtgacctttcatcaaaagacttgcagaagatggttcacgctttgcctcagtacagtgagcaaattgacaagctttctctacatgttgagatcgctagaacaataaacagaactatcatggaacaaggtctaagagatctcgggcagctcgagcaggaccttgtttttggggatgctggaagaaaggacgttatcaaatttctgagcaccaaccatattataagccacgaaagcaagctgaggttaattatgattgttgctgcaatatatccgaagaagttcgaaggtgaaaagggacgtaagatgatggagctagcaaaattgtcgggcgatgatgtagtagctgtgaacaatatgagattacttggaccagtacatacggagtgcaaaaagagcacaacaggatcttttcctctcaagtttgatgtccttaagacgaagcgagctgctcgaagagaccgagttggtgaaactcaaacatggcaactgtctcgtttttacccgattgttgaggaacttgttgagaaacttagcaaaggtcatttgccaaaacaagattacccttgtatgaatgaaccaaagccaaccttttattctggctctctgtctccatcagcgagtccggtattgcctcattcaagacgaacaccaacatgggcaagacgccatctttctgatgatggatatttcagtgactcggttctaggacgagcatctagtgggttcaagagaaagggacagcggattttcgtgttcatagtaggaggagcaacgagatcagagttaagggtttgccacaaacttacggagaagctcgacagagaagtgatcttaggctcctccagcttccttgatcccctaactttcctcactaaaatgaaacaactaaacgaagaagaggagatctcacttgatgatattgtcatttgattagcaacttggtatcgaattttgttttggtaataaaatgatgggacggacatatgttccctatgtaaataaatacaatttatttgttcctttggtttgactaactaacggggttgctttatttaattgaatacttcatg

SEQ ID NO: 84446 - protein, 329 aa, Arabidopsis thaliana
  peptide (1)..(329): Ceres Seq. ID no. 12675247
  misc_feature (1)..(311): Homolog of NCBI NO: 7485573 NR Description: hypothetical protein F16J13.190 - Arabidopsis >gi|4586117|emb|CAB40953.1| putative protein [Arabidopsis >gi|7267913|emb|CAB78255.1| putative protein [Arabidopsis
  misc_feature (1)..(329): Homolog of NCBI NO: 18391384 NR Description: expressed protein; protein id: At1g12360.1,
  misc_feature (1)..(329): Homolog of NCBI NO: 28201820 NR Description: SNARE-interacting protein KEULE
  misc_feature (1)..(283): Homolog of NCBI NO: 25402721 NR Description: protein F5O11.8 [imported] - Arabidopsis thaliana
  misc_feature (268)..(329): Homolog of NCBI NO: 25402721 NR Description: protein F5O11.8 [imported] - Arabidopsis thaliana
  misc_feature (1)..(329): Homolog of NCBI NO: 38345989 NR Description: OSJNBa0032B23.7 [Oryza sativa (japonica
  misc_feature (1)..(320): Homolog of NCBI NO: 18378910 NR Description: hypothetical protein; protein id: At1g02010.1
  misc_feature (1)..(311): Homolog of NCBI NO: 13195580 NR Description: AtSec1a [Arabidopsis thaliana]
  misc_feature (1)..(311): Homolog of NCBI NO: 28201892 NR Description: Protein transport Sec1a (AtSec1a)
  misc_feature (1)..(208): Homolog of NCBI NO: 480359 NR Description: probable acetylcholine regulator unc-18 - elegans >gi|247392|gb|AAB21818.1| putative acetylcholine
MTNFVSKNKAAQLKHSSKDFGDLSSKDLQKMVHALPQYSEQIDKLSLHVEIARTINRTIMEQGLRDLGQLEQDLVFGDAGRKDVIKFLSTNHIISHESKLRLIMIVAAIYPKKFEGEKGRKMMELAKLSGDDVVAVNNMRLLGPVHTECKKSTTGSFPLKFDVLKTKRAARRDRVGETQTWQLSRFYPIVEELVEKLSKGHLPKQDYPCMNEPKPTFYSGSLSPSASPVLPHSRRTPTWARRHLSDDGYFSDSVLGRASSGFKRKGQRIFVFIVGGATRSELRVCHKLTEKLDREVILGSSSFLDPLTFLTKMKQLNEEEEISLDDIVI

SEQ ID NO: 84447 - protein, 299 aa, Arabidopsis thaliana
  peptide (1)..(299): Ceres Seq. ID no. 12675248
  misc_feature (1)..(281): Homolog of NCBI NO: 7485573 NR Description: hypothetical protein F16J13.190 - Arabidopsis >gi|4586117|emb|CAB40953.1| putative protein [Arabidopsis >gi|7267913|emb|CAB78255.1| putative protein [Arabidopsis
  misc_feature (1)..(299): Homolog of NCBI NO: 18391384 NR Description: expressed protein; protein id: At1g12360.1,
  misc_feature (1)..(299): Homolog of NCBI NO: 28201820 NR Description: SNARE-interacting protein KEULE
  misc_feature (1)..(253): Homolog of NCBI NO: 25402721 NR Description: protein F5O11.8 [imported] - Arabidopsis thaliana
  misc_feature (238)..(299): Homolog of NCBI NO: 25402721 NR Description: protein F5O11.8 [imported] - Arabidopsis thaliana
  misc_feature (1)..(299): Homolog of NCBI NO: 38345989 NR Description: OSJNBa0032B23.7 [Oryza sativa (japonica
  misc_feature (1)..(290): Homolog of NCBI NO: 18378910 NR Description: hypothetical protein; protein id: At1g02010.1
  misc_feature (1)..(281): Homolog of NCBI NO: 13195580 NR Description: AtSec1a [Arabidopsis thaliana]
  misc_feature (1)..(281): Homolog of NCBI NO: 28201892 NR Description: Protein transport Sec1a (AtSec1a)
  misc_feature (1)..(178): Homolog of NCBI NO: 480359 NR Description: probable acetylcholine regulator unc-18 - elegans >gi|247392|gb|AAB21818.1| putative acetylcholine
MVHALPQYSEQIDKLSLHVEIARTINRTIMEQGLRDLGQLEQDLVFGDAGRKDVIKFLSTNHIISHESKLRLIMIVAAIYPKKFEGEKGRKMMELAKLSGDDVVAVNNMRLLGPVHTECKKSTTGSFPLKFDVLKTKRAARRDRVGETQTWQLSRFYPIVEELVEKLSKGHLPKQDYPCMNEPKPTFYSGSLSPSASPVLPHSRRTPTWARRHLSDDGYFSDSVLGRASSGFKRKGQRIFVFIVGGATRSELRVCHKLTEKLDREVILGSSSFLDPLTFLTKMKQLNEEEEISLDDIVI

SEQ ID NO: 84448 - protein, 297 aa, Arabidopsis thaliana
  peptide (1)..(297): Ceres Seq. ID no. 12675249
  misc_feature (32)..(292): Homolog of NCBI NO: 7485573 NR Description: hypothetical protein F16J13.190 - Arabidopsis >gi|4586117|emb|CAB40953.1| putative protein [Arabidopsis >gi|7267913|emb|CAB78255.1| putative protein [Arabidopsis
  misc_feature (1)..(291): Homolog of NCBI NO: 18391384 NR Description: expressed protein; protein id: At1g12360.1,
  misc_feature (1)..(291): Homolog of NCBI NO: 28201820 NR Description: SNARE-interacting protein KEULE
  misc_feature (35)..(291): Homolog of NCBI NO: 25402721 NR Description: protein F5O11.8 [imported] - Arabidopsis thaliana
  misc_feature (1)..(25): Homolog of NCBI NO: 25402721 NR Description: protein F5O11.8 [imported] - Arabidopsis thaliana
  misc_feature (1)..(292): Homolog of NCBI NO: 38345989 NR Description: OSJNBa0032B23.7 [Oryza sativa (japonica
  misc_feature (1)..(292): Homolog of NCBI NO: 18378910 NR Description: hypothetical protein; protein id: At1g02010.1
  misc_feature (158)..(292): Homolog of NCBI NO: 13195580 NR Description: AtSec1a [Arabidopsis thaliana]
  misc_feature (158)..(292): Homolog of NCBI NO: 28201892 NR Description: Protein transport Sec1a (AtSec1a)
  misc_feature (1)..(91): Homolog of NCBI NO: 13195580 NR Description: AtSec1a [Arabidopsis thaliana]
MSFSDSGSSSYGGEYKNFRQITRERLLCEMLRPERNGSSKLTWKVLVMDKFTVKIMSSACKMSEITQEGISLVEVITKHRQPMTAMEVIYFIQPTEENVTAFLSDMTGKSPLYKKAFVFFSSPVSRSLVNLIKKDMRAMKRIGGLKEMNLEYISMDIQGFVTNNENALEELFCDDENHQRADACLNVVAKRIATVLASLKEYPFVRYRGAKALDATTMTTYRELIPTKLAASVWNCLARYKQTIEDFPQTETCELLILDRSIDQIAPLIHEWTYDAMCHDLLNMEGNKYTHECIGSE

SEQ ID NO: 84449 - DNA, 687 bp, Arabidopsis thaliana
  misc_feature (1)..(687): Ceres Seq. ID no. 12675253
  misc_feature: MA Experiment ID: 108433 Result: Up-regulated in Transcription
  misc_feature: MA Experiment 108433 PARAMETER Experiment Name: At_rhl_Mutant2_cDNA_P Parameter: Age (day) Value: 7
  misc_feature: MA Experiment 108433 PARAMETER Experiment Name: At_rhl_Mutant2_cDNA_P Parameter: Organism Value: A. thaliana
  misc_feature: MA Experiment 108433 PARAMETER Experiment Name: At_rhl_Mutant2_cDNA_P Parameter: Plant Line Value: rhl Mutant vs. wt landsburg
  misc_feature: MA Experiment 108433 PARAMETER Experiment Name: At_rhl_Mutant2_cDNA_P Parameter: Tissue Value: Roots
  misc_feature: MA Experiment ID: 108434 Result: Down-regulated in Transcription
  misc_feature: MA Experiment 108434 PARAMETER Experiment Name: At_Root_Tips_cDNA_P Parameter: Tissue Value: Root Tips
  misc_feature: MA Experiment ID: 108464 Result: Up-regulated in Transcription
  misc_feature: MA Experiment 108464 PARAMETER Experiment Name: At_Germinating_Seeds_cDNA_P Parameter: Age (day) Value: 4 vs. 0
  misc_feature: MA Experiment 108464 PARAMETER Experiment Name: At_Germinating_Seeds_cDNA_P Parameter: Tissue Value: Germinating Seeds
  misc_feature: MA Experiment ID: 108561 Result: Down-regulated in Transcription
  misc_feature: MA Experiment 108561 PARAMETER Experiment Name: At_100uM_ABA_cDNA_P Parameter: Timepoint (hr) Value: 6
  misc_feature: MA Experiment 108561 PARAMETER Experiment Name: At_100uM_ABA_cDNA_P Parameter: Tissue Value: Aerial
  misc_feature: MA Experiment 108561 PARAMETER Experiment Name: At_100uM_ABA_cDNA_P Parameter: Treatment Value: 100uM ABA vs. No Treatment
  misc_feature: MA Experiment ID: 108577 Result: Up-regulated in Transcription
  misc_feature: MA Experiment 108577 PARAMETER Experiment Name: At_42deg_Heat_cDNA_P Parameter: Temperature (deg C) Value: 42 vs. 22
  misc_feature: MA Experiment 108577 PARAMETER Experiment Name: At_42deg_Heat_cDNA_P Parameter: Timepoint (hr) Value: 6
  misc_feature: MA Experiment 108577 PARAMETER Experiment Name: At_42deg_Heat_cDNA_P Parameter: Tissue Value: Aerial
  misc_feature: MA Experiment ID: 108594 Result: Down-regulated in Transcription
  misc_feature: MA Experiment 108594 PARAMETER Experiment Name: At_Ler-rhl_Root_cDNA_P Parameter: Plant Line Value: null
  misc_feature: MA Experiment ID: 20000113 Result: Up-regulated in Transcription
  misc_feature: MA Experiment 20000113 PARAMETER Experiment Name: At_42deg_Heat_cDNA_P Parameter: Temperature (deg C) Value: 42 vs. 22
  misc_feature: MA Experiment 20000113 PARAMETER Experiment Name: At_42deg_Heat_cDNA_P Parameter: Timepoint (hr) Value: 8
  misc_feature: MA Experiment 20000113 PARAMETER Experiment Name: At_42deg_Heat_cDNA_P Parameter: Tissue Value: Aerial
  misc_feature: MA Experiment ID: 20000184 Result: Up-regulated in Transcription
  misc_feature: MA Experiment 20000184 PARAMETER Experiment Name: At_Shoots__P Parameter: Age (day) Value: 7
  misc_feature: MA Experiment 20000184 PARAMETER Experiment Name: At_Shoots__P Parameter: Tissue Value: Shoots vs. Whole Plant
  misc_feature: MA Experiment ID: 20000185 Result: Up-regulated in Transcription
  misc_feature: MA Experiment 20000185 PARAMETER Experiment Name: At_Roots__P Parameter: Age (day) Value: 7 vs. 21
  misc_feature: MA Experiment 20000185 PARAMETER Experiment Name: At_Roots__P Parameter: Organism Value: A. thaliana
  misc_feature: MA Experiment 20000185 PARAMETER Experiment Name: At_Roots__P Parameter: Tissue Value: Roots vs. Whole Plant
  misc_feature: MA Experiment ID: 20000227 Result: Down-regulated in Transcription
  misc_feature: MA Experiment 20000227 PARAMETER Experiment Name: At_Root-Tips-vs-Tops_P Parameter: Tissue Value: Root Tips vs. Root Tops
  misc_feature: MA Experiment ID: 20000437 Result: Down-regulated in Transcription
  misc_feature: MA Experiment 20000437 PARAMETER Experiment Name: At_Drought_P Parameter: Age (day) Value: 8
  misc_feature: MA Experiment 20000437 PARAMETER Experiment Name: At_Drought_P Parameter: Organism Value: A. thaliana
  misc_feature: MA Experiment 20000437 PARAMETER Experiment Name: At_Drought_P Parameter: Plant Line Value: WS
  misc_feature: MA Experiment 20000437 PARAMETER Experiment Name: At_Drought_P Parameter: Timepoint (hr) Value: 24
  misc_feature: MA Experiment 20000437 PARAMETER Experiment Name: At_Drought_P Parameter: Tissue Value: Whole Plant
  misc_feature: MA Experiment 20000437 PARAMETER Experiment Name: At_Drought_P Parameter: Treatment Value: Drought vs. No Drought
  misc_feature: MA Experiment ID: 20000439 Result: Up-regulated in Transcription
  misc_feature: MA Experiment 20000439 PARAMETER Experiment Name: At_Roots__P Parameter: Age (day) Value: 14 vs. 21
  misc_feature: MA Experiment 20000439 PARAMETER Experiment Name: At_Roots__P Parameter: Organism Value: A. thaliana
  misc_feature: MA Experiment 20000439 PARAMETER Experiment Name: At_Roots__P Parameter: Tissue Value: Roots vs. Whole Plant
  misc_feature: MA Experiment ID: 20000460 Result: Down-regulated in Transcription
  misc_feature: MA Experiment 20000460 PARAMETER Experiment Name: At_10percent_PEG_P Parameter: Age (day) Value: 12
  misc_feature: MA Experiment 20000460 PARAMETER Experiment Name: At_10percent_PEG_P Parameter: Organism Value: A. thaliana
  misc_feature: MA Experiment 20000460 PARAMETER Experiment Name: At_10percent_PEG_P Parameter: Plant Line Value: WS
  misc_feature: MA Experiment 20000460 PARAMETER Experiment Name: At_10percent_PEG_P Parameter: Timepoint (day) Value: 12
  misc_feature: MA Experiment 20000460 PARAMETER Experiment Name: At_10percent_PEG_P Parameter: Tissue Value: Whole Plant
  misc_feature: MA Experiment 20000460 PARAMETER Experiment Name: At_10percent_PEG_P Parameter: Treatment Value: 10percent PEG vs. No Treatment
  misc_feature: MA Experiment ID: 20000574 Result: Down-regulated in Transcription
  misc_feature: MA Experiment 20000574 PARAMETER Experiment Name: At_100uM_ABA_Mutants__P Parameter: Organism Value: A. thaliana
  misc_feature: MA Experiment 20000574 PARAMETER Experiment Name: At_100uM_ABA_Mutants__P Parameter: Plant Line Value: CS23 vs. Ler wt
  misc_feature: MA Experiment 20000574 PARAMETER Experiment Name: At_100uM_ABA_Mutants__P Parameter: Timepoint (hr) Value: N/A
  misc_feature: MA Experiment 20000574 PARAMETER Experiment Name: At_100uM_ABA_Mutants__P Parameter: Tissue Value: Whole Plant
  misc_feature: MA Experiment 20000574 PARAMETER Experiment Name: At_100uM_ABA_Mutants__P Parameter: Treatment Value: None
  misc_feature: MA Experiment ID: 20000575 Result: Down-regulated in Transcription
  misc_feature: MA Experiment 20000575 PARAMETER Experiment Name: At_100uM_ABA_Mutants__P Parameter: Organism Value: A. thaliana
  misc_feature: MA Experiment 20000575 PARAMETER Experiment Name: At_100uM_ABA_Mutants__P Parameter: Plant Line Value: CS22
  misc_feature: MA Experiment 20000575 PARAMETER Experiment Name: At_100uM_ABA_Mutants__P Parameter: Timepoint (hr) Value: 6
  misc_feature: MA Experiment 20000575 PARAMETER Experiment Name: At_100uM_ABA_Mutants__P Parameter: Tissue Value: Whole Plant
  misc_feature: MA Experiment 20000575 PARAMETER Experiment Name: At_100uM_ABA_Mutants__P Parameter: Treatment Value: 1uM ABA vs. No Treatment
  misc_feature: MA Experiment ID: 20000576 Result: Down-regulated in Transcription
  misc_feature: MA Experiment 20000576 PARAMETER Experiment Name: At_100uM_ABA_Mutants__P Parameter: Organism Value: A. thaliana
  misc_feature: MA Experiment 20000576 PARAMETER Experiment Name: At_100uM_ABA_Mutants__P Parameter: Plant Line Value: CS23
  misc_feature: MA Experiment 20000576 PARAMETER Experiment Name: At_100uM_ABA_Mutants__P Parameter: Timepoint (hr) Value: 6
  misc_feature: MA Experiment 20000576 PARAMETER Experiment Name: At_100uM_ABA_Mutants__P Parameter: Tissue Value: Whole Plant
  misc_feature: MA Experiment 20000576 PARAMETER Experiment Name: At_100uM_ABA_Mutants__P Parameter: Treatment Value: 1uM ABA vs. No Treatment
  misc_feature: MA Experiment ID: 20001451 Result: Up-regulated in Transcription
  misc_feature: MA Experiment 20001451 PARAMETER Experiment Name: At_Far-red-induction_P Parameter: Age (day) Value: 7
  misc_feature: MA Experiment 20001451 PARAMETER Experiment Name: At_Far-red-induction_P Parameter: Light Value: Far-red vs. White
  misc_feature: MA Experiment 20001451 PARAMETER Experiment Name: At_Far-red-induction_P Parameter: Organism Value: A. thaliana
  misc_feature: MA Experiment 20001451 PARAMETER Experiment Name: At_Far-red-induction_P Parameter: Plant Line Value: Columbia
  misc_feature: MA Experiment 20001451 PARAMETER Experiment Name: At_Far-red-induction_P Parameter: Timepoint (hr) Value: 24
  misc_feature: MA Experiment 20001451 PARAMETER Experiment Name: At_Far-red-induction_P Parameter: Tissue Value: Whole Plant
accaatctcaaagcaaattaaatacactactacttcttgagcttttaaactacacaaacaaatggctccaagaaccccccttgcactcttcgtttctctcaacctcctcttcttcacttacacctctgcaaccacagggacttgtcctaaaaattccatagagatcggtacttgtgtcactgtgctcaatctagtggacctaacattgggaaacccacctgtaaagccatgttgctcgctcatccaaggcttggctgaccttgaggccgcggtctgcctttgcactgcagtcaaggctagcattcttggaattgtcaatattaaccttcctatcaatctcagcgtactcctcaatgtttgtagtaggaatgctccaaagagtttccagtgcgcgtaagttgaatacctatgacatacctatgaaacaaacgaatcataccgatgcttgaacatgttttcttacctacttgttgttgttctaagatgtttgttttttctttctttcttggattgttaataatgaacgtacgacgttctgatgcaaaataatggaaaatggggttgtgtgtacaatcgacaagtttgtatatactcctttactttgttgttcctttgttttgttgttcctcttctttgtaactgtgtatttcaaatttgcttaataaaaatataaattgatgttgtagc

SEQ ID NO: 84450 - protein, 111 aa, Arabidopsis thaliana
  peptide (1)..(111): Ceres Seq. ID no. 12675254
  misc_feature (28)..(110): Pfam Name: Protease inhibitor/seed storage/LTP family Pfam Description: Protease inhibitor/seed storage/LTP family
  misc_feature (1)..(111): Homolog of NCBI NO: 15235406 NR Description: putative cell wall-plasma membrane disconnecting protein (AIR1A); protein id: At4g12550.1, supported by cDNA: supported by cDNA: gi_15294191 [Arabidopsis thaliana]
  misc_feature (1)..(111): Homolog of NCBI NO: 21554111 NR Description: putative cell wall-plasma membrane disconnecting
  misc_feature (4)..(111): Homolog of NCBI NO: 11357189 NR Description: auxin-induced protein AIR1 [imported] -
  misc_feature (1)..(111): Homolog of NCBI NO: 30682157 NR Description: protease inhibitor/seed storage/lipid transfer
  misc_feature (21)..(111): Homolog of NCBI NO: 15235390 NR Description: pEARLI 1-like protein; protein id: At4g12500.1
  misc_feature (5)..(28): Homolog of NCBI NO: 15235390 NR Description: pEARLI 1-like protein; protein id: At4g12500.1
  misc_feature (22)..(110): Homolog of NCBI NO: 15221201 NR Description: pEARLI 1-like protein; protein id: At1g12090.1, by cDNA: 5712., supported by cDNA: gi_16648817, supported by
MAPRTPLALFVSLNLLFFTYTSATTGTCPKNSIEIGTCVTVLNLVDLTLGNPPVKPCCSLIQGLADLEAAVCLCTAVKASILGIVNINLPINLSVLLNVCSRNAPKSFQCA

SEQ ID NO: 84451 - DNA, 1323 bp, Arabidopsis thaliana
  misc_feature (1)..(1323): Ceres Seq. ID no. 12675270
  misc_feature: MA Experiment ID: 108462 Result: Up-regulated in Transcription
  misc_feature: MA Experiment 108462 PARAMETER Experiment Name: At_Germinating_Seeds_cDNA_P Parameter: Age (day) Value: 2 vs. 0
  misc_feature: MA Experiment 108462 PARAMETER Experiment Name: At_Germinating_Seeds_cDNA_P Parameter: Tissue Value: Germinating Seeds
  misc_feature: MA Experiment ID: 108463 Result: Up-regulated in Transcription
  misc_feature: MA Experiment 108463 PARAMETER Experiment Name: At_Germinating_Seeds_cDNA_P Parameter: Age (day) Value: 3 vs. 0
  misc_feature: MA Experiment 108463 PARAMETER Experiment Name: At_Germinating_Seeds_cDNA_P Parameter: Tissue Value: Germinating Seeds
  misc_feature: MA Experiment ID: 108464 Result: Up-regulated in Transcription
  misc_feature: MA Experiment 108464 PARAMETER Experiment Name: At_Germinating_Seeds_cDNA_P Parameter: Age (day) Value: 4 vs. 0
  misc_feature: MA Experiment 108464 PARAMETER Experiment Name: At_Germinating_Seeds_cDNA_P Parameter: Tissue Value: Germinating Seeds
  misc_feature: MA Experiment ID: 108473 Result: Down-regulated in Transcription
  misc_feature: MA Experiment 108473 PARAMETER Experiment Name: At_Drought_Flowers_cDNA_P Parameter: Timepoint (hr) Value: 7 d
  misc_feature: MA Experiment 108473 PARAMETER Experiment Name: At_Drought_Flowers_cDNA_P Parameter: Tissue Value: Flower
  misc_feature: MA Experiment 108473 PARAMETER Experiment Name: At_Drought_Flowers_cDNA_P Parameter: Treatment Value: Drought vs. No Drought
  misc_feature: MA Experiment ID: 108501 Result: Up-regulated in Transcription
  misc_feature: MA Experiment 108501 PARAMETER Experiment Name: At_ap2_floral_buds_cDNA_P Parameter: Plant Line Value: ap2 (Ler.)
  misc_feature: MA Experiment 108501 PARAMETER Experiment Name: At_ap2_floral_buds_cDNA_P Parameter: Tissue Value: Closed Flower
  misc_feature: MA Experiment ID: 108572 Result: Down-regulated in Transcription
  misc_feature: MA Experiment 108572 PARAMETER Experiment Name: At_Drought_cDNA_P Parameter: Timepoint (hr) Value: 1
  misc_feature: MA Experiment 108572 PARAMETER Experiment Name: At_Drought_cDNA_P Parameter: Tissue Value: Aerial
  misc_feature: MA Experiment 108572 PARAMETER Experiment Name: At_Drought_cDNA_P Parameter: Treatment Value: Drought vs. No Drought
  misc_feature: MA Experiment ID: 108573 Result: Down-regulated in Transcription
  misc_feature: MA Experiment 108573 PARAMETER Experiment Name: At_Drought_cDNA_P Parameter: Timepoint (hr) Value: 6
  misc_feature: MA Experiment 108573 PARAMETER Experiment Name: At_Drought_cDNA_P Parameter: Tissue Value: Aerial
  misc_feature: MA Experiment 108573 PARAMETER Experiment Name: At_Drought_cDNA_P Parameter: Treatment Value: Drought vs. No Drought
  misc_feature: MA Experiment ID: 108576 Result: Down-regulated in Transcription
  misc_feature: MA Experiment 108576 PARAMETER Experiment Name: At_42deg_Heat_cDNA_P Parameter: Temperature (deg C) Value: 42 vs. 22
  misc_feature: MA Experiment 108576 PARAMETER Experiment Name: At_42deg_Heat_cDNA_P Parameter: Timepoint (hr) Value: 1
  misc_feature: MA Experiment 108576 PARAMETER Experiment Name: At_42deg_Heat_cDNA_P Parameter: Tissue Value: Aerial
  misc_feature: MA Experiment ID: 108579 Result: Up-regulated in Transcription
  misc_feature: MA Experiment 108579 PARAMETER Experiment Name: At_4deg_Cold_cDNA_P Parameter: Temperature (deg C) Value: 4 vs. 22
  misc_feature: MA Experiment 108579 PARAMETER Experiment Name: At_4deg_Cold_cDNA_P Parameter: Timepoint (hr) Value: 6
  misc_feature: MA Experiment 108579 PARAMETER Experiment Name: At_4deg_Cold_cDNA_P Parameter: Tissue Value: Aerial
  misc_feature: MA Experiment ID: 108668 Result: Down-regulated in Transcription
  misc_feature: MA Experiment 108668 PARAMETER Experiment Name: At_2mM_SA_cDNA_P Parameter: Plant Line Value: WS
  misc_feature: MA Experiment 108668 PARAMETER Experiment Name: At_2mM_SA_cDNA_P Parameter: Timepoint (hr) Value: 6
  misc_feature: MA Experiment 108668 PARAMETER Experiment Name: At_2mM_SA_cDNA_P Parameter: Treatment Value: 2mM SA vs. No Treatment
  misc_feature: MA Experiment ID: 20000069 Result: Down-regulated in Transcription
  misc_feature: MA Experiment 20000069 PARAMETER Experiment Name: At_100uM_ABA_Mutants_cDNA_P Parameter: Plant Line Value: CS23
  misc_feature: MA Experiment 20000069 PARAMETER Experiment Name: At_100uM_ABA_Mutants_cDNA_P Parameter: Timepoint (hr) Value: 6
  misc_feature: MA Experiment 20000069 PARAMETER Experiment Name: At_100uM_ABA_Mutants_cDNA_P Parameter: Tissue Value: Aerial
  misc_feature: MA Experiment 20000069 PARAMETER Experiment Name: At_100uM_ABA_Mutants_cDNA_P Parameter: Treatment Value: 100uM ABA vs. No Treatment
  misc_feature: MA Experiment ID: 20000072 Result: Down-regulated in Transcription
  misc_feature: MA Experiment 20000072 PARAMETER Experiment Name: At_100uM_ABA_Mutants_cDNA_P Parameter: Plant Line Value: CS8105
  misc_feature: MA Experiment 20000072 PARAMETER Experiment Name: At_100uM_ABA_Mutants_cDNA_P Parameter: Timepoint (hr) Value: 6
  misc_feature: MA Experiment 20000072 PARAMETER Experiment Name: At_100uM_ABA_Mutants_cDNA_P Parameter: Tissue Value: Aerial
  misc_feature: MA Experiment 20000072 PARAMETER Experiment Name: At_100uM_ABA_Mutants_cDNA_P Parameter: Treatment Value: 100uM ABA vs. No Treatment
  misc_feature: MA Experiment ID: 20000086 Result: Down-regulated in Transcription
  misc_feature: MA Experiment 20000086 PARAMETER Experiment Name: At_100uM_ABA_Mutants_cDNA_P Parameter: Plant Line Value: CS22
  misc_feature: MA Experiment 20000086 PARAMETER Experiment Name: At_100uM_ABA_Mutants_cDNA_P Parameter: Timepoint (hr) Value: 6
  misc_feature: MA Experiment 20000086 PARAMETER Experiment Name: At_100uM_ABA_Mutants_cDNA_P Parameter: Tissue Value: Aerial
  misc_feature: MA Experiment 20000086 PARAMETER Experiment Name: At_100uM_ABA_Mutants_cDNA_P Parameter: Treatment Value: 100uM ABA vs. No Treatment
  misc_feature: MA Experiment ID: 20000090 Result: Down-regulated in Transcription
  misc_feature: MA Experiment ID: 20000112 Result: Down-regulated in Transcription
  misc_feature: MA Experiment 20000112 PARAMETER Experiment Name: At_42deg_Heat_cDNA_P Parameter: Temperature (deg C) Value: 42 vs. 22
  misc_feature: MA Experiment 20000112 PARAMETER Experiment Name: At_42deg_Heat_cDNA_P Parameter: Timepoint (hr) Value: 2
  misc_feature: MA Experiment 20000112 PARAMETER Experiment Name: At_42deg_Heat_cDNA_P Parameter: Tissue Value: Aerial
  misc_feature: MA Experiment ID: 20000113 Result: Down-regulated in Transcription
  misc_feature: MA Experiment 20000113 PARAMETER Experiment Name: At_42deg_Heat_cDNA_P Parameter: Temperature (deg C) Value: 42 vs. 22
  misc_feature: MA Experiment 20000113 PARAMETER Experiment Name: At_42deg_Heat_cDNA_P Parameter: Timepoint (hr) Value: 8
  misc_feature: MA Experiment 20000113 PARAMETER Experiment Name: At_42deg_Heat_cDNA_P Parameter: Tissue Value: Aerial
  misc_feature: MA Experiment ID: 20000117 Result: Down-regulated in Transcription
  misc_feature: MA Experiment 20000117 PARAMETER Experiment Name: At_100uM_ABA_Mutants_cDNA_P Parameter: Plant Line Value: Columbia
  misc_feature: MA Experiment 20000117 PARAMETER Experiment Name: At_100uM_ABA_Mutants_cDNA_P Parameter: Timepoint (hr) Value: 6
  misc_feature: MA Experiment 20000117 PARAMETER Experiment Name: At_100uM_ABA_Mutants_cDNA_P Parameter: Tissue Value: Aerial
  misc_feature: MA Experiment 20000117 PARAMETER Experiment Name: At_100uM_ABA_Mutants_cDNA_P Parameter: Treatment Value: 100uM ABA vs. No Treatment
  misc_feature: MA Experiment ID: 20000144 Result: Down-regulated in Transcription
  misc_feature: MA Experiment 20000144 PARAMETER Experiment Name: At_42deg_Heat_cDNA_P Parameter: Temperature (deg C) Value: 42 vs. 22
  misc_feature: MA Experiment 20000144 PARAMETER Experiment Name: At_42deg_Heat_cDNA_P Parameter: Timepoint (hr) Value: 1
  misc_feature: MA Experiment 20000144 PARAMETER Experiment Name: At_42deg_Heat_cDNA_P Parameter: Tissue Value: Aerial
  misc_feature: MA Experiment ID: 20000180 Result: Up-regulated in Transcription
  misc_feature: MA Experiment 20000180 PARAMETER Experiment Name: At_Germinating_Seeds_P Parameter: Age (hr) Value: 24 vs. 0
  misc_feature: MA Experiment 20000180 PARAMETER Experiment Name: At_Germinating_Seeds_P Parameter: Tissue Value: Germinating Seeds
  misc_feature: MA Experiment ID: 20000182 Result: Down-regulated in Transcription
  misc_feature: MA Experiment 20000182 PARAMETER Experiment Name: At_2mM_SA_P Parameter: Age (day) Value: 14
  misc_feature: MA Experiment 20000182 PARAMETER Experiment Name: At_2mM_SA_P Parameter: Organism Value: A. thaliana
  misc_feature: MA Experiment 20000182 PARAMETER Experiment Name: At_2mM_SA_P Parameter: Plant Line Value: WS
  misc_feature: MA Experiment 20000182 PARAMETER Experiment Name: At_2mM_SA_P Parameter: Timepoint (hr) Value: 6
  misc_feature: MA Experiment 20000182 PARAMETER Experiment Name: At_2mM_SA_P Parameter: Tissue Value: Aerial
  misc_feature: MA Experiment 20000182 PARAMETER Experiment Name: At_2mM_SA_P Parameter: Treatment Value: 2mM SA vs. No Treatment
  misc_feature: MA Experiment ID: 20000184 Result: Up-regulated in Transcription
  misc_feature: MA Experiment 20000184 PARAMETER Experiment Name: At_Shoots__P Parameter: Age (day) Value: 7
  misc_feature: MA Experiment 20000184 PARAMETER Experiment Name: At_Shoots__P Parameter: Tissue Value: Shoots vs. Whole Plant
  misc_feature: MA Experiment ID: 20000224 Result: Down-regulated in Transcription
  misc_feature: MA Experiment ID: 20000227 Result: Up-regulated in Transcription
  misc_feature: MA Experiment 20000227 PARAMETER Experiment Name: At_Root-Tips-vs-Tops_P Parameter: Tissue Value: Root Tips vs. Root Tops
  misc_feature: MA Experiment ID: 20000234 Result: Up-regulated in Transcription
  misc_feature: MA Experiment 20000234 PARAMETER Experiment Name: At_Siliques_P Parameter: Age (day) Value: 21
  misc_feature: MA Experiment 20000234 PARAMETER Experiment Name: At_Siliques_P Parameter: Organism Value: A. thaliana
  misc_feature: MA Experiment 20000234 PARAMETER Experiment Name: At_Siliques_P Parameter: Plant Line Value: WS
  misc_feature: MA Experiment 20000234 PARAMETER Experiment Name: At_Siliques_P Parameter: Tissue Value: Less Than 5mm Siliques vs. Whole Plant
  misc_feature: MA Experiment ID: 20000437 Result: Down-regulated in Transcription
  misc_feature: MA Experiment 20000437 PARAMETER Experiment Name: At_Drought_P Parameter: Age (day) Value: 8
  misc_feature: MA Experiment 20000437 PARAMETER Experiment Name: At_Drought_P Parameter: Organism Value: A. thaliana
  misc_feature: MA Experiment 20000437 PARAMETER Experiment Name: At_Drought_P Parameter: Plant Line Value: WS
  misc_feature: MA Experiment 20000437 PARAMETER Experiment Name: At_Drought_P Parameter: Timepoint (hr) Value: 24
  misc_feature: MA Experiment 20000437 PARAMETER Experiment Name: At_Drought_P Parameter: Tissue Value: Whole Plant
  misc_feature: MA Experiment 20000437 PARAMETER Experiment Name: At_Drought_P Parameter: Treatment Value: Drought vs. No Drought
  misc_feature: MA Experiment ID: 20000527 Result: Down-regulated in Transcription
  misc_feature: MA Experiment 20000527 PARAMETER Experiment Name: At_10percent_PEG_P Parameter: Age (day) Value: 20
  misc_feature: MA Experiment 20000527 PARAMETER Experiment Name: At_10percent_PEG_P Parameter: Organism Value: A. thaliana
  misc_feature: MA Experiment 20000527 PARAMETER Experiment Name: At_10percent_PEG_P Parameter: Plant Line Value: WS
  misc_feature: MA Experiment 20000527 PARAMETER Experiment Name: At_10percent_PEG_P Parameter: Timepoint (day) Value: 20
  misc_feature: MA Experiment 20000527 PARAMETER Experiment Name: At_10percent_PEG_P Parameter: Tissue Value: Whole Plant
  misc_feature: MA Experiment 20000527 PARAMETER Experiment Name: At_10percent_PEG_P Parameter: Treatment Value: 10percent PEG vs. No Treatment
  misc_feature: MA Experiment ID: 20001450 Result: Up-regulated in Transcription
  misc_feature: MA Experiment 20001450 PARAMETER Experiment Name: At_Far-red-induction_P Parameter: Age (day) Value: 7
  misc_feature: MA Experiment 20001450 PARAMETER Experiment Name: At_Far-red-induction_P Parameter: Light Value: Far-red vs. White
  misc_feature: MA Experiment 20001450 PARAMETER Experiment Name: At_Far-red-induction_P Parameter: Organism Value: A. thaliana
  misc_feature: MA Experiment 20001450 PARAMETER Experiment Name: At_Far-red-induction_P Parameter: Plant Line Value: Columbia
  misc_feature: MA Experiment 20001450 PARAMETER Experiment Name: At_Far-red-induction_P Parameter: Timepoint (hr) Value: 8
  misc_feature: MA Experiment 20001450 PARAMETER Experiment Name: At_Far-red-induction_P Parameter: Tissue Value: Whole Plant
  misc_feature: MA Experiment ID: 20001451 Result: Up-regulated in Transcription
  misc_feature: MA Experiment 20001451 PARAMETER Experiment Name: At_Far-red-induction_P Parameter: Age (day) Value: 7
  misc_feature: MA Experiment 20001451 PARAMETER Experiment Name: At_Far-red-induction_P Parameter: Light Value: Far-red vs. White
  misc_feature: MA Experiment 20001451 PARAMETER Experiment Name: At_Far-red-induction_P Parameter: Organism Value: A. thaliana
  misc_feature: MA Experiment 20001451 PARAMETER Experiment Name: At_Far-red-induction_P Parameter: Plant Line Value: Columbia
  misc_feature: MA Experiment 20001451 PARAMETER Experiment Name: At_Far-red-induction_P Parameter: Timepoint (hr) Value: 24
  misc_feature: MA Experiment 20001451 PARAMETER Experiment Name: At_Far-red-induction_P Parameter: Tissue Value: Whole Plant
  misc_feature: MA Experiment ID: 20001554 Result: Down-regulated in Transcription
  misc_feature: MA Experiment 20001554 PARAMETER Experiment Name: At_Drought_Soil_Dry_P Parameter: Age (day) Value: 21
  misc_feature: MA Experiment 20001554 PARAMETER Experiment Name: At_Drought_Soil_Dry_P Parameter: Organism Value: A. thaliana
  misc_feature: MA Experiment 20001554 PARAMETER Experiment Name: At_Drought_Soil_Dry_P Parameter: Plant Line Value: WS
  misc_feature: MA Experiment 20001554 PARAMETER Experiment Name: At_Drought_Soil_Dry_P Parameter: Post Timepoint (hr) Value: None
  misc_feature: MA Experiment 20001554 PARAMETER Experiment Name: At_Drought_Soil_Dry_P Parameter: Post-Treatment Value: None
  misc_feature: MA Experiment 20001554 PARAMETER Experiment Name: At_Drought_Soil_Dry_P Parameter: Timepoint (day) Value: 7
  misc_feature: MA Experiment 20001554 PARAMETER Experiment Name: At_Drought_Soil_Dry_P Parameter: Treatment Value: Drought vs. No Drought
  misc_feature: MA Experiment ID: 20001555 Result: Down-regulated in Transcription
  misc_feature: MA Experiment 20001555 PARAMETER Experiment Name: At_Drought_Soil_Dry_P Parameter: Age (day) Value: 24
  misc_feature: MA Experiment 20001555 PARAMETER Experiment Name: At_Drought_Soil_Dry_P Parameter: Organism Value: A. thaliana
  misc_feature: MA Experiment 20001555 PARAMETER Experiment Name: At_Drought_Soil_Dry_P Parameter: Plant Line Value: WS
  misc_feature: MA Experiment 20001555 PARAMETER Experiment Name: At_Drought_Soil_Dry_P Parameter: Post Timepoint (hr) Value: None
  misc_feature: MA Experiment 20001555 PARAMETER Experiment Name: At_Drought_Soil_Dry_P Parameter: Post-Treatment Value: None
  misc_feature: MA Experiment 20001555 PARAMETER Experiment Name: At_Drought_Soil_Dry_P Parameter: Timepoint (day) Value: 10
  misc_feature: MA Experiment 20001555 PARAMETER Experiment Name: At_Drought_Soil_Dry_P Parameter: Treatment Value: Drought vs. No Drought
  misc_feature: MA Experiment ID: 20001556 Result: Down-regulated in Transcription
  misc_feature: MA Experiment 20001556 PARAMETER Experiment Name: At_Drought_Soil_Dry_P Parameter: Age (day) Value: 26
  misc_feature: MA Experiment 20001556 PARAMETER Experiment Name: At_Drought_Soil_Dry_P Parameter: Organism Value: A. thaliana
  misc_feature: MA Experiment 20001556 PARAMETER Experiment Name: At_Drought_Soil_Dry_P Parameter: Plant Line Value: WS
  misc_feature: MA Experiment 20001556 PARAMETER Experiment Name: At_Drought_Soil_Dry_P Parameter: Post Timepoint (hr) Value: None
  misc_feature: MA Experiment 20001556 PARAMETER Experiment Name: At_Drought_Soil_Dry_P Parameter: Post-Treatment Value: None
  misc_feature: MA Experiment 20001556 PARAMETER Experiment Name: At_Drought_Soil_Dry_P Parameter: Timepoint (day) Value: 12
  misc_feature: MA Experiment 20001556 PARAMETER Experiment Name: At_Drought_Soil_Dry_P Parameter: Treatment Value: Drought vs. No Drought
  misc_feature: MA Experiment ID: 20001558 Result: Up-regulated in Transcription
  misc_feature: MA Experiment 20001558 PARAMETER Experiment Name: At_Drought_Soil_Dry_P Parameter: Age (day) Value: 27
  misc_feature: MA Experiment 20001558 PARAMETER Experiment Name: At_Drought_Soil_Dry_P Parameter: Organism Value: A. thaliana
  misc_feature: MA Experiment 20001558 PARAMETER Experiment Name: At_Drought_Soil_Dry_P Parameter: Plant Line Value: WS
  misc_feature: MA Experiment 20001558 PARAMETER Experiment Name: At_Drought_Soil_Dry_P Parameter: Post Timepoint (hr) Value: 6
  misc_feature: MA Experiment 20001558 PARAMETER Experiment Name: At_Drought_Soil_Dry_P Parameter: Post-Treatment Value: Re-Water vs. No Drought
  misc_feature: MA Experiment 20001558 PARAMETER Experiment Name: At_Drought_Soil_Dry_P Parameter: Timepoint (day) Value: 13
  misc_feature: MA Experiment 20001558 PARAMETER Experiment Name: At_Drought_Soil_Dry_P Parameter: Treatment Value: Drought vs. No Drought
  misc_feature: MA Experiment ID: 20001559 Result: Down-regulated in Transcription
  misc_feature: MA Experiment 20001559 PARAMETER Experiment Name: At_Drought_Soil_Dry_P Parameter: Age (day) Value: 28
  misc_feature: MA Experiment 20001559 PARAMETER Experiment Name: At_Drought_Soil_Dry_P Parameter: Organism Value: A. thaliana
  misc_feature: MA Experiment 20001559 PARAMETER Experiment Name: At_Drought_Soil_Dry_P Parameter: Plant Line Value: WS
  misc_feature: MA Experiment 20001559 PARAMETER Experiment Name: At_Drought_Soil_Dry_P Parameter: Post Timepoint (hr) Value: 29
  misc_feature: MA Experiment 20001559 PARAMETER Experiment Name: At_Drought_Soil_Dry_P Parameter: Post-Treatment Value: Re-Water vs. No Drought
  misc_feature: MA Experiment 20001559 PARAMETER Experiment Name: At_Drought_Soil_Dry_P Parameter: Timepoint (day) Value: 14
  misc_feature: MA Experiment 20001559 PARAMETER Experiment Name: At_Drought_Soil_Dry_P Parameter: Treatment Value: Drought vs. No Drought
  misc_feature: MA Experiment ID: 20001560 Result: Up-regulated in Transcription
  misc_feature: MA Experiment 20001560 PARAMETER Experiment Name: At_Drought_Soil_Dry_P Parameter: Age (day) Value: 28
  misc_feature: MA Experiment 20001560 PARAMETER Experiment Name: At_Drought_Soil_Dry_P Parameter: Organism Value: A. thaliana
  misc_feature: MA Experiment 20001560 PARAMETER Experiment Name: At_Drought_Soil_Dry_P Parameter: Plant Line Value: WS
  misc_feature: MA Experiment 20001560 PARAMETER Experiment Name: At_Drought_Soil_Dry_P Parameter: Post Timepoint (hr) Value: None
  misc_feature: MA Experiment 20001560 PARAMETER Experiment Name: At_Drought_Soil_Dry_P Parameter: Post-Treatment Value: None
  misc_feature: MA Experiment 20001560 PARAMETER Experiment Name: At_Drought_Soil_Dry_P Parameter: Timepoint (day) Value: 14
  misc_feature: MA Experiment 20001560 PARAMETER Experiment Name: At_Drought_Soil_Dry_P Parameter: Treatment Value: Drought vs. No Drought
  misc_feature: MA Experiment ID: 20001906 Result: Down-regulated in Transcription
  misc_feature: MA Experiment 20001906 PARAMETER Experiment Name: At_Drought_Reproduction_P Parameter: Age (day) Value: 35
  misc_feature: MA Experiment 20001906 PARAMETER Experiment Name: At_Drought_Reproduction_P Parameter: Organism Value: A. thaliana
  misc_feature: MA Experiment 20001906 PARAMETER Experiment Name: At_Drought_Reproduction_P Parameter: Plant Line Value: WS
  misc_feature: MA Experiment 20001906 PARAMETER Experiment Name: At_Drought_Reproduction_P Parameter: Timepoint (day) Value: 5
  misc_feature: MA Experiment 20001906 PARAMETER Experiment Name: At_Drought_Reproduction_P Parameter: Tissue Value: Siliques
  misc_feature: MA Experiment 20001906 PARAMETER Experiment Name: At_Drought_Reproduction_P Parameter: Treatment Value: Drought vs. No Drought
  misc_feature: MA Experiment ID: 20001907 Result: Down-regulated in Transcription
  misc_feature: MA Experiment 20001907 PARAMETER Experiment Name: At_Drought_Reproduction_P Parameter: Age (day) Value: 37
  misc_feature: MA Experiment 20001907 PARAMETER Experiment Name: At_Drought_Reproduction_P Parameter: Organism Value: A. thaliana
  misc_feature: MA Experiment 20001907 PARAMETER Experiment Name: At_Drought_Reproduction_P Parameter: Plant Line Value: WS
  misc_feature: MA Experiment 20001907 PARAMETER Experiment Name: At_Drought_Reproduction_P Parameter: Timepoint (day) Value: 7
  misc_feature: MA Experiment 20001907 PARAMETER Experiment Name: At_Drought_Reproduction_P Parameter: Tissue Value: Siliques
  misc_feature: MA Experiment 20001907 PARAMETER Experiment Name: At_Drought_Reproduction_P Parameter: Treatment Value: Drought vs. No Drought
  misc_feature: MA Experiment ID: 20001911 Result: Down-regulated in Transcription
  misc_feature: MA Experiment 20001911 PARAMETER Experiment Name: At_Drought_Reproduction_P Parameter: Age (day) Value: 40
  misc_feature: MA Experiment 20001911 PARAMETER Experiment Name: At_Drought_Reproduction_P Parameter: Organism Value: A. thaliana
  misc_feature: MA Experiment 20001911 PARAMETER Experiment Name: At_Drought_Reproduction_P Parameter: Plant Line Value: WS
  misc_feature: MA Experiment 20001911 PARAMETER Experiment Name: At_Drought_Reproduction_P Parameter: Timepoint (day) Value: 10
  misc_feature: MA Experiment 20001911 PARAMETER Experiment Name: At_Drought_Reproduction_P Parameter: Tissue Value: Flowers
  misc_feature: MA Experiment 20001911 PARAMETER Experiment Name: At_Drought_Reproduction_P Parameter: Treatment Value: Drought vs. No Drought
ataagactcctctccaaatgctaccacacaattcctctatcaaagccgcccaatcctccacccaaaaatggcttatctccggcgagcagccaccgcattggttctcattttccagctccatctctttctctctctctcaaatgcacataacataacccgtcgataactcagcaatgtcctccatcctctctaacggatactcactctaccaaatccgcaacattctctctctccacgtcctggtcgattacttcggcaccaagaaacttcaccagatcaccgacggctccacctccactgcctccatgtttcaatccaccggatccgccaccggaacttctggatacatcaacatcaccgatataaaaggcggtaaagtcgcttttggtgtccaagacgacgatagcaagctcacagctcactacgtcaaatccgtctttgaaaagccttacaacatctctgttcttcacatcagccaagtcttaacctcgccggaagcagaagctcccacggcgagtcccagcgacctcatcctcaccacaatcctcgaaaaacaagggtgcaaagctttctccgacatcttgaagtcaaccggcgccgacaaaacgttccaagataccgtagacggaggcttaacggtgttctgtccctccgacagcgctgtcggtaagttcatgccgaaattcaaatccctttctccggcgaacaagactgcgttagtgctttaccacggcatgccggtttaccagtcgttacaaatgcttagatcaggtaacggcgccgttaacacgttagcgacggaaggtaacaacaagtttgatttcaccgttcaaaatgacggagaagacgtgacgctggagacggacgttgtgacggcgaaggtaatggggacgttaaaggatcaagagccattgatagtttacaagatcgataaagtgttgttgcctagagaaatctacaaggccgttaagacgtccgctccagctcctaagtcgagtaagaaaaagcctaagaacgcggaggctgacgccgacggacctagcgccgatgctccgtcagatgatgatgttgaggtggctgacgataaaaacggcgccgtatcagcgatgattactcgaacaagtaatgtcgtaacggccattgtcgggctctgtttcggagtttggcttatgtgaagtgacgtggcatttacctcgctttgggaatcttgttttcctttttctttgtgatctgtcggtttaatttattttacatattcttttttttgttcacgttgatacttggtgtggagatttggaataattaattgttccacttgtgttg

SEQ ID NO: 84452 - protein, 333 aa, Arabidopsis thaliana; identical to SEQ ID NO: 26961
  peptide (1)..(333): Ceres Seq. ID no. 12675271
  misc_feature (117)..(258): Pfam Name: Fasciclin domain Pfam Description: Fasciclin domain
  misc_feature (1)..(333): Homolog of NCBI NO: 15235459 NR Description: fasciclin-like arabinogalactan-protein (FLA2); id: At4g12730.1, supported by cDNA: 4620., supported by cDNA: supported by cDNA: gi_16974608 [Arabidopsis thaliana] putative
  misc_feature (1)..(333): Homolog of NCBI NO: 13377778 NR Description: fasciclin-like arabinogalactan-protein 2
  misc_feature (1)..(333): Homolog of NCBI NO: 21593810 NR Description: putative pollen surface protein [Arabidopsis
  misc_feature (1)..(308): Homolog of NCBI NO: 15240570 NR Description: fasciclin-like arabinogalactan-protein (FLA1); id: At5g55730.1, supported by cDNA: gi_13377775 [Arabidopsis >gi|9758607|dbj|BAB09240.1| gene_id:MDF20.17~pir||T06631~similar
  misc_feature (1)..(307): Homolog of NCBI NO: 38424037 NR Description: putative fasciclin-like arabinogalactan-protein
  misc_feature (1)..(326): Homolog of NCBI NO: 18406799 NR Description: fasciclin-like arabinogalactan-protein (FLA8); id: At2g45470.1, supported by cDNA: 7709., supported by cDNA: [Arabidopsis thaliana] >gi|25349350|pir||H84890 hypothetical
  misc_feature (1)..(326): Homolog of NCBI NO: 21595125 NR Description: endosperm-specific protein-like protein
  misc_feature (1)..(318): Homolog of NCBI NO: 14190409 NR Description: AT3g60900/T4C21_310 [Arabidopsis thaliana]
  misc_feature (1)..(318): Homolog of NCBI NO: 15232973 NR Description: fasciclin-like arabinogalactan-protein (FLA10);
  misc_feature (1)..(295): Homolog of NCBI NO: 38605955 NR Description: OSJNBa0019K04.16 [Oryza sativa (japonica

SEQ ID NO: 84453 - protein, 289 aa, Arabidopsis thaliana; identical to SEQ ID NO: 26962
  peptide (1)..(289): Ceres Seq. ID no. 12675272
  misc_feature (73)..(214): Pfam Name: Fasciclin domain Pfam Description: Fasciclin domain
  misc_feature (1)..(289): Homolog of NCBI NO: 15235459 NR Description: fasciclin-like arabinogalactan-protein (FLA2); id: At4g12730.1, supported by cDNA: 4620., supported by cDNA: supported by cDNA: gi_16974608 [Arabidopsis thaliana] putative
  misc_feature (1)..(289): Homolog of NCBI NO: 13377778 NR Description: fasciclin-like arabinogalactan-protein 2
  misc_feature (1)..(289): Homolog of NCBI NO: 21593810 NR Description: putative pollen surface protein [Arabidopsis
  misc_feature (1)..(264): Homolog of NCBI NO: 15240570 NR Description: fasciclin-like arabinogalactan-protein (FLA1); id: At5g55730.1, supported by cDNA: gi_13377775 [Arabidopsis >gi|9758607|dbj|BAB09240.1| gene_id:MDF20.17~pir||T06631~similar
  misc_feature (1)..(263): Homolog of NCBI NO: 38424037 NR Description: putative fasciclin-like arabinogalactan-protein
  misc_feature (1)..(282): Homolog of NCBI NO: 18406799 NR Description: fasciclin-like arabinogalactan-protein (FLA8); id: At2g45470.1, supported by cDNA: 7709., supported by cDNA: [Arabidopsis thaliana] >gi|25349350|pir||H84890 hypothetical
  misc_feature (1)..(282): Homolog of NCBI NO: 21595125 NR Description: endosperm-specific protein-like protein
  misc_feature (1)..(274): Homolog of NCBI NO: 14190409 NR Description: AT3g60900/T4C21_310 [Arabidopsis thaliana]
  misc_feature (1)..(274): Homolog of NCBI NO: 15232973 NR Description: fasciclin-like arabinogalactan-protein (FLA10);
  misc_feature (1)..(251): Homolog of NCBI NO: 38605955 NR Description: OSJNBa0019K04.16 [Oryza sativa (japonica

SEQ ID NO: 84454 - protein, 166 aa, Arabidopsis thaliana
  peptide (1)..(166): Ceres Seq. ID no. 12675273
  misc_feature (1)..(91): Pfam Name: Fasciclin domain Pfam Description: Fasciclin domain
  misc_feature (1)..(166): Homolog of NCBI NO: 15235459 NR Description: fasciclin-like arabinogalactan-protein (FLA2); id: At4g12730.1, supported by cDNA: 4620., supported by cDNA: supported by cDNA: gi_16974608 [Arabidopsis thaliana] putative
  misc_feature (1)..(166): Homolog of NCBI NO: 13377778 NR Description: fasciclin-like arabinogalactan-protein 2
  misc_feature (1)..(166): Homolog of NCBI NO: 21593810 NR Description: putative pollen surface protein [Arabidopsis
  misc_feature (1)..(141): Homolog of NCBI NO: 15240570 NR Description: fasciclin-like arabinogalactan-protein (FLA1); id: At5g55730.1, supported by cDNA: gi_13377775 [Arabidopsis >gi|9758607|dbj|BAB09240.1| gene_id:MDF20.17~pir||T06631~similar
  misc_feature (1)..(140): Homolog of NCBI NO: 38424037 NR Description: putative fasciclin-like arabinogalactan-protein
  misc_feature (1)..(159): Homolog of NCBI NO: 18406799 NR Description: fasciclin-like arabinogalactan-protein (FLA8); id: At2g45470.1, supported by cDNA: 7709., supported by cDNA: [Arabidopsis thaliana] >gi|25349350|pir||H84890 hypothetical
  misc_feature (1)..(159): Homolog of NCBI NO: 21595125 NR Description: endosperm-specific protein-like protein
  misc_feature (1)..(151): Homolog of NCBI NO: 14190409 NR Description: AT3g60900/T4C21_310 [Arabidopsis thaliana]
  misc_feature (1)..(151): Homolog of NCBI NO: 15232973 NR Description: fasciclin-like arabinogalactan-protein (FLA10);
  misc_feature (1)..(128): Homolog of NCBI NO: 38605955 NR Description: OSJNBa0019K04.16 [Oryza sativa (japonica
MPKFKSLSPANKTALVLYHGMPVYQSLQMLRSGNGAVNTLATEGNNKFDFTVQNDGEDVTLETDVVTAKVMGTLKDQEPLIVYKIDKVLLPREIYKAVKTSAPAPKSSKKKPKNAEADADGPSADAPSDDDVEVADDKNGAVSAMITRTSNVVTAIVGLCFGVWLM

SEQ ID NO: 84455 - DNA, 1292 bp, Arabidopsis thaliana
  misc_feature (1)..(1292): Ceres Seq. ID no. 12675281
  misc_feature: MA Experiment ID: 108434 Result: Down-regulated in Transcription
  misc_feature: MA Experiment 108434 PARAMETER Experiment Name: At_Root_Tips_cDNA_P Parameter: Tissue Value: Root Tips
  misc_feature: MA Experiment ID: 108469 Result: Up-regulated in Transcription
  misc_feature: MA Experiment ID: 108574 Result: Up-regulated in Transcription
  misc_feature: MA Experiment 108574 PARAMETER Experiment Name: At_Wounding__cDNA_P Parameter: Timepoint (hr) Value: 1
  misc_feature: MA Experiment 108574 PARAMETER Experiment Name: At_Wounding__cDNA_P Parameter: Tissue Value: Aerial
  misc_feature: MA Experiment 108574 PARAMETER Experiment Name: At_Wounding__cDNA_P Parameter: Treatment Value: Wounding vs. No Wounding
  misc_feature: MA Experiment ID: 108577 Result: Down-regulated in Transcription
  misc_feature: MA Experiment 108577 PARAMETER Experiment Name: At_42deg_Heat_cDNA_P Parameter: Temperature (deg C) Value: 42 vs. 22
  misc_feature: MA Experiment 108577 PARAMETER Experiment Name: At_42deg_Heat_cDNA_P Parameter: Timepoint (hr) Value: 6
  misc_feature: MA Experiment 108577 PARAMETER Experiment Name: At_42deg_Heat_cDNA_P Parameter: Tissue Value: Aerial
  misc_feature: MA Experiment ID: 108585 Result: Up-regulated in Transcription
  misc_feature: MA Experiment 108585 PARAMETER Experiment Name: At_5mM_NaNP_cDNA_P Parameter: Timepoint (hr) Value: 6
  misc_feature: MA Experiment 108585 PARAMETER Experiment Name: At_5mM_NaNP_cDNA_P Parameter: Tissue Value: Aerial
  misc_feature: MA Experiment 108585 PARAMETER Experiment Name: At_5mM_NaNP_cDNA_P Parameter: Treatment Value: null
  misc_feature: MA Experiment ID: 108594 Result: Up-regulated in Transcription
  misc_feature: MA Experiment 108594 PARAMETER Experiment Name: At_Ler-rhl_Root_cDNA_P Parameter: Plant Line Value: null
  misc_feature: MA Experiment ID: 108595 Result: Up-regulated in Transcription
  misc_feature: MA Experiment 108595 PARAMETER Experiment Name: At_Ler-pi_Ovule_cDNA_P Parameter: Plant Line Value: null
  misc_feature: MA Experiment ID: 108667 Result: Up-regulated in Transcription
  misc_feature: MA Experiment 108667 PARAMETER Experiment Name: At_2mM_SA_cDNA_P Parameter: Plant Line Value: WS
  misc_feature: MA Experiment 108667 PARAMETER Experiment Name: At_2mM_SA_cDNA_P Parameter: Timepoint (hr) Value: 1
  misc_feature: MA Experiment 108667 PARAMETER Experiment Name: At_2mM_SA_cDNA_P Parameter: Treatment Value: 2mM SA vs. No Treatment
  misc_feature: MA Experiment ID: 108668 Result: Up-regulated in Transcription
  misc_feature: MA Experiment 108668 PARAMETER Experiment Name: At_2mM_SA_cDNA_P Parameter: Plant Line Value: WS
  misc_feature: MA Experiment 108668 PARAMETER Experiment Name: At_2mM_SA_cDNA_P Parameter: Timepoint (hr) Value: 6
  misc_feature: MA Experiment 108668 PARAMETER Experiment Name: At_2mM_SA_cDNA_P Parameter: Treatment Value: 2mM SA vs. No Treatment
  misc_feature: MA Experiment ID: 20000111 Result: Down-regulated in Transcription
  misc_feature: MA Experiment 20000111 PARAMETER Experiment Name: At_42deg_Heat_cDNA_P Parameter: Temperature (deg C) Value: 42 vs. 22
  misc_feature: MA Experiment 20000111 PARAMETER Experiment Name: At_42deg_Heat_cDNA_P Parameter: Timepoint (hr) Value: 6
  misc_feature: MA Experiment 20000111 PARAMETER Experiment Name: At_42deg_Heat_cDNA_P Parameter: Tissue Value: Aerial
  misc_feature: MA Experiment ID: 20000113 Result: Down-regulated in Transcription
  misc_feature: MA Experiment 20000113 PARAMETER Experiment Name: At_42deg_Heat_cDNA_P Parameter: Temperature (deg C) Value: 42 vs. 22
  misc_feature: MA Experiment 20000113 PARAMETER Experiment Name: At_42deg_Heat_cDNA_P Parameter: Timepoint (hr) Value: 8
  misc_feature: MA Experiment 20000113 PARAMETER Experiment Name: At_42deg_Heat_cDNA_P Parameter: Tissue Value: Aerial
  misc_feature: MA Experiment ID: 20000173 Result: Down-regulated in Transcription
  misc_feature: MA Experiment 20000173 PARAMETER Experiment Name: At_42deg_Heat_P Parameter: Age (day) Value: 14
  misc_feature: MA Experiment 20000173 PARAMETER Experiment Name: At_42deg_Heat_P Parameter: Organism Value: A. thaliana
  misc_feature: MA Experiment 20000173 PARAMETER Experiment Name: At_42deg_Heat_P Parameter: Plant Line Value: WS
  misc_feature: MA Experiment 20000173 PARAMETER Experiment Name: At_42deg_Heat_P Parameter: Temperature (deg C) Value: 42 vs. 22
  misc_feature: MA Experiment 20000173 PARAMETER Experiment Name: At_42deg_Heat_P Parameter: Timepoint (hr) Value: 6
  misc_feature: MA Experiment 20000173 PARAMETER Experiment Name: At_42deg_Heat_P Parameter: Tissue Value: Aerial
  misc_feature: MA Experiment ID: 20000182 Result: Up-regulated in Transcription
  misc_feature: MA Experiment 20000182 PARAMETER Experiment Name: At_2mM_SA_P Parameter: Age (day) Value: 14
  misc_feature: MA Experiment 20000182 PARAMETER Experiment Name: At_2mM_SA_P Parameter: Organism Value: A. thaliana
  misc_feature: MA Experiment 20000182 PARAMETER Experiment Name: At_2mM_SA_P Parameter: Plant Line Value: WS
  misc_feature: MA Experiment 20000182 PARAMETER Experiment Name: At_2mM_SA_P Parameter: Timepoint (hr) Value: 6
  misc_feature: MA Experiment 20000182 PARAMETER Experiment Name: At_2mM_SA_P Parameter: Tissue Value: Aerial
  misc_feature: MA Experiment 20000182 PARAMETER Experiment Name: At_2mM_SA_P Parameter: Treatment Value: 2mM SA vs. No Treatment
  misc_feature: MA Experiment ID: 20000184 Result: Down-regulated in Transcription
  misc_feature: MA Experiment 20000184 PARAMETER Experiment Name: At_Shoots__P Parameter: Age (day) Value: 7
  misc_feature: MA Experiment 20000184 PARAMETER Experiment Name: At_Shoots__P Parameter: Tissue Value: Shoots vs. Whole Plant
  misc_feature: MA Experiment ID: 20000185 Result: Down-regulated in Transcription
  misc_feature: MA Experiment 20000185 PARAMETER Experiment Name: At_Roots__P Parameter: Age (day) Value: 7 vs. 21
  misc_feature: MA Experiment 20000185 PARAMETER Experiment Name: At_Roots__P Parameter: Organism Value: A. thaliana
  misc_feature: MA Experiment 20000185 PARAMETER Experiment Name: At_Roots__P Parameter: Tissue Value: Roots vs. Whole Plant
  misc_feature: MA Experiment ID: 20000213 Result: Up-regulated in Transcription
  misc_feature: MA Experiment 20000213 PARAMETER Experiment Name: At_4deg_Cold_P Parameter: Timepoint (hr) Value: 2
  misc_feature: MA Experiment ID: 20000234 Result: Down-regulated in Transcription
  misc_feature: MA Experiment 20000234 PARAMETER Experiment Name: At_Siliques_P Parameter: Age (day) Value: 21
  misc_feature: MA Experiment 20000234 PARAMETER Experiment Name: At_Siliques_P Parameter: Organism Value: A. thaliana
  misc_feature: MA Experiment 20000234 PARAMETER Experiment Name: At_Siliques_P Parameter: Plant Line Value: WS
  misc_feature: MA Experiment 20000234 PARAMETER Experiment Name: At_Siliques_P Parameter: Tissue Value: Less Than 5mm Siliques vs. Whole Plant
  misc_feature: MA Experiment ID: 20000235 Result: Down-regulated in Transcription
  misc_feature: MA Experiment 20000235 PARAMETER Experiment Name: At_Siliques_P Parameter: Age (day) Value: 21
  misc_feature: MA Experiment 20000235 PARAMETER Experiment Name: At_Siliques_P Parameter: Organism Value: A. thaliana
  misc_feature: MA Experiment 20000235 PARAMETER Experiment Name: At_Siliques_P Parameter: Plant Line Value: WS
  misc_feature: MA Experiment 20000235 PARAMETER Experiment Name: At_Siliques_P Parameter: Tissue Value: 5-10mm Siliques vs. Whole Plant
  misc_feature: MA Experiment ID: 20000264 Result: Down-regulated in Transcription
  misc_feature: MA Experiment 20000264 PARAMETER Experiment Name: At_Open_Flower_P Parameter: Age (day) Value: 21
  misc_feature: MA Experiment 20000264 PARAMETER Experiment Name: At_Open_Flower_P Parameter: Plant Line Value: WS
  misc_feature: MA Experiment 20000264 PARAMETER Experiment Name: At_Open_Flower_P Parameter: Tissue Value: Open Flower vs. Whole Plant
  misc_feature: MA Experiment ID: 20000265 Result: Down-regulated in Transcription
  misc_feature: MA Experiment 20000265 PARAMETER Experiment Name: At_Open_Flower_P Parameter: Age (day) Value: 21
  misc_feature: MA Experiment 20000265 PARAMETER Experiment Name: At_Open_Flower_P Parameter: Plant Line Value: WS
  misc_feature: MA Experiment 20000265 PARAMETER Experiment Name: At_Open_Flower_P Parameter: Tissue Value: Closed Flower vs. Whole Plant
  misc_feature: MA Experiment ID: 20000268 Result: Down-regulated in Transcription
  misc_feature: MA Experiment 20000268 PARAMETER Experiment Name: At_100mM_NaCl__P Parameter: Age (day) Value: 14
  misc_feature: MA Experiment 20000268 PARAMETER Experiment Name: At_100mM_NaCl__P Parameter: Organism Value: A. thaliana
  misc_feature: MA Experiment 20000268 PARAMETER Experiment Name: At_100mM_NaCl__P Parameter: Plant Line Value: WS
  misc_feature: MA Experiment 20000268 PARAMETER Experiment Name: At_100mM_NaCl__P Parameter: Timepoint (hr) Value: 6
  misc_feature: MA Experiment 20000268 PARAMETER Experiment Name: At_100mM_NaCl__P Parameter: Tissue Value: Whole Plant
  misc_feature: MA Experiment 20000268 PARAMETER Experiment Name: At_100mM_NaCl__P Parameter: Treatment Value: 100mM NaCl vs. No Treatment
  misc_feature: MA Experiment ID: 20000286 Result: Down-regulated in Transcription
  misc_feature: MA Experiment 20000286 PARAMETER Experiment Name: At_Open_Flower_P Parameter: Age (day) Value: 21
  misc_feature: MA Experiment 20000286 PARAMETER Experiment Name: At_Open_Flower_P Parameter: Plant Line Value: WS
  misc_feature: MA Experiment 20000286 PARAMETER Experiment Name: At_Open_Flower_P Parameter: Tissue Value: Half Open vs. Whole Plant
  misc_feature: MA Experiment ID: 20000438 Result: Down-regulated in Transcription
  misc_feature: MA Experiment 20000438 PARAMETER Experiment Name: At_Shoots__P Parameter: Age (day) Value: 14
  misc_feature: MA Experiment 20000438 PARAMETER Experiment Name: At_Shoots__P Parameter: Tissue Value: Shoots vs. Whole Plant
  misc_feature: MA Experiment ID: 20000439 Result: Down-regulated in Transcription
  misc_feature: MA Experiment 20000439 PARAMETER Experiment Name: At_Roots__P Parameter: Age (day) Value: 14 vs. 21
  misc_feature: MA Experiment 20000439 PARAMETER Experiment Name: At_Roots__P Parameter: Organism Value: A. thaliana
  misc_feature: MA Experiment 20000439 PARAMETER Experiment Name: At_Roots__P Parameter: Tissue Value: Roots vs. Whole Plant
  misc_feature: MA Experiment ID: 20000441 Result: Up-regulated in Transcription
  misc_feature: MA Experiment 20000441 PARAMETER Experiment Name: At_1uM_BR-BRZ__P Parameter: Tissue Value: Shoot Apices
  misc_feature: MA Experiment 20000441 PARAMETER Experiment Name: At_1uM_BR-BRZ__P Parameter: Treatment Value: 1uM BR vs. No Treatment
  misc_feature: MA Experiment ID: 20000460 Result: Up-regulated in Transcription
  misc_feature: MA Experiment 20000460 PARAMETER Experiment Name: At_10percent_PEG_P Parameter: Age (day) Value: 12
  misc_feature: MA Experiment 20000460 PARAMETER Experiment Name: At_10percent_PEG_P Parameter: Organism Value: A. thaliana
  misc_feature: MA Experiment 20000460 PARAMETER Experiment Name: At_10percent_PEG_P Parameter: Plant Line Value: WS
  misc_feature: MA Experiment 20000460 PARAMETER Experiment Name: At_10percent_PEG_P Parameter: Timepoint (day) Value: 12
  misc_feature: MA Experiment 20000460 PARAMETER Experiment Name: At_10percent_PEG_P Parameter: Tissue Value: Whole Plant
  misc_feature: MA Experiment 20000460 PARAMETER Experiment Name: At_10percent_PEG_P Parameter: Treatment Value: 10percent PEG vs. No Treatment
  misc_feature: MA Experiment ID: 20000573 Result: Down-regulated in Transcription
  misc_feature: MA Experiment 20000573 PARAMETER Experiment Name: At_100uM_ABA_Mutants__P Parameter: Organism Value: A. thaliana
  misc_feature: MA Experiment 20000573 PARAMETER Experiment Name: At_100uM_ABA_Mutants__P Parameter: Plant Line Value: CS22 vs. Ler wt
  misc_feature: MA Experiment 20000573 PARAMETER Experiment Name: At_100uM_ABA_Mutants__P Parameter: Timepoint (hr) Value: N/A
  misc_feature: MA Experiment 20000573 PARAMETER Experiment Name: At_100uM_ABA_Mutants__P Parameter: Tissue Value: Whole Plant
  misc_feature: MA Experiment 20000573 PARAMETER Experiment Name: At_100uM_ABA_Mutants__P Parameter: Treatment Value: None
  misc_feature: MA Experiment ID: 20000794 Result: Down-regulated in Transcription
  misc_feature: MA Experiment 20000794 PARAMETER Experiment Name: At_Petals_P Parameter: Age (day) Value: 23-25 days
  misc_feature: MA Experiment 20000794 PARAMETER Experiment Name: At_Petals_P Parameter: Plant Line Value: WS
  misc_feature: MA Experiment 20000794 PARAMETER Experiment Name: At_Petals_P Parameter: Tissue Value: Petals vs. Whole plant
  misc_feature: MA Experiment ID: 20001247 Result: Up-regulated in Transcription
  misc_feature: MA Experiment 20001247 PARAMETER Experiment Name: At_Far-red-induction_P Parameter: Age (day) Value: 7
  misc_feature: MA Experiment 20001247 PARAMETER Experiment Name: At_Far-red-induction_P Parameter: Light Value: Far-red vs. White
  misc_feature: MA Experiment 20001247 PARAMETER Experiment Name: At_Far-red-induction_P Parameter: Organism Value: A. thaliana
  misc_feature: MA Experiment 20001247 PARAMETER Experiment Name: At_Far-red-induction_P Parameter: Plant Line Value: Columbia
  misc_feature: MA Experiment 20001247 PARAMETER Experiment Name: At_Far-red-induction_P Parameter: Timepoint (hr) Value: 1
  misc_feature: MA Experiment 20001247 PARAMETER Experiment Name: At_Far-red-induction_P Parameter: Tissue Value: Whole Plant
  misc_feature: MA Experiment ID: 20001451 Result: Down-regulated in Transcription
  misc_feature: MA Experiment 20001451 PARAMETER Experiment Name: At_Far-red-induction_P Parameter: Age (day) Value: 7
  misc_feature: MA Experiment 20001451 PARAMETER Experiment Name: At_Far-red-induction_P Parameter: Light Value: Far-red vs. White
  misc_feature: MA Experiment 20001451 PARAMETER Experiment Name: At_Far-red-induction_P Parameter: Organism Value: A. thaliana
  misc_feature: MA Experiment 20001451 PARAMETER Experiment Name: At_Far-red-induction_P Parameter: Plant Line Value: Columbia
  misc_feature: MA Experiment 20001451 PARAMETER Experiment Name: At_Far-red-induction_P Parameter: Timepoint (hr) Value: 24
  misc_feature: MA Experiment 20001451 PARAMETER Experiment Name: At_Far-red-induction_P Parameter: Tissue Value: Whole Plant
  misc_feature: MA Experiment ID: 20001555 Result: Down-regulated in Transcription
  misc_feature: MA Experiment 20001555 PARAMETER Experiment Name: At_Drought_Soil_Dry_P Parameter: Age (day) Value: 24
  misc_feature: MA Experiment 20001555 PARAMETER Experiment Name: At_Drought_Soil_Dry_P Parameter: Organism Value: A. thaliana
  misc_feature: MA Experiment 20001555 PARAMETER Experiment Name: At_Drought_Soil_Dry_P Parameter: Plant Line Value: WS
  misc_feature: MA Experiment 20001555 PARAMETER Experiment Name: At_Drought_Soil_Dry_P Parameter: Post Timepoint (hr) Value: None
  misc_feature: MA Experiment 20001555 PARAMETER Experiment Name: At_Drought_Soil_Dry_P Parameter: Post-Treatment Value: None
  misc_feature: MA Experiment 20001555 PARAMETER Experiment Name: At_Drought_Soil_Dry_P Parameter: Timepoint (day) Value: 10
  misc_feature: MA Experiment 20001555 PARAMETER Experiment Name: At_Drought_Soil_Dry_P Parameter: Treatment Value: Drought vs. No Drought
  misc_feature: MA Experiment ID: 20001556 Result: Down-regulated in Transcription
  misc_feature: MA Experiment 20001556 PARAMETER Experiment Name: At_Drought_Soil_Dry_P Parameter: Age (day) Value: 26
  misc_feature: MA Experiment 20001556 PARAMETER Experiment Name: At_Drought_Soil_Dry_P Parameter: Organism Value: A. thaliana
  misc_feature: MA Experiment 20001556 PARAMETER Experiment Name: At_Drought_Soil_Dry_P Parameter: Plant Line Value: WS
  misc_feature: MA Experiment 20001556 PARAMETER Experiment Name: At_Drought_Soil_Dry_P Parameter: Post Timepoint (hr) Value: None
  misc_feature: MA Experiment 20001556 PARAMETER Experiment Name: At_Drought_Soil_Dry_P Parameter: Post-Treatment Value: None
  misc_feature: MA Experiment 20001556 PARAMETER Experiment Name: At_Drought_Soil_Dry_P Parameter: Timepoint (day) Value: 12
  misc_feature: MA Experiment 20001556 PARAMETER Experiment Name: At_Drought_Soil_Dry_P Parameter: Treatment Value: Drought vs. No Drought
  misc_feature: MA Experiment ID: 20001904 Result: Down-regulated in Transcription
  misc_feature: MA Experiment 20001904 PARAMETER Experiment Name: At_Drought_Reproduction_P Parameter: Age (day) Value: 37
  misc_feature: MA Experiment 20001904 PARAMETER Experiment Name: At_Drought_Reproduction_P Parameter: Organism Value: A. thaliana
  misc_feature: MA Experiment 20001904 PARAMETER Experiment Name: At_Drought_Reproduction_P Parameter: Plant Line Value: WS
  misc_feature: MA Experiment 20001904 PARAMETER Experiment Name: At_Drought_Reproduction_P Parameter: Timepoint (day) Value: 7
  misc_feature: MA Experiment 20001904 PARAMETER Experiment Name: At_Drought_Reproduction_P Parameter: Tissue Value: Rosettes
  misc_feature: MA Experiment 20001904 PARAMETER Experiment Name: At_Drought_Reproduction_P Parameter: Treatment Value: Drought vs. No Drought
  misc_feature: MA Experiment ID: 20001910 Result: Down-regulated in Transcription
  misc_feature: MA Experiment 20001910 PARAMETER Experiment Name: At_Drought_Reproduction_P Parameter: Age (day) Value: 37
  misc_feature: MA Experiment 20001910 PARAMETER Experiment Name: At_Drought_Reproduction_P Parameter: Organism Value: A. thaliana
  misc_feature: MA Experiment 20001910 PARAMETER Experiment Name: At_Drought_Reproduction_P Parameter: Plant Line Value: WS
  misc_feature: MA Experiment 20001910 PARAMETER Experiment Name: At_Drought_Reproduction_P Parameter: Timepoint (day) Value: 7
  misc_feature: MA Experiment 20001910 PARAMETER Experiment Name: At_Drought_Reproduction_P Parameter: Tissue Value: Flowers
  misc_feature: MA Experiment 20001910 PARAMETER Experiment Name: At_Drought_Reproduction_P Parameter: Treatment Value: Drought vs. No Drought
tctgaaagttcttaagtggttccacgatgtttccattttgttctgacttccgaggccaacgagatgagtccaataaacaaagggcacggaaacattctttttaaattaggtttgtttttttatttttggtttttggtttttcccggaaattgtatgaagtcttcgttacagtttctctctctcaccttctctgtataaagtcttcttgagatcgaaggataacttcaattcaattctctccaaggtacacacagctgatttttgtgataagaagattgattgagatgggtactagagctcagcagattcctttacttgaaggtgagactgataattacgatggtgttactgtaaccatggtggaacctatggattctgaggtttttactgaaagtcttagggcttctctttcgcattggagagaagaggggaagaagggaatttggataaagctgcctcttggattggctaatcttgtggaggctgcagttagtgaaggatttagatatcaccacgcggagcctgagtacttgatgcttgtatcttggatctctgaaactcctgatacaatcccagccaatgcttctcatgttgtaggtgctggtgctttggtcatcaacaaaaatactaaagaggtcctcgttgtccaggagaggagtgggtttttcaaagataaaaatgtgtggaagctgcctactggtgttatcaacgagggcgaggatatatggactggagtagctagggaagtggaagaagaaactggaattattgcagattttgtcgaagtactggctttcaggcaaagccacaaagccatcttaaaaaagaaaacagatatgtttttcctgtgtgtcttaagtccgcgctcttacgatattactgaacaaaaatctgagatcttgcaagctaagtggatgccgatccaagagtatgtagaccaaccatggaacaagaagaacgagatgttcaagttcatggctaacatttgccaaaagaagtgtgaggaagaatacttgggattcgccattgtgccaactaccacatcatctggtaaagagagctttatctactgcaatgcggatcatgccaagcgccttaaagtatcgcgtgaccaagcctctgcttctctctgaaaacattctcatctgattctgtttgatctcggcatgtgtgtgtccagtgtgtacaaaacaggaaactttcttctatattattccgattctacaaaattgcgtctaaatatttaagtttataccatctctatgagccactgtaaaacttgccatcgactt

SEQ ID NO: 84456 - protein, 282 aa, Arabidopsis thaliana; identical to SEQ ID NO: 42540
  peptide (1)..(282): Ceres Seq. ID no. 12675282
  misc_feature (102)..(237): Pfam Name: NUDIX domain Pfam Description: NUDIX domain
  misc_feature (1)..(282): Homolog of NCBI NO: 15235458 NR Description: growth factor like protein; protein id: supported by cDNA: 148575., supported by cDNA: gi_13272466, by cDNA: gi_13877892, supported by cDNA: gi_15810610 [Arabidopsis
  misc_feature (1)..(282): Homolog of NCBI NO: 21553511 NR Description: growth factor like protein [Arabidopsis thaliana]
  misc_feature (1)..(281): Homolog of NCBI NO: 15228147 NR Description: putative mutT domain protein; protein id: [Arabidopsis thaliana] >gi|25387471|pir||G84457 probable mutT
  misc_feature (1)..(282): Homolog of NCBI NO: 38564302 NR Description: At2g04430 [Arabidopsis thaliana]
  misc_feature (1)..(282): Homolog of NCBI NO: 15228145 NR Description: putative mutT domain protein; protein id: [Arabidopsis thaliana] >gi|25387501|pir||E84457 probable mutT
  misc_feature (3)..(269): Homolog of NCBI NO: 9758793 NR Description: MutT domain protein-like [Arabidopsis thaliana]
  misc_feature (3)..(269): Homolog of NCBI NO: 18422823 NR Description: MutT domain protein-like; protein id: supported by cDNA: gi_14596036, supported by cDNA: gi_17978726
  misc_feature (16)..(264): Homolog of NCBI NO: 38564312 NR Description: At4g25434 [Arabidopsis thaliana]
  misc_feature (16)..(161): Homolog of NCBI NO: 30686884 NR Description: MutT/nudix family protein [Arabidopsis thaliana]
  misc_feature (161)..(264): Homolog of NCBI NO: 30686884 NR Description: MutT/nudix family protein [Arabidopsis thaliana]

SEQ ID NO: 84457 - protein, 258 aa, Arabidopsis thaliana; identical to SEQ ID NO: 21781
  peptide (1)..(258): Ceres Seq. ID no. 12675283
  misc_feature (78)..(213): Pfam Name: NUDIX domain Pfam Description: NUDIX domain
  misc_feature (1)..(258): Homolog of NCBI NO: 15235458 NR Description: growth factor like protein; protein id: supported by cDNA: 148575., supported by cDNA: gi_13272466, by cDNA: gi_13877892, supported by cDNA: gi_15810610 [Arabidopsis
  misc_feature (1)..(258): Homolog of NCBI NO: 21553511 NR Description: growth factor like protein [Arabidopsis thaliana]
  misc_feature (1)..(257): Homolog of NCBI NO: 15228147 NR Description: putative mutT domain protein; protein id: [Arabidopsis thaliana] >gi|25387471|pir||G84457 probable mutT
  misc_feature (1)..(258): Homolog of NCBI NO: 38564302 NR Description: At2g04430 [Arabidopsis thaliana]
  misc_feature (1)..(258): Homolog of NCBI NO: 15228145 NR Description: putative mutT domain protein; protein id: [Arabidopsis thaliana] >gi|25387501|pir||E84457 probable mutT
  misc_feature (1)..(245): Homolog of NCBI NO: 9758793 NR Description: MutT domain protein-like [Arabidopsis thaliana]
  misc_feature (1)..(245): Homolog of NCBI NO: 18422823 NR Description: MutT domain protein-like; protein id: supported by cDNA: gi_14596036, supported by cDNA: gi_17978726
  misc_feature (1)..(240): Homolog of NCBI NO: 38564312 NR Description: At4g25434 [Arabidopsis thaliana]
  misc_feature (1)..(137): Homolog of NCBI NO: 30686884 NR Description: MutT/nudix family protein [Arabidopsis thaliana]
  misc_feature (137)..(240): Homolog of NCBI NO: 30686884 NR Description: MutT/nudix family protein [Arabidopsis thaliana]

SEQ ID NO: 84458 - protein, 254 aa, Arabidopsis thaliana; identical to SEQ ID NO: 21782
  peptide (1)..(254): Ceres Seq. ID no. 12675284
  misc_feature (74)..(209): Pfam Name: NUDIX domain Pfam Description: NUDIX domain
  misc_feature (1)..(254): Homolog of NCBI NO: 15235458 NR Description: growth factor like protein; protein id: supported by cDNA: 148575., supported by cDNA: gi_13272466, by cDNA: gi_13877892, supported by cDNA: gi_15810610 [Arabidopsis
  misc_feature (1)..(254): Homolog of NCBI NO: 21553511 NR Description: growth factor like protein [Arabidopsis thaliana]
  misc_feature (1)..(253): Homolog of NCBI NO: 15228147 NR Description: putative mutT domain protein; protein id: [Arabidopsis thaliana] >gi|25387471|pir||G84457 probable mutT
  misc_feature (1)..(254): Homolog of NCBI NO: 38564302 NR Description: At2g04430 [Arabidopsis thaliana]
  misc_feature (1)..(254): Homolog of NCBI NO: 15228145 NR Description: putative mutT domain protein; protein id: [Arabidopsis thaliana] >gi|25387501|pir||E84457 probable mutT
  misc_feature (1)..(241): Homolog of NCBI NO: 9758793 NR Description: MutT domain protein-like [Arabidopsis thaliana]
  misc_feature (1)..(241): Homolog of NCBI NO: 18422823 NR Description: MutT domain protein-like; protein id: supported by cDNA: gi_14596036, supported by cDNA: gi_17978726
  misc_feature (1)..(236): Homolog of NCBI NO: 38564312 NR Description: At4g25434 [Arabidopsis thaliana]
  misc_feature (1)..(133): Homolog of NCBI NO: 30686884 NR Description: MutT/nudix family protein [Arabidopsis thaliana]
  misc_feature (133)..(236): Homolog of NCBI NO: 30686884 NR Description: MutT/nudix family protein [Arabidopsis thaliana]

SEQ ID NO: 84459 - DNA, 1931 bp, Arabidopsis thaliana
  misc_feature (1)..(1931): Ceres Seq. ID no. 12675285
  misc_feature: MA Experiment ID: 20000265 Result: Up-regulated in Transcription
  misc_feature: MA Experiment 20000265 PARAMETER Experiment Name: At_Open_Flower_P Parameter: Age (day) Value: 21
  misc_feature: MA Experiment 20000265 PARAMETER Experiment Name: At_Open_Flower_P Parameter: Plant Line Value: WS
  misc_feature: MA Experiment 20000265 PARAMETER Experiment Name: At_Open_Flower_P Parameter: Tissue Value: Closed Flower vs. Whole Plant
  misc_feature: MA Experiment ID: 20000437 Result: Up-regulated in Transcription
  misc_feature: MA Experiment 20000437 PARAMETER Experiment Name: At_Drought_P Parameter: Age (day) Value: 8
  misc_feature: MA Experiment 20000437 PARAMETER Experiment Name: At_Drought_P Parameter: Organism Value: A. thaliana
  misc_feature: MA Experiment 20000437 PARAMETER Experiment Name: At_Drought_P Parameter: Plant Line Value: WS
  misc_feature: MA Experiment 20000437 PARAMETER Experiment Name: At_Drought_P Parameter: Timepoint (hr) Value: 24
  misc_feature: MA Experiment 20000437 PARAMETER Experiment Name: At_Drought_P Parameter: Tissue Value: Whole Plant
  misc_feature: MA Experiment 20000437 PARAMETER Experiment Name: At_Drought_P Parameter: Treatment Value: Drought vs. No Drought
  misc_feature: MA Experiment ID: 20000794 Result: Up-regulated in Transcription
  misc_feature: MA Experiment 20000794 PARAMETER Experiment Name: At_Petals_P Parameter: Age (day) Value: 23-25 days
  misc_feature: MA Experiment 20000794 PARAMETER Experiment Name: At_Petals_P Parameter: Plant Line Value: WS
  misc_feature: MA Experiment 20000794 PARAMETER Experiment Name: At_Petals_P Parameter: Tissue Value: Petals vs. Whole plant
  misc_feature: MA Experiment ID: 20001911 Result: Up-regulated in Transcription
  misc_feature: MA Experiment 20001911 PARAMETER Experiment Name: At_Drought_Reproduction_P Parameter: Age (day) Value: 40
  misc_feature: MA Experiment 20001911 PARAMETER Experiment Name: At_Drought_Reproduction_P Parameter: Organism Value: A. thaliana
  misc_feature: MA Experiment 20001911 PARAMETER Experiment Name: At_Drought_Reproduction_P Parameter: Plant Line Value: WS
  misc_feature: MA Experiment 20001911 PARAMETER Experiment Name: At_Drought_Reproduction_P Parameter: Timepoint (day) Value: 10
  misc_feature: MA Experiment 20001911 PARAMETER Experiment Name: At_Drought_Reproduction_P Parameter: Tissue Value: Flowers
  misc_feature: MA Experiment 20001911 PARAMETER Experiment Name: At_Drought_Reproduction_P Parameter: Treatment Value: Drought vs. No Drought
atggaagttcccaaaggattctttgagaaactgtggagttttgtctcttttcttccttacttcttcctcttgctgctccttggcgtcaccaaggccctgattattggtccaatatcatctgctataattttggttggcaattcatgtgtcatcattggcctttggccagcacatttcatttggacctactactgtttggcaaggtgtatacccatcaaatttgaaatactttgtttcttgtttcatctccttttaatttccactaaatatcttgtttttgtaacctctagaaccaagagaatagggctggttttgaagaccttggcattggtattatttccactgcctttgctcctctggccagttgctggtatagtaggaagtctcttcggtggaatcgcctacgggtttttcacgcctcttatggctacattcgaggctgtaggagagtctgttactagcaaatgctaccattgctttgttgatgacttcacagatttctgcttccattcttacttctcctacatggatgagttaagagaaatggtttcggccgatgttgaacccttagagataaagttgtctcggctacctagttgtctccttgctagtctcataggtgtgatggtagatgttcttctaataacagctgtcgctgtttacaaaagcccatacatgttactcaaaggatggaagaggctattggaagaccttgttggtagagagggcccattcctagagagtgtctgtgttccatttgcaggtcttgccatattgctatggccactggctgtcgcgggagctgtaatagcttcagttttatccagcttctttcttggactgtacagtggagtcatcgttcatcaggaggactctttcagaatgggacttaactatataattgctgcggtctcactgtttgacgaatatgtaaatgatttactctatttgagagaaggaactagcctgccgaggccttgctataggacgaaaacagagactgttcatgggaaaagaatattaggagagagtaagaacgttgatctcaagagcaaaagaagcagctccctgggttcaaagcttgtttcagaacagtcgaggacactgaaaaaagcaattacactatataaaccagttcaggtatgggaatggttgtttaagtcgtgtgaggtgaatgggaggatacttcttcgcgatggcttgatagatgtgaaggatgtagaggagtgtcttgtcaagggtaattctaagaagctctatatcaaactacccgcgtggacggtgttacagtgtctccttgcatcggctaaatcgaactcatctgggttggtgatcactgatggcgtggagcttacagaactaaacagcccaagagataaagtatttgtgtggctagttggacccttactgataatgaaggagcagataaaaaacctgaagcttactgaggatgaagagttttgtctgaggaaattggtaatggtatgcaaaaatgaaagaaccgaggactgggacaacaccgggttcccgtcaagtgatacagtaagaaaagcacaattgcaagccataatcagaaggctgcaaggaatggtagcatcaatgtctagaataccaacgtttcgacgcagattcatgaacttggttaaagtgttgtacatagaagctcttgaaatgggtgcatcaggtaatcgagctggtgggatactcaaacccaacagcgaccaaacaggaaatctggatcggactgaaacaccggacatggatgttgtctaagtagttatgatatcttgtctttttccttcttccctctgtctaagcggtttcagtagtattttaggatttgttttatattccaatatgtatgttaattaaatcctcaaaaagagcactctttgtcaagaataacatatattcataactttactttaatc

SEQ ID NO: 84460 - protein, 590 aa, Arabidopsis thaliana
  peptide (1)..(590): Ceres Seq. ID no. 12675286
  misc_feature (1)..(590): Homolog of NCBI NO: 15235450 NR Description: putative protein; protein id: At4g12680.1
  misc_feature (1)..(565): Homolog of NCBI NO: 38345330 NR Description: OSJNBa0081L15.3 [Oryza sativa (japonica
  misc_feature (1)..(551): Homolog of NCBI NO: 27311557 NR Description: Unknown protein [Arabidopsis thaliana]
  misc_feature (1)..(551): Homolog of NCBI NO: 30688768 NR Description: expressed protein [Arabidopsis thaliana]
  misc_feature (1)..(551): Homolog of NCBI NO: 9758091 NR Description: dbj|BAA95714.1~gene_id:MNF13.19~strong similarity
  misc_feature (1)..(551): Homolog of NCBI NO: 30693640 NR Description: expressed protein [Arabidopsis thaliana] unknown protein [Arabidopsis thaliana]
  misc_feature (4)..(561): Homolog of NCBI NO: 38344840 NR Description: OSJNBa0064H22.21 [Oryza sativa (japonica
  misc_feature (128)..(419): Homolog of NCBI NO: 7939511 NR Description: emb|CAB40985.1~gene_id:K1G2.10~similar to unknown
  misc_feature (379)..(551): Homolog of NCBI NO: 7939511 NR Description: emb|CAB40985.1~gene_id:K1G2.10~similar to unknown
  misc_feature (15)..(526): Homolog of NCBI NO: 15234594 NR Description: hypothetical protein; protein id: At4g37030.1
MEVPKGFFEKLWSFVSFLPYFFLLLLLGVTKALIIGPISSAIILVGNSCVIIGLWPAHFIWTYYCLARCIPIKFEILCFLFHLLLISTKYLVFVTSRTKRIGLVLKTLALVLFPLPLLLWPVAGIVGSLFGGIAYGFFTPLMATFEAVGESVTSKCYHCFVDDFTDFCFHSYFSYMDELREMVSADVEPLEIKLSRLPSCLLASLIGVMVDVLLITAVAVYKSPYMLLKGWKRLLEDLVGREGPFLESVCVPFAGLAILLWPLAVAGAVIASVLSSFFLGLYSGVIVHQEDSFRMGLNYIIAAVSLFDEYVNDLLYLREGTSLPRPCYRTKTETVHGKRILGESKNVDLKSKRSSSLGSKLVSEQSRTLKKAITLYKPVQVWEWLFKSCEVNGRILLRDGLIDVKDVEECLVKGNSKKLYIKLPAWTVLQCLLASAKSNSSGLVITDGVELTELNSPRDKVFVWLVGPLLIMKEQIKNLKLTEDEEFCLRKLVMVCKNERTEDWDNTGFPSSDTVRKAQLQAIIRRLQGMVASMSRIPTFRRRFMNLVKVLYIEALEMGASGNRAGGILKPNSDQTGNLDRTETPDMDVV

SEQ ID NO: 84461 - protein, 449 aa, Arabidopsis thaliana
  peptide (1)..(449): Ceres Seq. ID no. 12675287
  misc_feature (1)..(449): Homolog of NCBI NO: 15235450 NR Description: putative protein; protein id: At4g12680.1
  misc_feature (1)..(424): Homolog of NCBI NO: 38345330 NR Description: OSJNBa0081L15.3 [Oryza sativa (japonica
  misc_feature (1)..(410): Homolog of NCBI NO: 27311557 NR Description: Unknown protein [Arabidopsis thaliana]
  misc_feature (1)..(410): Homolog of NCBI NO: 30688768 NR Description: expressed protein [Arabidopsis thaliana]
  misc_feature (1)..(410): Homolog of NCBI NO: 9758091 NR Description: dbj|BAA95714.1~gene_id:MNF13.19~strong similarity
  misc_feature (1)..(410): Homolog of NCBI NO: 30693640 NR Description: expressed protein [Arabidopsis thaliana] unknown protein [Arabidopsis thaliana]
  misc_feature (1)..(420): Homolog of NCBI NO: 38344840 NR Description: OSJNBa0064H22.21 [Oryza sativa (japonica
  misc_feature (1)..(278): Homolog of NCBI NO: 7939511 NR Description: emb|CAB40985.1~gene_id:K1G2.10~similar to unknown
  misc_feature (238)..(410): Homolog of NCBI NO: 7939511 NR Description: emb|CAB40985.1~gene_id:K1G2.10~similar to unknown
  misc_feature (1)..(385): Homolog of NCBI NO: 15234594 NR Description: hypothetical protein; protein id: At4g37030.1
MATFEAVGESVTSKCYHCFVDDFTDFCFHSYFSYMDELREMVSADVEPLEIKLSRLPSCLLASLIGVMVDVLLITAVAVYKSPYMLLKGWKRLLEDLVGREGPFLESVCVPFAGLAILLWPLAVAGAVIASVLSSFFLGLYSGVIVHQEDSFRMGLNYIIAAVSLFDEYVNDLLYLREGTSLPRPCYRTKTETVHGKRILGESKNVDLKSKRSSSLGSKLVSEQSRTLKKAITLYKPVQVWEWLFKSCEVNGRILLRDGLIDVKDVEECLVKGNSKKLYIKLPAWTVLQCLLASAKSNSSGLVITDGVELTELNSPRDKVFVWLVGPLLIMKEQIKNLKLTEDEEFCLRKLVMVCKNERTEDWDNTGFPSSDTVRKAQLQAIIRRLQGMVASMSRIPTFRRRFMNLVKVLYIEALEMGASGNRAGGILKPNSDQTGNLDRTETPDMDVV

SEQ ID NO: 84462 - protein, 415 aa, Arabidopsis thaliana
  peptide (1)..(415): Ceres Seq. ID no. 12675288
  misc_feature (1)..(415): Homolog of NCBI NO: 15235450 NR Description: putative protein; protein id: At4g12680.1
  misc_feature (1)..(390): Homolog of NCBI NO: 38345330 NR Description: OSJNBa0081L15.3 [Oryza sativa (japonica
  misc_feature (1)..(376): Homolog of NCBI NO: 27311557 NR Description: Unknown protein [Arabidopsis thaliana]
  misc_feature (1)..(376): Homolog of NCBI NO: 30688768 NR Description: expressed protein [Arabidopsis thaliana]
  misc_feature (1)..(376): Homolog of NCBI NO: 9758091 NR Description: dbj|BAA95714.1~gene_id:MNF13.19~strong similarity
  misc_feature (1)..(376): Homolog of NCBI NO: 30693640 NR Description: expressed protein [Arabidopsis thaliana] unknown protein [Arabidopsis thaliana]
  misc_feature (1)..(386): Homolog of NCBI NO: 38344840 NR Description: OSJNBa0064H22.21 [Oryza sativa (japonica
  misc_feature (1)..(244): Homolog of NCBI NO: 7939511 NR Description: emb|CAB40985.1~gene_id:K1G2.10~similar to unknown
  misc_feature (204)..(376): Homolog of NCBI NO: 7939511 NR Description: emb|CAB40985.1~gene_id:K1G2.10~similar to unknown
  misc_feature (1)..(351): Homolog of NCBI NO: 15234594 NR Description: hypothetical protein; protein id: At4g37030.1
MDELREMVSADVEPLEIKLSRLPSCLLASLIGVMVDVLLITAVAVYKSPYMLLKGWKRLLEDLVGREGPFLESVCVPFAGLAILLWPLAVAGAVIASVLSSFFLGLYSGVIVHQEDSFRMGLNYIIAAVSLFDEYVNDLLYLREGTSLPRPCYRTKTETVHGKRILGESKNVDLKSKRSSSLGSKLVSEQSRTLKKAITLYKPVQVWEWLFKSCEVNGRILLRDGLIDVKDVEECLVKGNSKKLYIKLPAWTVLQCLLASAKSNSSGLVITDGVELTELNSPRDKVFVWLVGPLLIMKEQIKNLKLTEDEEFCLRKLVMVCKNERTEDWDNTGFPSSDTVRKAQLQAIIRRLQGMVASMSRIPTFRRRFMNLVKVLYIEALEMGASGNRAGGILKPNSDQTGNLDRTETPDMDVV

SEQ ID NO: 84463 - DNA, 2335 bp, Arabidopsis thaliana
  misc_feature (1)..(2335): Ceres Seq. ID no. 12675297
  misc_feature: MA Experiment ID: 20000173 Result: Down-regulated in Transcription
  misc_feature: MA Experiment 20000173 PARAMETER Experiment Name: At_42deg_Heat_P Parameter: Age (day) Value: 14
  misc_feature: MA Experiment 20000173 PARAMETER Experiment Name: At_42deg_Heat_P Parameter: Organism Value: A. thaliana
  misc_feature: MA Experiment 20000173 PARAMETER Experiment Name: At_42deg_Heat_P Parameter: Plant Line Value: WS
  misc_feature: MA Experiment 20000173 PARAMETER Experiment Name: At_42deg_Heat_P Parameter: Temperature (deg C) Value: 42 vs. 22
  misc_feature: MA Experiment 20000173 PARAMETER Experiment Name: At_42deg_Heat_P Parameter: Timepoint (hr) Value: 6
  misc_feature: MA Experiment 20000173 PARAMETER Experiment Name: At_42deg_Heat_P Parameter: Tissue Value: Aerial
aaagtctctctctctctctctctgcaaacactgattcaacaaagaagaatcaaaatctccagaaattcgatcgtcgttgaagattcgtctcagtttgtgtagtttctagcttagtgttttggaatcgaaaatggcgggtcgagttaaagaagacgagaagaacgagaagattattaggagtcttcttaaacttcctgagaataagaggtgtataaactgtaacagccttggaccacaatatgtttgcactactttctggacttttgtttgtaccaactgcagtggaatacatcgtgagtttacacatcgtgttaaatcgatatcaatggcgaaatttacctcacaagaagttactgctttgaaagaaggtggaaatcagcatgctaaggatatttattttaaaggattggatcaacagcggcaatcagtgcctgacggaagtaatgttgagcggttaagggacttcatcagacatgtgtatgtaaataaaaggtatacgaatgagaagaatgatgataagtctccaagtgagacacgtagttctagtggttctcggagtccaccttatgaagatggatatgaccgtcgttacggcgacagatcaagtcctggtgggagaagtccagggttcgagacgggtagtaggaatgctgttaataacagaaaaagccctgctcgtcctgagatcctgaatgattggcgcagagaggataggtttgggggtagaaaaacatcagaagagggctcccagtcacctgagcaagtaaaagacttgggttcagctagccctcctgtagctcgacctgttagggaaattttgggtgacagtgttattcctcttcgtgtgggagagcctccaaaaccccctgtcagtagaaataccgatgcttcagcacatgcaaagtcaggtacatcattgagtagtttaatgtccacaaatgagaagccaccagaagtgaagctggagactgctttaagcctgattgattttgatactgattttgaaactcctgctccatctgttgcaattcaagcaccactatcgaccacatctcagcctgctccacagccaacaacttcatctaatgataactgggcatctttcgatgctgcacccagtgcccctagtttaaatgtatcgcaaccaccacccagtggaaacacactggattcacttctctcccagttggcagtgacttcttctgtgccaggtcaggcgtctacaccatctaacggacctgtgaatcttggtcattccacgtcacaaatctttgcaccctttcagaatgagcattcgagtgaacagccatggaacacagcacttgcatctaatgtacagaggtcaatgagtgcaccgtcattgcaacctcttcaaggagtcccttctggtggcctgcagtcttctgaagttaaaccttcgggaagatcagaattacctgcggatttattcgctgtaaactacccatcataccatgcaccagtgcctggatggcaagctggtccacctcatgctatgcactatggcatgcagcagtataataaccccgtgccgtatcagaatgttccgcagccaggcaagtcaatgaacccttttgacttcagccctgggccgccatcacaaacacaaacggaaaatatgttcccttccatggctcctctgcaaggtgcattacctccttcaggcatgatgccttctcaaggagtacacaatcaattcaatataccttctcaaggctcagcccatccatctgcaatgccaccaaggtacatgccttctcaaataccaggaagcatgccacctagcaatgtaaacccaattggcgacataaacacgtcatatgacactcaacaaacatatcaaaattttggaagctcgtttgctgctgcagttcctttgaacccaccttctttccaatcaggaggaaacccatttgggtaagaaagagcgagaatattagctcacgagagctatgttatgcatgaggattgcgtttgtgttctaaggtgtagtataagactataaggaggtattaaatcgaatacaaacatgggttaaatagggtgaacgagggaaggtacgggccatgaacctgaagaagaattgggtttgtgagagtgttagattactgtattttttataagcatcaaaatgatttgaaataggtttgatatttattctttggtgtttctatattccatttccattttgttgtttgtccttcagaaaatcttcaggctcctcctgtgttgtatgattttgtataacagtttacacattgaccataaagtcttgtcaaaattgaataaggtaatttagaattgcttttatgagact

SEQ ID NO: 84464 - protein, 602 aa, Arabidopsis thaliana; identical to SEQ ID NO: 28386
  peptide (1)..(602): Ceres Seq. ID no. 12675298
  misc_feature (12)..(130): Pfam Name: Putative GTPase activating protein for Arf Pfam Description: Putative GTPase activating protein for Arf
  misc_feature (1)..(597): Homolog of NCBI NO: 30680768 NR Description: ARF GAP-like zinc finger-containing protein
  misc_feature (1)..(597): Homolog of NCBI NO: 30680774 NR Description: ARF GAP-like zinc finger-containing protein [Arabidopsis thaliana] >gi|19698913|gb|AAL91192.1| unknown [Arabidopsis thaliana] >gi|30725470|gb|AAP37757.1| At1g08690
  misc_feature (53)..(134): Homolog of NCBI NO: 9802557 NR Description: F22O13.16 [Arabidopsis thaliana]
  misc_feature (3)..(53): Homolog of NCBI NO: 9802557 NR Description: F22O13.16 [Arabidopsis thaliana]
  misc_feature (1)..(102): Homolog of NCBI NO: 7485983 NR Description: hypothetical protein F22O13.17 - Arabidopsis
  misc_feature (5)..(508): Homolog of NCBI NO: 15233867 NR Description: hypothetical protein; protein id: At4g32630.1
  misc_feature (9)..(146): Homolog of NCBI NO: 28850338 NR Description: hypothetical protein [Dictyostelium discoideum]
  misc_feature (6)..(141): Homolog of NCBI NO: 26325842 NR Description: unnamed protein product [Mus musculus]
  misc_feature (6)..(141): Homolog of NCBI NO: 950051 NR Description: nucleoporin-like protein [Homo sapiens]
  misc_feature (6)..(141): Homolog of NCBI NO: 38570132 NR Description: HIV-1 Rev binding protein; Rab, Rev/Rex

SEQ ID NO: 84465 - protein, 537 aa, Arabidopsis thaliana; identical to SEQ ID NO: 28387
  peptide (1)..(537): Ceres Seq. ID no. 12675299
  misc_feature (1)..(65): Pfam Name: Putative GTPase activating protein for Arf Pfam Description: Putative GTPase activating protein for Arf
  misc_feature (1)..(532): Homolog of NCBI NO: 30680768 NR Description: ARF GAP-like zinc finger-containing protein
  misc_feature (1)..(532): Homolog of NCBI NO: 30680774 NR Description: ARF GAP-like zinc finger-containing protein [Arabidopsis thaliana] >gi|19698913|gb|AAL91192.1| unknown [Arabidopsis thaliana] >gi|30725470|gb|AAP37757.1| At1g08690
  misc_feature (1)..(69): Homolog of NCBI NO: 9802557 NR Description: F22O13.16 [Arabidopsis thaliana]
  misc_feature (1)..(37): Homolog of NCBI NO: 7485983 NR Description: hypothetical protein F22O13.17 - Arabidopsis
  misc_feature (1)..(443): Homolog of NCBI NO: 15233867 NR Description: hypothetical protein; protein id: At4g32630.1
  misc_feature (1)..(81): Homolog of NCBI NO: 28850338 NR Description: hypothetical protein [Dictyostelium discoideum]
  misc_feature (1)..(76): Homolog of NCBI NO: 26325842 NR Description: unnamed protein product [Mus musculus]
  misc_feature (1)..(76): Homolog of NCBI NO: 950051 NR Description: nucleoporin-like protein [Homo sapiens]
  misc_feature (1)..(76): Homolog of NCBI NO: 38570132 NR Description: HIV-1 Rev binding protein; Rab, Rev/Rex
  misc_feature (1)..(67): Homolog of NCBI NO: 29245305 NR Description: GLP_333_15386_14190 [Giardia lamblia ATCC 50803]

SEQ ID NO: 84466 - protein, 336 aa, Arabidopsis thaliana; identical to SEQ ID NO: 28388
  peptide (1)..(336): Ceres Seq. ID no. 12675300
  misc_feature (1)..(331): Homolog of NCBI NO: 30680768 NR Description: ARF GAP-like zinc finger-containing protein
  misc_feature (1)..(331): Homolog of NCBI NO: 30680774 NR Description: ARF GAP-like zinc finger-containing protein [Arabidopsis thaliana] >gi|19698913|gb|AAL91192.1| unknown [Arabidopsis thaliana] >gi|30725470|gb|AAP37757.1| At1g08690
  misc_feature (1)..(242): Homolog of NCBI NO: 15233867 NR Description: hypothetical protein; protein id: At4g32630.1
  misc_feature (1)..(37): Homolog of NCBI NO: 21618169 NR Description: ARF GAP-like zinc finger-containing protein ZIGA3
  misc_feature (1)..(37): Homolog of NCBI NO: 10441352 NR Description: ARF GAP-like zinc finger-containing protein ZIGA3
  misc_feature (1)..(37): Homolog of NCBI NO: 18423615 NR Description: expressed protein; protein id: At5g54310.1, by cDNA: 99519., supported by cDNA: gi_20466499 [Arabidopsis >gi|9759504|dbj|BAB10754.1| gene_id:MDK4.13~unknown protein
  misc_feature (1)..(33): Homolog of NCBI NO: 16303736 NR Description: stromal membrane-associated protein SMAP1A [Homo
  misc_feature (1)..(237): Homolog of NCBI NO: 24651922 NR Description: CG8243-PA [Drosophila melanogaster]
  misc_feature (1)..(251): Homolog of NCBI NO: 34909220 NR Description: putative ARF GAP-like zinc finger-containing
  misc_feature (1)..(330): Homolog of NCBI NO: 13592175 NR Description: ppg3 [Leishmania major]

SEQ ID NO: 84467 - DNA, 724 bp, Arabidopsis thaliana
  misc_feature (1)..(724): Ceres Seq. ID no. 12675301
  misc_feature: MA Experiment ID: 108433 Result: Up-regulated in Transcription
  misc_feature: MA Experiment 108433 PARAMETER Experiment Name: At_rhl_Mutant2_cDNA_P Parameter: Age (day) Value: 7
  misc_feature: MA Experiment 108433 PARAMETER Experiment Name: At_rhl_Mutant2_cDNA_P Parameter: Organism Value: A. thaliana
  misc_feature: MA Experiment 108433 PARAMETER Experiment Name: At_rhl_Mutant2_cDNA_P Parameter: Plant Line Value: rhl Mutant vs. wt landsburg
  misc_feature: MA Experiment 108433 PARAMETER Experiment Name: At_rhl_Mutant2_cDNA_P Parameter: Tissue Value: Roots
  misc_feature: MA Experiment ID: 108573 Result: Down-regulated in Transcription
  misc_feature: MA Experiment 108573 PARAMETER Experiment Name: At_Drought_cDNA_P Parameter: Timepoint (hr) Value: 6
  misc_feature: MA Experiment 108573 PARAMETER Experiment Name: At_Drought_cDNA_P Parameter: Tissue Value: Aerial
  misc_feature: MA Experiment 108573 PARAMETER Experiment Name: At_Drought_cDNA_P Parameter: Treatment Value: Drought vs. No Drought
  misc_feature: MA Experiment ID: 108585 Result: Down-regulated in Transcription
  misc_feature: MA Experiment 108585 PARAMETER Experiment Name: At_5mM_NaNP_cDNA_P Parameter: Timepoint (hr) Value: 6
  misc_feature: MA Experiment 108585 PARAMETER Experiment Name: At_5mM_NaNP_cDNA_P Parameter: Tissue Value: Aerial
  misc_feature: MA Experiment 108585 PARAMETER Experiment Name: At_5mM_NaNP_cDNA_P Parameter: Treatment Value: null
  misc_feature: MA Experiment ID: 108595 Result: Down-regulated in Transcription
  misc_feature: MA Experiment 108595 PARAMETER Experiment Name: At_Ler-pi_Ovule_cDNA_P Parameter: Plant Line Value: null
  misc_feature: MA Experiment ID: 20000113 Result: Up-regulated in Transcription
  misc_feature: MA Experiment 20000113 PARAMETER Experiment Name: At_42deg_Heat_cDNA_P Parameter: Temperature (deg C) Value: 42 vs. 22
  misc_feature: MA Experiment 20000113 PARAMETER Experiment Name: At_42deg_Heat_cDNA_P Parameter: Timepoint (hr) Value: 8
  misc_feature: MA Experiment 20000113 PARAMETER Experiment Name: At_42deg_Heat_cDNA_P Parameter: Tissue Value: Aerial
  misc_feature: MA Experiment ID: 20000184 Result: Down-regulated in Transcription
  misc_feature: MA Experiment 20000184 PARAMETER Experiment Name: At_Shoots__P Parameter: Age (day) Value: 7
  misc_feature: MA Experiment 20000184 PARAMETER Experiment Name: At_Shoots__P Parameter: Tissue Value: Shoots vs. Whole Plant
  misc_feature: MA Experiment ID: 20000185 Result: Down-regulated in Transcription
  misc_feature: MA Experiment 20000185 PARAMETER Experiment Name: At_Roots__P Parameter: Age (day) Value: 7 vs. 21
  misc_feature: MA Experiment 20000185 PARAMETER Experiment Name: At_Roots__P Parameter: Organism Value: A. thaliana
  misc_feature: MA Experiment 20000185 PARAMETER Experiment Name: At_Roots__P Parameter: Tissue Value: Roots vs. Whole Plant
  misc_feature: MA Experiment ID: 20000439 Result: Down-regulated in Transcription
  misc_feature: MA Experiment 20000439 PARAMETER Experiment Name: At_Roots__P Parameter: Age (day) Value: 14 vs. 21
  misc_feature: MA Experiment 20000439 PARAMETER Experiment Name: At_Roots__P Parameter: Organism Value: A. thaliana
  misc_feature: MA Experiment 20000439 PARAMETER Experiment Name: At_Roots__P Parameter: Tissue Value: Roots vs. Whole Plant
  misc_feature: MA Experiment ID: 20001557 Result: Down-regulated in Transcription
  misc_feature: MA Experiment 20001557 PARAMETER Experiment Name: At_Drought_Soil_Dry_P Parameter: Age (day) Value: 27
  misc_feature: MA Experiment 20001557 PARAMETER Experiment Name: At_Drought_Soil_Dry_P Parameter: Organism Value: A. thaliana
  misc_feature: MA Experiment 20001557 PARAMETER Experiment Name: At_Drought_Soil_Dry_P Parameter: Plant Line Value: WS
  misc_feature: MA Experiment 20001557 PARAMETER Experiment Name: At_Drought_Soil_Dry_P Parameter: Post Timepoint (hr) Value: 3
  misc_feature: MA Experiment 20001557 PARAMETER Experiment Name: At_Drought_Soil_Dry_P Parameter: Post-Treatment Value: Re-Water vs. No Drought
  misc_feature: MA Experiment 20001557 PARAMETER Experiment Name: At_Drought_Soil_Dry_P Parameter: Timepoint (day) Value: 13
  misc_feature: MA Experiment 20001557 PARAMETER Experiment Name: At_Drought_Soil_Dry_P Parameter: Treatment Value: Drought vs. No Drought
ggtttcagttcagagtaagagagacagagagagagatgagtagcttcacgattccatctccttcctccttctctctttccaattcatataatcaaacctctcctcattccttcactctccgcaattctcgttccaattttgagttccaccggttacgattagatgtggagtctcgaagaagaagcacttctttacggtccaattgctccaccaaaggtacagattcaggtgaaaatgagaacaaaagtgtgttagatgctttctttttggggaaagcattagctgaggttatcaatgagagaattgagtctactgttggagaagtgttgagtactattggaaagtttcaagctgagcaacagaaacaagttcaagagattcaggaagaggttcttgaaagagctaagaaagctaaggaaagagcagctcgagaaactatggaggaacaaggacttgttgcttccaaaccagtagccattactcgaaatccggatgctgttgttgttgcctctgtaacttctacatcgaccgttgagagcaagactataatggttgatgtagaggaaagctcgagttccagtgatgaagactgaacgatggtttcaagggtttaagttgaagatttggtaatagcagcagagacttgtctaaaagggttaagatatatgtacttgaaaaaacgatgtaaacaatgtaagttgatataaatcaaggttaaaccagc

SEQ ID NO: 84468 - protein, 196 aa, Arabidopsis thaliana; identical to SEQ ID NO: 30508
  peptide (1)..(196): Ceres Seq. ID no. 12675302
  misc_feature (12)..(196): Homolog of NCBI NO: 15235625 NR Description: putative protein; protein id: At4g13200.1, by cDNA: 18082., supported by cDNA: gi_17380653 [Arabidopsis
  misc_feature (12)..(196): Homolog of NCBI NO: 21553912 NR Description: unknown [Arabidopsis thaliana]
  misc_feature (83)..(141): Homolog of NCBI NO: 23130619 NR Description: hypothetical protein [Nostoc punctiforme]
  misc_feature (83)..(150): Homolog of NCBI NO: 17232006 NR Description: hypothetical protein [Nostoc sp. PCC 7120]
  misc_feature (83)..(173): Homolog of NCBI NO: 16330265 NR Description: unknown protein [Synechocystis sp. PCC 6803]

SEQ ID NO: 84469 - protein, 185 aa, Arabidopsis thaliana; identical to SEQ ID NO: 30509
  peptide (1)..(185): Ceres Seq. ID no. 12675303
  misc_feature (1)..(185): Homolog of NCBI NO: 15235625 NR Description: putative protein; protein id: At4g13200.1, by cDNA: 18082., supported by cDNA: gi_17380653 [Arabidopsis
  misc_feature (1)..(185): Homolog of NCBI NO: 21553912 NR Description: unknown [Arabidopsis thaliana]
  misc_feature (72)..(130): Homolog of NCBI NO: 23130619 NR Description: hypothetical protein [Nostoc punctiforme]
  misc_feature (72)..(139): Homolog of NCBI NO: 17232006 NR Description: hypothetical protein [Nostoc sp. PCC 7120]
  misc_feature (72)..(162): Homolog of NCBI NO: 16330265 NR Description: unknown protein [Synechocystis sp. PCC 6803]

SEQ ID NO: 84470 - DNA, 1348 bp, Arabidopsis thaliana
  misc_feature (1)..(1348): Ceres Seq. ID no. 12675309
  misc_feature: MA Experiment ID: 20000171 Result: Up-regulated in Transcription
  misc_feature: MA Experiment 20000171 PARAMETER Experiment Name: At_42deg_Heat_P Parameter: Age (day) Value: 14
  misc_feature: MA Experiment 20000171 PARAMETER Experiment Name: At_42deg_Heat_P Parameter: Organism Value: A. thaliana
  misc_feature: MA Experiment 20000171 PARAMETER Experiment Name: At_42deg_Heat_P Parameter: Plant Line Value: WS
  misc_feature: MA Experiment 20000171 PARAMETER Experiment Name: At_42deg_Heat_P Parameter: Temperature (deg C) Value: 42 vs. 22
  misc_feature: MA Experiment 20000171 PARAMETER Experiment Name: At_42deg_Heat_P Parameter: Timepoint (hr) Value: 1
  misc_feature: MA Experiment 20000171 PARAMETER Experiment Name: At_42deg_Heat_P Parameter: Tissue Value: Aerial
  misc_feature: MA Experiment ID: 20000184 Result: Down-regulated in Transcription
  misc_feature: MA Experiment 20000184 PARAMETER Experiment Name: At_Shoots__P Parameter: Age (day) Value: 7
  misc_feature: MA Experiment 20000184 PARAMETER Experiment Name: At_Shoots__P Parameter: Tissue Value: Shoots vs. Whole Plant
  misc_feature: MA Experiment ID: 20000451 Result: Down-regulated in Transcription
  misc_feature: MA Experiment 20000451 PARAMETER Experiment Name: At_CS6879_Shoots-Roots_P Parameter: Age (day) Value: 14
  misc_feature: MA Experiment 20000451 PARAMETER Experiment Name: At_CS6879_Shoots-Roots_P Parameter: Organism Value: A. thaliana
  misc_feature: MA Experiment 20000451 PARAMETER Experiment Name: At_CS6879_Shoots-Roots_P Parameter: Plant Line Value: CS6879 vs. WS
  misc_feature: MA Experiment 20000451 PARAMETER Experiment Name: At_CS6879_Shoots-Roots_P Parameter: Tissue Value: Roots
aaaataaataaaaatagtcaattgcttccagttctaagaactccggtctgccgccgatttcgtttctctttcaccggttctcgcctaccgacgtcttccttccattctttctctcatctgataaccaacctccacatgtctctctcgtcggactccaccgttcctactgtttccacggtcaccatatcctactcagagctcaaggagagcaacatagatttgtctgcaaggattgaagaaggatttggacctaatggacttggaatcctctctgttaaagatgttcctggatattctgctttaagacagaatctacttcagcttgcacctaggttagctggtcttcctgaagaggtgaagagggagcttgaagatcctcatagtaggtataattttggttggagtcatggcaaggagaaacttgaatccgggaagcttgacatgctgaagggttcttactatgctaatcctctacaagatgtacctacgagtaattcatatgaaatacagcggtatccatcgtattgtggatcaaatatatggccaaggaattctttaccggaacttgaaggaggtaactagctttcaaagctcttggtaaactgatgttcgaagttgggctaatggtagcttaccactgtgatcaatatgtgtcaaagggtataaaacaacatgaaaagcaaaatcttgaaaagatactacttggctctcggtgtcacaaaggacggctgctttattatttccctgcacaagagagctctacgcatgacaacgattccatctcatcttggtgtggatggcatacagaccatggttcactcacaggtcttactcgagcaatattttctagagattcagttgaagtaccttgcccagatcctgcttctggcttatacatacaaacacgatcaggtcagatcgttaaggttgtgtatggggaagatgaaatagcataccaaataggcgagacaacatcaattctgtctagtggttatctttgtgctacacctcattgtgttcgggcgccacaaggagaagaggcgcgtggtctagagcgatcgacattcgcgttgttcatgcaacctgactgggaccagaagcttacattcccaaaagaagttacaatacatgaagagttatgtctctctgatgaagtcttgacgtttggagaatatacagagaaactgctcaacaaatactatgatacaaaaccttagtagccttttaagttatatgtgtaaatgacgattccattggtgtaagaaaaatctcaccaaattagtacgttagaagtgaaatttggtttcagtttaaaccatatagaaattacagaagtacaattattggt

SEQ ID NO: 84471 - protein, 203 aa, Arabidopsis thaliana
  peptide (1)..(203): Ceres Seq. ID no. 12675310
  misc_feature (69)..(203): Homolog of NCBI NO: 15235700 NR Description: putative protein; protein id: At4g13400.1
  misc_feature (1)..(15): Homolog of NCBI NO: 15235700 NR Description: putative protein; protein id: At4g13400.1
  misc_feature (1)..(203): Homolog of NCBI NO: 22531058 NR Description: putative protein [Arabidopsis thaliana]
  misc_feature (1)..(199): Homolog of NCBI NO: 28829713 NR Description: similar to Arabidopsis thaliana (Mouse-ear
  misc_feature (27)..(199): Homolog of NCBI NO: 2982272 NR Description: hypothetical protein [Picea mariana]
  misc_feature (48)..(166): Homolog of NCBI NO: 40747370 NR Description: hypothetical protein AN0427.2 [Aspergillus
  misc_feature (1)..(94): Homolog of NCBI NO: 40747370 NR Description: hypothetical protein AN0427.2 [Aspergillus
MFEVGLMVAYHCDQYVSKGIKQHEKQNLEKILLGSRCHKGRLLYYFPAQESSTHDNDSISSWCGWHTDHGSLTGLTRAIFSRDSVEVPCPDPASGLYIQTRSGQIVKVVYGEDEIAYQIGETTSILSSGYLCATPHCVRAPQGEEARGLERSTFALFMQPDWDQKLTFPKEVTIHEELCLSDEVLTFGEYTEKLLNKYYDTKP

SEQ ID NO: 84472 - protein, 197 aa, Arabidopsis thaliana
  peptide (1)..(197): Ceres Seq. ID no. 12675311
  misc_feature (63)..(197): Homolog of NCBI NO: 15235700 NR Description: putative protein; protein id: At4g13400.1
  misc_feature (1)..(197): Homolog of NCBI NO: 22531058 NR Description: putative protein [Arabidopsis thaliana]
  misc_feature (1)..(193): Homolog of NCBI NO: 28829713 NR Description: similar to Arabidopsis thaliana (Mouse-ear
  misc_feature (21)..(193): Homolog of NCBI NO: 2982272 NR Description: hypothetical protein [Picea mariana]
  misc_feature (42)..(160): Homolog of NCBI NO: 40747370 NR Description: hypothetical protein AN0427.2 [Aspergillus
  misc_feature (1)..(88): Homolog of NCBI NO: 40747370 NR Description: hypothetical protein AN0427.2 [Aspergillus
MVAYHCDQYVSKGIKQHEKQNLEKILLGSRCHKGRLLYYFPAQESSTHDNDSISSWCGWHTDHGSLTGLTRAIFSRDSVEVPCPDPASGLYIQTRSGQIVKVVYGEDEIAYQIGETTSILSSGYLCATPHCVRAPQGEEARGLERSTFALFMQPDWDQKLTFPKEVTIHEELCLSDEVLTFGEYTEKLLNKYYDTKP

SEQ ID NO: 84473 - protein, 193 aa, Arabidopsis thaliana
  peptide (1)..(193): Ceres Seq. ID no. 12675312
  misc_feature (46)..(193): Homolog of NCBI NO: 15235700 NR Description: putative protein; protein id: At4g13400.1
  misc_feature (60)..(189): Homolog of NCBI NO: 28829713 NR Description: similar to Arabidopsis thaliana (Mouse-ear
  misc_feature (54)..(193): Homolog of NCBI NO: 40747370 NR Description: hypothetical protein AN0427.2 [Aspergillus
KINKNSQLLPVLRTPVCRRFRFSFTGSRLPTSSFHSFSHLITNLHMSLSSDSTVPTVSTVTISYSELKESNIDLSARIEEGFGPNGLGILSVKDVPGYSALRQNLLQLAPRLAGLPEEVKRELEDPHSRYNFGWSHGKEKLESGKLDMLKGSYYANPLQDVPTSNSYEIQRYPSYCGSNIWPRNSLPELEGGN

SEQ ID NO: 84474 - DNA, 2341 bp, Arabidopsis thaliana
  misc_feature (1)..(2341): Ceres Seq. ID no. 12675317
  misc_feature: MA Experiment ID: 108434 Result: Up-regulated in Transcription
  misc_feature: MA Experiment 108434 PARAMETER Experiment Name: At_Root_Tips_cDNA_P Parameter: Tissue Value: Root Tips
  misc_feature: MA Experiment ID: 108573 Result: Up-regulated in Transcription
  misc_feature: MA Experiment 108573 PARAMETER Experiment Name: At_Drought_cDNA_P Parameter: Timepoint (hr) Value: 6
  misc_feature: MA Experiment 108573 PARAMETER Experiment Name: At_Drought_cDNA_P Parameter: Tissue Value: Aerial
  misc_feature: MA Experiment 108573 PARAMETER Experiment Name: At_Drought_cDNA_P Parameter: Treatment Value: Drought vs. No Drought
  misc_feature: MA Experiment ID: 108577 Result: Down-regulated in Transcription
  misc_feature: MA Experiment 108577 PARAMETER Experiment Name: At_42deg_Heat_cDNA_P Parameter: Temperature (deg C) Value: 42 vs. 22
  misc_feature: MA Experiment 108577 PARAMETER Experiment Name: At_42deg_Heat_cDNA_P Parameter: Timepoint (hr) Value: 6
  misc_feature: MA Experiment 108577 PARAMETER Experiment Name: At_42deg_Heat_cDNA_P Parameter: Tissue Value: Aerial
  misc_feature: MA Experiment ID: 108579 Result: Down-regulated in Transcription
  misc_feature: MA Experiment 108579 PARAMETER Experiment Name: At_4deg_Cold_cDNA_P Parameter: Temperature (deg C) Value: 4 vs. 22
  misc_feature: MA Experiment 108579 PARAMETER Experiment Name: At_4deg_Cold_cDNA_P Parameter: Timepoint (hr) Value: 6
  misc_feature: MA Experiment 108579 PARAMETER Experiment Name: At_4deg_Cold_cDNA_P Parameter: Tissue Value: Aerial
  misc_feature: MA Experiment ID: 108585 Result: Up-regulated in Transcription
  misc_feature: MA Experiment 108585 PARAMETER Experiment Name: At_5mM_NaNP_cDNA_P Parameter: Timepoint (hr) Value: 6
  misc_feature: MA Experiment 108585 PARAMETER Experiment Name: At_5mM_NaNP_cDNA_P Parameter: Tissue Value: Aerial
  misc_feature: MA Experiment 108585 PARAMETER Experiment Name: At_5mM_NaNP_cDNA_P Parameter: Treatment Value: null
  misc_feature: MA Experiment ID: 108595 Result: Down-regulated in Transcription
  misc_feature: MA Experiment 108595 PARAMETER Experiment Name: At_Ler-pi_Ovule_cDNA_P Parameter: Plant Line Value: null
  misc_feature: MA Experiment ID: 20000087 Result: Down-regulated in Transcription
  misc_feature: MA Experiment 20000087 PARAMETER Experiment Name: At_100uM_ABA_Mutants_cDNA_P Parameter: Plant Line Value: WS
  misc_feature: MA Experiment 20000087 PARAMETER Experiment Name: At_100uM_ABA_Mutants_cDNA_P Parameter: Timepoint (hr) Value: 6
  misc_feature: MA Experiment 20000087 PARAMETER Experiment Name: At_100uM_ABA_Mutants_cDNA_P Parameter: Tissue Value: Aerial
  misc_feature: MA Experiment 20000087 PARAMETER Experiment Name: At_100uM_ABA_Mutants_cDNA_P Parameter: Treatment Value: 100uM ABA vs. No Treatment
  misc_feature: MA Experiment ID: 20000113 Result: Down-regulated in Transcription
  misc_feature: MA Experiment 20000113 PARAMETER Experiment Name: At_42deg_Heat_cDNA_P Parameter: Temperature (deg C) Value: 42 vs. 22
  misc_feature: MA Experiment 20000113 PARAMETER Experiment Name: At_42deg_Heat_cDNA_P Parameter: Timepoint (hr) Value: 8
  misc_feature: MA Experiment 20000113 PARAMETER Experiment Name: At_42deg_Heat_cDNA_P Parameter: Tissue Value: Aerial
  misc_feature: MA Experiment ID: 20000224 Result: Down-regulated in Transcription
  misc_feature: MA Experiment ID: 20001451 Result: Up-regulated in Transcription
  misc_feature: MA Experiment 20001451 PARAMETER Experiment Name: At_Far-red-induction_P Parameter: Age (day) Value: 7
  misc_feature: MA Experiment 20001451 PARAMETER Experiment Name: At_Far-red-induction_P Parameter: Light Value: Far-red vs. White
  misc_feature: MA Experiment 20001451 PARAMETER Experiment Name: At_Far-red-induction_P Parameter: Organism Value: A. thaliana
  misc_feature: MA Experiment 20001451 PARAMETER Experiment Name: At_Far-red-induction_P Parameter: Plant Line Value: Columbia
  misc_feature: MA Experiment 20001451 PARAMETER Experiment Name: At_Far-red-induction_P Parameter: Timepoint (hr) Value: 24
  misc_feature: MA Experiment 20001451 PARAMETER Experiment Name: At_Far-red-induction_P Parameter: Tissue Value: Whole Plant
  misc_feature: Pfam Name: F-box Pfam Description: F-box domain
atccttttctcttctcttcccactctctctctctctctatctatcttcttcatctttgtttcagcttctcctttgaaactagattatctccgttaatggcgcctcagatctaaccttgggagttatatatatatacttgttcaactcttcttcgaacgctgtccaacttcttcctctggttcgatcatcgagatctcgaggttatttggccgcaatgcagaagcgaatagccttgtcgtttccagaagaggtactagagcatgtgttctcgtttattcagctggataaggataggaactcagtctctctggtgtgcaagtcatggtacgagatcgagcggtggtgcaggaggaaagtcttcatcgggaactgctacgccgtgagtccagcgacggtgattaggaggttcccgaaagtgagatccgtggagcttaaaggaaaacctcactttgctgactttaatttggtacctgacggatggggaggttacgtgtatccatggattgaggccatgtcttcgtcttacacgtggcttgaagagataaggctgaagaggatggtggtcaccgacgattgcttggagctcatagccaagtcttttaagaattttaaggttcttgtgctttcttcctgcgaaggcttctccaccgatggtctcgctgctatcgctgccacttgcaggaatctgaaagagcttgacttacgagagagtgatgttgacgacgttagtggccactggcttagccatttcccagatacatacacttctttggtatcactcaatatatcttgcttagcatctgaggtcagtttctctgctctggaaaggctggtgactaggtgtcccaatctcaagtctctcaagcttaaccgagctgttccacttgaaaaattggctactttacttcaaagagcacctcaattggaggaattgggcactggtgggtacactgcagaagtgcgaccagatgtttactctggtttatctgtagcgctctctgggtgcaaggaattgaggtgcttatctggattttgggatgctgttcctgcctatcttccagcagtttattcggtttgcagtcggcttacaactttgaatctgagttatgcaacagtccagagctatgatcttgtcaagcttctttgtcaatgccctaaactgcagcgcctctggtgcttgactacatcgaggatgctggtcttgaggtgcttgcttcaacctgcaaggacctacgcgagctgagagtgtttccgtccgagccttttgtcatggaaccaaatgtggcattgacggaacaggggcttgtctccgtctccatgggctgtccaaaactcgagtcggttctctacttctgccgtcaaatgaccaatgctgcattgataaccattgctaggaaccgtcccaacatgactcgcttccgtttgtgcatcattgagccaaaagccccagactatctgactctagagccactggatattggatttggagccatagtagagcactgcaaggatctccgtcgcctctctctatctggcctcttgaccgacaaggtttttgaatacattgggacatatgccaagaagatggaaatgctctcagtggcatttgcaggagacagtgacttaggcatgcatcatgttttgtccgggtgcgatagcttgaggaaactagagataagggactgcccgtttggagacaaggcgcttttggccaatgcttcaaagctggagacaatgcgatccctttggatgtcttcttgttccgtgagttttggagcctgcaagttactaggacagaagatgccaaagctgaatgtggaagtcatcgatgaacggggtgcaccggactcgagaccagagagctgccctgttgagagagtcttcatataccgaacagtggctggtcctcgatttgacatgcctggcttcgtctggaacatggaccaagactcaacaatgaggttttccaggcaaatcattactactaacggattataagacaaagaaacgaggtacatttttcattaatccttgttcatcatcccatataatcgtgttccggtttaggaacatgagagagctcggtcgccaataatttgaatctcggctgcttcatataaccatcaagctcatgagcaatgaataagtggagagagagaaagagagatctaagagagctttgttttatttatgtaagaattattgattgttgtatgtttatttggctacttacactgagagatcctggtggggtatttttcttaagaggataagagatttttttaaaagacaatgtcaaaaatgtaactgttctacttgttttgtttggactcttttatcc

SEQ ID NO: 84475 - protein, 342 aa, Arabidopsis thaliana
  peptide (1)..(342): Ceres Seq. ID no. 12675318
  misc_feature: Pfam Name: F-box Pfam Description: F-box domain
  misc_feature (5)..(322): Homolog of NCBI NO: 18412177 NR Description: F-box protein GRR1-like protein 1, AtFBL18; id: At4g03190.1, supported by cDNA: gi_12658969, supported by gi_15027884 [Arabidopsis thaliana] >gi|25352265|pir||E85040
  misc_feature (5)..(322): Homolog of NCBI NO: 12658970 NR Description: GRR1-like protein 1 [Arabidopsis thaliana]
  misc_feature (5)..(322): Homolog of NCBI NO: 15027885 NR Description: putative F-box protein GRR1 protein 1, AtFBL18
  misc_feature (8)..(322): Homolog of NCBI NO: 12083523 NR Description: similar to Arabidopsis thaliana transport
  misc_feature (9)..(342): Homolog of NCBI NO: 21740736 NR Description: OSJNBa0072K14.1 [Oryza sativa (japonica
  misc_feature (9)..(322): Homolog of NCBI NO: 18405102 NR Description: transport inhibitor response 1 (TIR1), putative; id: At3g26810.1, supported by cDNA: gi_17064983 [Arabidopsis
  misc_feature (9)..(322): Homolog of NCBI NO: 18391439 NR Description: transport inhibitor response 1 (TIR1), putative; id: At1g12820.1, supported by cDNA: gi_20466150 [Arabidopsis
  misc_feature (1)..(322): Homolog of NCBI NO: 18412567 NR Description: transport inhibitor response 1 (TIR1), AtFBL1; id: At3g62980.1, supported by cDNA: gi_11935208, supported by gi_2352493 [Arabidopsis thaliana] >gi|11282337|pir||T48087
  misc_feature (11)..(322): Homolog of NCBI NO: 13249030 NR Description: F-box containing protein TIR1 [Populus tremula x
  misc_feature (11)..(322): Homolog of NCBI NO: 18423092 NR Description: transport inhibitor response 1 (TIR1), putative; id: At5g49980.1, supported by cDNA: gi_15912306 [Arabidopsis >gi|8777429|dbj|BAA97019.1| transport inhibitor response 1
MQKRIALSFPEEVLEHVFSFIQLDKDRNSVSLVCKSWYEIERWCRRKVFIGNCYAVSPATVIRRFPKVRSVELKGKPHFADFNLVPDGWGGYVYPWIEAMSSSYTWLEEIRLKRMVVTDDCLELIAKSFKNFKVLVLSSCEGFSTDGLAAIAATCRNLKELDLRESDVDDVSGHWLSHFPDTYTSLVSLNISCLASEVSFSALERLVTRCPNLKSLKLNRAVPLEKLATLLQRAPQLEELGTGGYTAEVRPDVYSGLSVALSGCKELRCLSGFWDAVPAYLPAVYSVCSRLTTLNLSYATVQSYDLVKLLCQCPKLQRLWCLTTSRMLVLRCLLQPARTYAS

SEQ ID NO: 84476 - protein, 243 aa, Arabidopsis thaliana
  peptide (1)..(243): Ceres Seq. ID no. 12675319
  misc_feature: Pfam Name: F-box Pfam Description: F-box domain
  misc_feature (1)..(223): Homolog of NCBI NO: 18412177 NR Description: F-box protein GRR1-like protein 1, AtFBL18; id: At4g03190.1, supported by cDNA: gi_12658969, supported by gi_15027884 [Arabidopsis thaliana] >gi|25352265|pir||E85040
  misc_feature (1)..(223): Homolog of NCBI NO: 12658970 NR Description: GRR1-like protein 1 [Arabidopsis thaliana]
  misc_feature (1)..(223): Homolog of NCBI NO: 15027885 NR Description: putative F-box protein GRR1 protein 1, AtFBL18
  misc_feature (1)..(223): Homolog of NCBI NO: 12083523 NR Description: similar to Arabidopsis thaliana transport
  misc_feature (1)..(243): Homolog of NCBI NO: 21740736 NR Description: OSJNBa0072K14.1 [Oryza sativa (japonica
  misc_feature (1)..(223): Homolog of NCBI NO: 18405102 NR Description: transport inhibitor response 1 (TIR1), putative; id: At3g26810.1, supported by cDNA: gi_17064983 [Arabidopsis
  misc_feature (1)..(223): Homolog of NCBI NO: 18391439 NR Description: transport inhibitor response 1 (TIR1), putative; id: At1g12820.1, supported by cDNA: gi_20466150 [Arabidopsis
  misc_feature (1)..(223): Homolog of NCBI NO: 18412567 NR Description: transport inhibitor response 1 (TIR1), AtFBL1; id: At3g62980.1, supported by cDNA: gi_11935208, supported by gi_2352493 [Arabidopsis thaliana] >gi|11282337|pir||T48087
  misc_feature (1)..(223): Homolog of NCBI NO: 13249030 NR Description: F-box containing protein TIR1 [Populus tremula x
  misc_feature (1)..(223): Homolog of NCBI NO: 18423092 NR Description: transport inhibitor response 1 (TIR1), putative; id: At5g49980.1, supported by cDNA: gi_15912306 [Arabidopsis >gi|8777429|dbj|BAA97019.1| transport inhibitor response 1
MSSSYTWLEEIRLKRMVVTDDCLELIAKSFKNFKVLVLSSCEGFSTDGLAAIAATCRNLKELDLRESDVDDVSGHWLSHFPDTYTSLVSLNISCLASEVSFSALERLVTRCPNLKSLKLNRAVPLEKLATLLQRAPQLEELGTGGYTAEVRPDVYSGLSVALSGCKELRCLSGFWDAVPAYLPAVYSVCSRLTTLNLSYATVQSYDLVKLLCQCPKLQRLWCLTTSRMLVLRCLLQPARTYAS

SEQ ID NO: 84477 - protein, 242 aa, Arabidopsis thaliana
  peptide (1)..(242): Ceres Seq. ID no. 12675320
  misc_feature: Pfam Name: F-box Pfam Description: F-box domain
  misc_feature (1)..(227): Homolog of NCBI NO: 18412177 NR Description: F-box protein GRR1-like protein 1, AtFBL18; id: At4g03190.1, supported by cDNA: gi_12658969, supported by gi_15027884 [Arabidopsis thaliana] >gi|25352265|pir||E85040
  misc_feature (1)..(227): Homolog of NCBI NO: 12658970 NR Description: GRR1-like protein 1 [Arabidopsis thaliana]
  misc_feature (1)..(227): Homolog of NCBI NO: 15027885 NR Description: putative F-box protein GRR1 protein 1, AtFBL18
  misc_feature (1)..(221): Homolog of NCBI NO: 12083523 NR Description: similar to Arabidopsis thaliana transport
  misc_feature (1)..(221): Homolog of NCBI NO: 21740736 NR Description: OSJNBa0072K14.1 [Oryza sativa (japonica
  misc_feature (1)..(222): Homolog of NCBI NO: 18405102 NR Description: transport inhibitor response 1 (TIR1), putative; id: At3g26810.1, supported by cDNA: gi_17064983 [Arabidopsis
  misc_feature (1)..(221): Homolog of NCBI NO: 18391439 NR Description: transport inhibitor response 1 (TIR1), putative; id: At1g12820.1, supported by cDNA: gi_20466150 [Arabidopsis
  misc_feature (1)..(221): Homolog of NCBI NO: 13249030 NR Description: F-box containing protein TIR1 [Populus tremula x
  misc_feature (1)..(242): Homolog of NCBI NO: 18412567 NR Description: transport inhibitor response 1 (TIR1), AtFBL1; id: At3g62980.1, supported by cDNA: gi_11935208, supported by gi_2352493 [Arabidopsis thaliana] >gi|11282337|pir||T48087
  misc_feature (1)..(221): Homolog of NCBI NO: 18423092 NR Description: transport inhibitor response 1 (TIR1), putative; id: At5g49980.1, supported by cDNA: gi_15912306 [Arabidopsis >gi|8777429|dbj|BAA97019.1| transport inhibitor response 1
MEPNVALTEQGLVSVSMGCPKLESVLYFCRQMTNAALITIARNRPNMTRFRLCIIEPKAPDYLTLEPLDIGFGAIVEHCKDLRRLSLSGLLTDKVFEYIGTYAKKMEMLSVAFAGDSDLGMHHVLSGCDSLRKLEIRDCPFGDKALLANASKLETMRSLWMSSCSVSFGACKLLGQKMPKLNVEVIDERGAPDSRPESCPVERVFIYRTVAGPRFDMPGFVWNMDQDSTMRFSRQIITTNGL

SEQ ID NO: 84478 - DNA, 1494 bp, Arabidopsis thaliana
  misc_feature (1)..(1494): Ceres Seq. ID no. 12675341
  misc_feature: MA Experiment ID: 20000173 Result: Down-regulated in Transcription
  misc_feature: MA Experiment 20000173 PARAMETER Experiment Name: At_42deg_Heat_P Parameter: Age (day) Value: 14
  misc_feature: MA Experiment 20000173 PARAMETER Experiment Name: At_42deg_Heat_P Parameter: Organism Value: A. thaliana
  misc_feature: MA Experiment 20000173 PARAMETER Experiment Name: At_42deg_Heat_P Parameter: Plant Line Value: WS
  misc_feature: MA Experiment 20000173 PARAMETER Experiment Name: At_42deg_Heat_P Parameter: Temperature (deg C) Value: 42 vs. 22
  misc_feature: MA Experiment 20000173 PARAMETER Experiment Name: At_42deg_Heat_P Parameter: Timepoint (hr) Value: 6
  misc_feature: MA Experiment 20000173 PARAMETER Experiment Name: At_42deg_Heat_P Parameter: Tissue Value: Aerial
  misc_feature: MA Experiment ID: 20000179 Result: Up-regulated in Transcription
  misc_feature: MA Experiment 20000179 PARAMETER Experiment Name: At_Germinating_Seeds_P Parameter: Age (hr) Value: 6 vs. 0
  misc_feature: MA Experiment 20000179 PARAMETER Experiment Name: At_Germinating_Seeds_P Parameter: Tissue Value: Germinating Seeds
  misc_feature: MA Experiment ID: 20000182 Result: Down-regulated in Transcription
  misc_feature: MA Experiment 20000182 PARAMETER Experiment Name: At_2mM_SA_P Parameter: Age (day) Value: 14
  misc_feature: MA Experiment 20000182 PARAMETER Experiment Name: At_2mM_SA_P Parameter: Organism Value: A. thaliana
  misc_feature: MA Experiment 20000182 PARAMETER Experiment Name: At_2mM_SA_P Parameter: Plant Line Value: WS
  misc_feature: MA Experiment 20000182 PARAMETER Experiment Name: At_2mM_SA_P Parameter: Timepoint (hr) Value: 6
  misc_feature: MA Experiment 20000182 PARAMETER Experiment Name: At_2mM_SA_P Parameter: Tissue Value: Aerial
  misc_feature: MA Experiment 20000182 PARAMETER Experiment Name: At_2mM_SA_P Parameter: Treatment Value: 2mM SA vs. No Treatment
  misc_feature: MA Experiment ID: 20000184 Result: Down-regulated in Transcription
  misc_feature: MA Experiment 20000184 PARAMETER Experiment Name: At_Shoots__P Parameter: Age (day) Value: 7
  misc_feature: MA Experiment 20000184 PARAMETER Experiment Name: At_Shoots__P Parameter: Tissue Value: Shoots vs. Whole Plant
  misc_feature: MA Experiment ID: 20000185 Result: Down-regulated in Transcription
  misc_feature: MA Experiment 20000185 PARAMETER Experiment Name: At_Roots__P Parameter: Age (day) Value: 7 vs. 21
  misc_feature: MA Experiment 20000185 PARAMETER Experiment Name: At_Roots__P Parameter: Organism Value: A. thaliana
  misc_feature: MA Experiment 20000185 PARAMETER Experiment Name: At_Roots__P Parameter: Tissue Value: Roots vs. Whole Plant
  misc_feature: MA Experiment ID: 20000437 Result: Up-regulated in Transcription
  misc_feature: MA Experiment 20000437 PARAMETER Experiment Name: At_Drought_P Parameter: Age (day) Value: 8
  misc_feature: MA Experiment 20000437 PARAMETER Experiment Name: At_Drought_P Parameter: Organism Value: A. thaliana
  misc_feature: MA Experiment 20000437 PARAMETER Experiment Name: At_Drought_P Parameter: Plant Line Value: WS
  misc_feature: MA Experiment 20000437 PARAMETER Experiment Name: At_Drought_P Parameter: Timepoint (hr) Value: 24
  misc_feature: MA Experiment 20000437 PARAMETER Experiment Name: At_Drought_P Parameter: Tissue Value: Whole Plant
  misc_feature: MA Experiment 20000437 PARAMETER Experiment Name: At_Drought_P Parameter: Treatment Value: Drought vs. No Drought
  misc_feature: MA Experiment ID: 20000438 Result: Down-regulated in Transcription
  misc_feature: MA Experiment 20000438 PARAMETER Experiment Name: At_Shoots__P Parameter: Age (day) Value: 14
  misc_feature: MA Experiment 20000438 PARAMETER Experiment Name: At_Shoots__P Parameter: Tissue Value: Shoots vs. Whole Plant
  misc_feature: MA Experiment ID: 20000439 Result: Down-regulated in Transcription
  misc_feature: MA Experiment 20000439 PARAMETER Experiment Name: At_Roots__P Parameter: Age (day) Value: 14 vs. 21
  misc_feature: MA Experiment 20000439 PARAMETER Experiment Name: At_Roots__P Parameter: Organism Value: A. thaliana
  misc_feature: MA Experiment 20000439 PARAMETER Experiment Name: At_Roots__P Parameter: Tissue Value: Roots vs. Whole Plant
  misc_feature: MA Experiment ID: 20000443 Result: Down-regulated in Transcription
  misc_feature: MA Experiment 20000443 PARAMETER Experiment Name: At_1uM_BR-BRZ__P Parameter: Tissue Value: Shoot Apices
  misc_feature: MA Experiment 20000443 PARAMETER Experiment Name: At_1uM_BR-BRZ__P Parameter: Treatment Value: 1uM BRZ vs. No Treatment
  misc_feature: MA Experiment ID: 20000452 Result: Up-regulated in Transcription
  misc_feature: MA Experiment 20000452 PARAMETER Experiment Name: At_CS6879_Shoots-Roots_P Parameter: Age (day) Value: 14
  misc_feature: MA Experiment 20000452 PARAMETER Experiment Name: At_CS6879_Shoots-Roots_P Parameter: Organism Value: A. thaliana
  misc_feature: MA Experiment 20000452 PARAMETER Experiment Name: At_CS6879_Shoots-Roots_P Parameter: Plant Line Value: CS6879 vs. WS
  misc_feature: MA Experiment 20000452 PARAMETER Experiment Name: At_CS6879_Shoots-Roots_P Parameter: Tissue Value: Shoots
  misc_feature: MA Experiment ID: 20000709 Result: Down-regulated in Transcription
  misc_feature: MA Experiment 20000709 PARAMETER Experiment Name: At_15mM_NH4NO3_L-to-H_P Parameter: Age (hr) Value: 14
  misc_feature: MA Experiment 20000709 PARAMETER Experiment Name: At_15mM_NH4NO3_L-to-H_P Parameter: Organism Value: A. thaliana
  misc_feature: MA Experiment 20000709 PARAMETER Experiment Name: At_15mM_NH4NO3_L-to-H_P Parameter: Plant Line Value: WS
  misc_feature: MA Experiment 20000709 PARAMETER Experiment Name: At_15mM_NH4NO3_L-to-H_P Parameter: Timepoint (hr) Value: 4
  misc_feature: MA Experiment 20000709 PARAMETER Experiment Name: At_15mM_NH4NO3_L-to-H_P Parameter: Tissue Value: Aerial
  misc_feature: MA Experiment 20000709 PARAMETER Experiment Name: At_15mM_NH4NO3_L-to-H_P Parameter: Treatment Value: 15mM NH4NO3 vs. 30mM Mannitol
  misc_feature: MA Experiment ID: 20000794 Result: Down-regulated in Transcription
  misc_feature: MA Experiment 20000794 PARAMETER Experiment Name: At_Petals_P Parameter: Age (day) Value: 23-25 days
  misc_feature: MA Experiment 20000794 PARAMETER Experiment Name: At_Petals_P Parameter: Plant Line Value: WS
  misc_feature: MA Experiment 20000794 PARAMETER Experiment Name: At_Petals_P Parameter: Tissue Value: Petals vs. Whole plant
  misc_feature: MA Experiment ID: 20001247 Result: Down-regulated in Transcription
  misc_feature: MA Experiment 20001247 PARAMETER Experiment Name: At_Far-red-induction_P Parameter: Age (day) Value: 7
  misc_feature: MA Experiment 20001247 PARAMETER Experiment Name: At_Far-red-induction_P Parameter: Light Value: Far-red vs. White
  misc_feature: MA Experiment 20001247 PARAMETER Experiment Name: At_Far-red-induction_P Parameter: Organism Value: A. thaliana
  misc_feature: MA Experiment 20001247 PARAMETER Experiment Name: At_Far-red-induction_P Parameter: Plant Line Value: Columbia
  misc_feature: MA Experiment 20001247 PARAMETER Experiment Name: At_Far-red-induction_P Parameter: Timepoint (hr) Value: 1
  misc_feature: MA Experiment 20001247 PARAMETER Experiment Name: At_Far-red-induction_P Parameter: Tissue Value: Whole Plant
  misc_feature: MA Experiment ID: 20001451 Result: Down-regulated in Transcription
  misc_feature: MA Experiment 20001451 PARAMETER Experiment Name: At_Far-red-induction_P Parameter: Age (day) Value: 7
  misc_feature: MA Experiment 20001451 PARAMETER Experiment Name: At_Far-red-induction_P Parameter: Light Value: Far-red vs. White
  misc_feature: MA Experiment 20001451 PARAMETER Experiment Name: At_Far-red-induction_P Parameter: Organism Value: A. thaliana
  misc_feature: MA Experiment 20001451 PARAMETER Experiment Name: At_Far-red-induction_P Parameter: Plant Line Value: Columbia
  misc_feature: MA Experiment 20001451 PARAMETER Experiment Name: At_Far-red-induction_P Parameter: Timepoint (hr) Value: 24
  misc_feature: MA Experiment 20001451 PARAMETER Experiment Name: At_Far-red-induction_P Parameter: Tissue Value: Whole Plant
  misc_feature: MA Experiment ID: 20001556 Result: Up-regulated in Transcription
  misc_feature: MA Experiment 20001556 PARAMETER Experiment Name: At_Drought_Soil_Dry_P Parameter: Age (day) Value: 26
  misc_feature: MA Experiment 20001556 PARAMETER Experiment Name: At_Drought_Soil_Dry_P Parameter: Organism Value: A. thaliana
  misc_feature: MA Experiment 20001556 PARAMETER Experiment Name: At_Drought_Soil_Dry_P Parameter: Plant Line Value: WS
  misc_feature: MA Experiment 20001556 PARAMETER Experiment Name: At_Drought_Soil_Dry_P Parameter: Post Timepoint (hr) Value: None
  misc_feature: MA Experiment 20001556 PARAMETER Experiment Name: At_Drought_Soil_Dry_P Parameter: Post-Treatment Value: None
  misc_feature: MA Experiment 20001556 PARAMETER Experiment Name: At_Drought_Soil_Dry_P Parameter: Timepoint (day) Value: 12
  misc_feature: MA Experiment 20001556 PARAMETER Experiment Name: At_Drought_Soil_Dry_P Parameter: Treatment Value: Drought vs. No Drought
  misc_feature: MA Experiment ID: 20001558 Result: Down-regulated in Transcription
  misc_feature: MA Experiment 20001558 PARAMETER Experiment Name: At_Drought_Soil_Dry_P Parameter: Age (day) Value: 27
  misc_feature: MA Experiment 20001558 PARAMETER Experiment Name: At_Drought_Soil_Dry_P Parameter: Organism Value: A. thaliana
  misc_feature: MA Experiment 20001558 PARAMETER Experiment Name: At_Drought_Soil_Dry_P Parameter: Plant Line Value: WS
  misc_feature: MA Experiment 20001558 PARAMETER Experiment Name: At_Drought_Soil_Dry_P Parameter: Post Timepoint (hr) Value: 6
  misc_feature: MA Experiment 20001558 PARAMETER Experiment Name: At_Drought_Soil_Dry_P Parameter: Post-Treatment Value: Re-Water vs. No Drought
  misc_feature: MA Experiment 20001558 PARAMETER Experiment Name: At_Drought_Soil_Dry_P Parameter: Timepoint (day) Value: 13
  misc_feature: MA Experiment 20001558 PARAMETER Experiment Name: At_Drought_Soil_Dry_P Parameter: Treatment Value: Drought vs. No Drought
  misc_feature: MA Experiment ID: 20001559 Result: Up-regulated in Transcription
  misc_feature: MA Experiment 20001559 PARAMETER Experiment Name: At_Drought_Soil_Dry_P Parameter: Age (day) Value: 28
  misc_feature: MA Experiment 20001559 PARAMETER Experiment Name: At_Drought_Soil_Dry_P Parameter: Organism Value: A. thaliana
  misc_feature: MA Experiment 20001559 PARAMETER Experiment Name: At_Drought_Soil_Dry_P Parameter: Plant Line Value: WS
  misc_feature: MA Experiment 20001559 PARAMETER Experiment Name: At_Drought_Soil_Dry_P Parameter: Post Timepoint (hr) Value: 29
  misc_feature: MA Experiment 20001559 PARAMETER Experiment Name: At_Drought_Soil_Dry_P Parameter: Post-Treatment Value: Re-Water vs. No Drought
  misc_feature: MA Experiment 20001559 PARAMETER Experiment Name: At_Drought_Soil_Dry_P Parameter: Timepoint (day) Value: 14
  misc_feature: MA Experiment 20001559 PARAMETER Experiment Name: At_Drought_Soil_Dry_P Parameter: Treatment Value: Drought vs. No Drought
  misc_feature: MA Experiment ID: 20001757 Result: Down-regulated in Transcription
  misc_feature: MA Experiment 20001757 PARAMETER Experiment Name: At_50mM_NH4NO3_L-to-H_P Parameter: Timepoint (hr) Value: 6
  misc_feature: MA Experiment 20001757 PARAMETER Experiment Name: At_50mM_NH4NO3_L-to-H_P Parameter: Tissue Value: Leaf
  misc_feature: MA Experiment 20001757 PARAMETER Experiment Name: At_50mM_NH4NO3_L-to-H_P Parameter: Treatment Value: 50mM NH4NO3 vs 100mM Mannitol
  misc_feature: MA Experiment ID: 20001905 Result: Down-regulated in Transcription
  misc_feature: MA Experiment 20001905 PARAMETER Experiment Name: At_Drought_Reproduction_P Parameter: Age (day) Value: 40
  misc_feature: MA Experiment 20001905 PARAMETER Experiment Name: At_Drought_Reproduction_P Parameter: Organism Value: A. thaliana
  misc_feature: MA Experiment 20001905 PARAMETER Experiment Name: At_Drought_Reproduction_P Parameter: Plant Line Value: WS
  misc_feature: MA Experiment 20001905 PARAMETER Experiment Name: At_Drought_Reproduction_P Parameter: Timepoint (day) Value: 10
  misc_feature: MA Experiment 20001905 PARAMETER Experiment Name: At_Drought_Reproduction_P Parameter: Tissue Value: Rosettes
  misc_feature: MA Experiment 20001905 PARAMETER Experiment Name: At_Drought_Reproduction_P Parameter: Treatment Value: Drought vs. No Drought
gggactgagaaagtagcagcttcgtttgcttcctctgatatttttctacactctctgtctctctctaaagatgaattgtcttcagaatcttcccagatgttcagtctcacctctgctgggattcgggtgcattcaaagagatcattcttcttcttcttcttctttgaagatgctaatatcgcctccgatcaaagccaatgatccaaaatctcgacttgttttacattatcagagtcaaaatccagctcagagatgagtggtgttgcaaaggatgaagagaaatctgatgaatatagccaagacatgactcaagctatgggtgctgttctaacttacaggcacgagttaggaatgaactacaactttattcgtccagatctaattgttggatcctgcttacagacccctgaagatgttgacaagcttcgtaaaattggagttaaaaccatattttgcttgcaacaagatccagacctggatgcagaatgccttgaccaatccttccagatattttggagtagacataagcagcatccaagcctatgctaagaaatatagtgatattcagcatattcgctgtgaaattagagactttgatgcatttgatttgagaatgcgtcttccagccgtggttggtactctttacaaagctgttaagcgaaatggaggagttacatatgtgcactgcactgctggaatgggaagggctcctgctgttgcgttgacatacatgttctgggtgcaaggctataagcttatggaagctcataaattacttatgagcaaaaggtcgtgctttccgaagctggatgctatcagaaatgcaacaattgatattcttacaggactcaagaggaagactgttactctgacactgaaagataaggggttctccagagtagaaatttctggccttgacattggatggggacagaggatacctctaacactggacaagggaacaggattctggatcctaaagagagaactgcctgaaggacagtttgaatataaatacatcatagatggtgaatggacacacaatgaggccgaaccgtttataggacctaacaaagacggccataccaacaattacgctaaagtaaaaatgtctctgtctcttaacatatagctgaacaagttttgatgaatgagttaatgctgtaatgttgttgtgtactaatgaattaggtagtggacgatccaacaagtgtggatggtacaactcgggagagactatcgagcgaagaccctgagctgttggaggaagaacgctcgaaactaatccagttcttggagacttgttctgaggcagaagtttgagagttgagagcatccgactagactatgtgaatgtacaacttactagtaacaataaaatgcttcatgttagtaatacatacagttacgcttatagcagcaaaagaaaaaaacatgaagttagtagtactatgttcaagtataatatatagtttaaaatctttgttttttctt

SEQ ID NO: 84479 - protein, 239 aa, Arabidopsis thaliana
  peptide (1)..(239): Ceres Seq. ID no. 12675342
  misc_feature (53)..(127): Pfam Name: Dual specificity phosphatase, catalytic domain Pfam Description: Dual specificity phosphatase, catalytic domain
  misc_feature (33)..(231): Homolog of NCBI NO: 18409505 NR Description: putative protein; protein id: At3g52180.1, by cDNA: 114734., supported by cDNA: gi_16612245 [Arabidopsis
  misc_feature (33)..(231): Homolog of NCBI NO: 21536905 NR Description: unknown [Arabidopsis thaliana]
  misc_feature (33)..(231): Homolog of NCBI NO: 16612246 NR Description: AT3g52180/F4F15_290 [Arabidopsis thaliana]
  misc_feature (33)..(159): Homolog of NCBI NO: 11288831 NR Description: hypothetical protein F4F15.290 - Arabidopsis >gi|4678947|emb|CAB41338.1| putative protein [Arabidopsis
  misc_feature (175)..(231): Homolog of NCBI NO: 11288831 NR Description: hypothetical protein F4F15.290 - Arabidopsis >gi|4678947|emb|CAB41338.1| putative protein [Arabidopsis
  misc_feature (1)..(239): Homolog of NCBI NO: 11544661 NR Description: PTPKIS1 (truncated form) [Arabidopsis thaliana]
  misc_feature (29)..(231): Homolog of NCBI NO: 14970762 NR Description: protein tyrosine phosphatase [Lycopersicon
  misc_feature (104)..(194): Homolog of NCBI NO: 34902388 NR Description: Unknown protein [Oryza sativa (japonica
  misc_feature (195)..(231): Homolog of NCBI NO: 34902388 NR Description: Unknown protein [Oryza sativa (japonica
  misc_feature (33)..(142): Homolog of NCBI NO: 18399058 NR Description: expressed protein; protein id: At3g10940.1, by cDNA: 3056. [Arabidopsis thaliana]
MLTSFVKLELKPYFACNKIQTWMQNALTNPSRYFGVDISSIQAYAKKYSDIQHIRCEIRDFDAFDLRMRLPAVVGTLYKAVKRNGGVTYVHCTAGMGRAPAVALTYMFWVQGYKLMEAHKLLMSKRSCFPKLDAIRNATIDILTGLKRKTVTLTLKDKGFSRVEISGLDIGWGQRIPLTLDKGTGFWILKRELPEGQFEYKYIIDGEWTHNEAEPFIGPNKDGHTNNYAKVKMSLSLNI

SEQ ID NO: 84480 - protein, 217 aa, Arabidopsis thaliana
  peptide (1)..(217): Ceres Seq. ID no. 12675343
  misc_feature (31)..(105): Pfam Name: Dual specificity phosphatase, catalytic domain Pfam Description: Dual specificity phosphatase, catalytic domain
  misc_feature (11)..(209): Homolog of NCBI NO: 18409505 NR Description: putative protein; protein id: At3g52180.1, by cDNA: 114734., supported by cDNA: gi_16612245 [Arabidopsis
  misc_feature (11)..(209): Homolog of NCBI NO: 21536905 NR Description: unknown [Arabidopsis thaliana]
  misc_feature (11)..(209): Homolog of NCBI NO: 16612246 NR Description: AT3g52180/F4F15_290 [Arabidopsis thaliana]
  misc_feature (11)..(137): Homolog of NCBI NO: 11288831 NR Description: hypothetical protein F4F15.290 - Arabidopsis >gi|4678947|emb|CAB41338.1| putative protein [Arabidopsis
  misc_feature (153)..(209): Homolog of NCBI NO: 11288831 NR Description: hypothetical protein F4F15.290 - Arabidopsis >gi|4678947|emb|CAB41338.1| putative protein [Arabidopsis
  misc_feature (1)..(217): Homolog of NCBI NO: 11544661 NR Description: PTPKIS1 (truncated form) [Arabidopsis thaliana]
  misc_feature (7)..(209): Homolog of NCBI NO: 14970762 NR Description: protein tyrosine phosphatase [Lycopersicon
  misc_feature (82)..(172): Homolog of NCBI NO: 34902388 NR Description: Unknown protein [Oryza sativa (japonica
  misc_feature (173)..(209): Homolog of NCBI NO: 34902388 NR Description: Unknown protein [Oryza sativa (japonica
  misc_feature (11)..(120): Homolog of NCBI NO: 18399058 NR Description: expressed protein; protein id: At3g10940.1, by cDNA: 3056. [Arabidopsis thaliana]
MQNALTNPSRYFGVDISSIQAYAKKYSDIQHIRCEIRDFDAFDLRMRLPAVVGTLYKAVKRNGGVTYVHCTAGMGRAPAVALTYMFWVQGYKLMEAHKLLMSKRSCFPKLDAIRNATIDILTGLKRKTVTLTLKDKGFSRVEISGLDIGWGQRIPLTLDKGTGFWILKRELPEGQFEYKYIIDGEWTHNEAEPFIGPNKDGHTNNYAKVKMSLSLNI

SEQ ID NO: 84481 - protein, 172 aa, Arabidopsis thaliana
  peptide (1)..(172): Ceres Seq. ID no. 12675344
  misc_feature (1)..(60): Pfam Name: Dual specificity phosphatase, catalytic domain Pfam Description: Dual specificity phosphatase, catalytic domain
  misc_feature (1)..(164): Homolog of NCBI NO: 18409505 NR Description: putative protein; protein id: At3g52180.1, by cDNA: 114734., supported by cDNA: gi_16612245 [Arabidopsis
  misc_feature (1)..(164): Homolog of NCBI NO: 21536905 NR Description: unknown [Arabidopsis thaliana]
  misc_feature (1)..(164): Homolog of NCBI NO: 16612246 NR Description: AT3g52180/F4F15_290 [Arabidopsis thaliana]
  misc_feature (1)..(92): Homolog of NCBI NO: 11288831 NR Description: hypothetical protein F4F15.290 - Arabidopsis >gi|4678947|emb|CAB41338.1| putative protein [Arabidopsis
  misc_feature (108)..(164): Homolog of NCBI NO: 11288831 NR Description: hypothetical protein F4F15.290 - Arabidopsis >gi|4678947|emb|CAB41338.1| putative protein [Arabidopsis
  misc_feature (1)..(172): Homolog of NCBI NO: 11544661 NR Description: PTPKIS1 (truncated form) [Arabidopsis thaliana]
  misc_feature (1)..(164): Homolog of NCBI NO: 14970762 NR Description: protein tyrosine phosphatase [Lycopersicon
  misc_feature (37)..(127): Homolog of NCBI NO: 34902388 NR Description: Unknown protein [Oryza sativa (japonica
  misc_feature (128)..(164): Homolog of NCBI NO: 34902388 NR Description: Unknown protein [Oryza sativa (japonica
  misc_feature (1)..(75): Homolog of NCBI NO: 18399058 NR Description: expressed protein; protein id: At3g10940.1, by cDNA: 3056. [Arabidopsis thaliana]
MRLPAVVGTLYKAVKRNGGVTYVHCTAGMGRAPAVALTYMFWVQGYKLMEAHKLLMSKRSCFPKLDAIRNATIDILTGLKRKTVTLTLKDKGFSRVEISGLDIGWGQRIPLTLDKGTGFWILKRELPEGQFEYKYIIDGEWTHNEAEPFIGPNKDGHTNNYAKVKMSLSLNI

SEQ ID NO: 84482 - DNA, 2243 bp, Arabidopsis thaliana
  misc_feature (1)..(2243): Ceres Seq. ID no. 12675353
  misc_feature: MA Experiment ID: 20000185 Result: Up-regulated in Transcription
  misc_feature: MA Experiment 20000185 PARAMETER Experiment Name: At_Roots__P Parameter: Age (day) Value: 7 vs. 21
  misc_feature: MA Experiment 20000185 PARAMETER Experiment Name: At_Roots__P Parameter: Organism Value: A. thaliana
  misc_feature: MA Experiment 20000185 PARAMETER Experiment Name: At_Roots__P Parameter: Tissue Value: Roots vs. Whole Plant
  misc_feature: MA Experiment ID: 20000224 Result: Up-regulated in Transcription
tcaaaccctgctctcttttctccaagtgctctcatggtgcttccgctcttccggcgcgctgcgatcgcccggacttcctcgcttctcagagctcgtcttttcgctcctgcctccgaattccattctcgcttttctaatggactataccacttggacgacaaaattagtagcagtaatggtgtgaggtctgcctctatagacttgattacaagaatggatgatagttctccaaagcccattctgcgatttggcgtgcaaaacttttcatctacaggacccatatcacagacggttcttgcaatgccagccttgtctcctactatgagtcatggaaatgttgtaaaatggatgaagaaagaaggtgacaaggtagaggtgggtgatgtactatgtgagatagagacagacaaagccactgtagaatttgagagtcaagaggaaggatttctggccaagattttagtcactgaaggatcaaaggatatccctgttaatgaaccgattgcaataatggttgaggaggaagacgacattaaaaacgttcctgctaccatagagggtggacgagatggtaaagaggaaacatcagctcatcaagtgatgaaacctgacgaaagcacacaacaaaaaagttccattcagcccgatgcatcagatcttcccccacatgtcgtcttagaaatgccagcactttctcctacaatgaaccaaggtaatattgccaaatggtggaaaaaagagggtgacaagattgaagtgggtgatgtcataggtgagatcgagactgacaaagccactctggaatttgaaagccttgaagaggggtacttagctaagattctaattcctgaaggttccaaggatgtggcggtgggaaagccgattgccctaatagttgaagatgctgaaagtattgaagccatcaagtcttcttccgcaggtagttctgaggttgatacagttaaagaagtccctgacagtgttgtagataaacctacagagaggaaagcaggcttcacaaagatcagtcctgctgcaaagctattgattttagaacatggattggaggcatcatcaattgaggcatcgggtccctatggtacattattgaaatcagacgttgtggccgcaattgcttctggaaaagcttctaaatcatctgcgtctacgaagaagaagcaaccatcaaaggagaccccgtctaaatcctcctccacatcgaagccttctgtgacacagtcagataataattatgaagattttccaaatagtcaaattcgcaagattatagcaaaacgtttattggaatcaaaacagaagataccccatttgtatttacaatcagatgttgtattggatcctcttcttgcatttagaaaagaacttcaagaaaaccatggcgttaaagtgtctgtcaatgacatagttattaaagcagtggcagtcgcactgaggaatgtacgacaagctaatgctttctgggatgctgagaaaggagatatcgttatgtgtgacagtgttgacatatcaattgcagttgcaactgagaagggcttaatgactccaattatcaagaatgcagaccagaaatctatttctgctatttccttagaggttaaggagctggcacaaaaggctcgatctggaaagcttgctcctcatgagtttcaaggagggacattcagcatatcaaatctaggaatgtatcctgtggataatttctgcgcaatcattaacccccctcaggctgggattctagcagttggtagaggaaacaaagtggttgagccagttattggactagatggaattgagaagccttctgttgtgacaaaaatgaatgtaacgttatccgctgatcatcggatctttgatggacaagttggagcttcgtttatgtctgaattgcgttcaaactttgaggatgttcgaagacttcttctgtgagaaagatccaactgtttaccaaatgaatcttggattactacataataaacctcggaccaacccacgtgcacatccagaaccagaactgctggtctacattgttaactctgatcacatgtttcatttttttccatttggttcatatacttaccaaaatttgttttggtctttaacaattcgtcttatagattggtaacttcctgaggtattttttgtctggtctgtcctctgcaaaataaataatttcagctgtcaatccgcaactggtgaaataatttaaaaagtattttaccctc

SEQ ID NO: 84483 - protein, 648 aa, Arabidopsis thaliana
  peptide (1)..(648): Ceres Seq. ID no. 12675354
  misc_feature (415)..(648): Pfam Name: 2-oxoacid dehydrogenases acyltransferase Pfam Description: 2-oxoacid dehydrogenases acyltransferase
  misc_feature (39)..(648): Homolog of NCBI NO: 1076318 NR Description: dihydrolipoamide S-acetyltransferase (EC
  misc_feature (93)..(648): Homolog of NCBI NO: 21594641 NR Description: Unknown (protein for MGC:27747) [Mus musculus]
  misc_feature (93)..(648): Homolog of NCBI NO: 27762280 NR Description: dihydrolipoamide S-acetyltransferase [Danio rerio]
  misc_feature (93)..(648): Homolog of NCBI NO: 20805283 NR Description: dihydrolipoamide acetyltransferase precursor
  misc_feature (93)..(648): Homolog of NCBI NO: 34863356 NR Description: dihydrolipoamide acetyltransferase [Rattus
  misc_feature (93)..(648): Homolog of NCBI NO: 266685 NR Description: DIHYDROLIPOAMIDE ACETYLTRANSFERASE COMPONENT OF
  misc_feature (93)..(648): Homolog of NCBI NO: 16580128 NR Description: dihydrolipoamide S-acetyltransferase precursor
  misc_feature (93)..(648): Homolog of NCBI NO: 14587786 NR Description: dihydrolipoamide acetyltransferase [Sus scrofa]
  misc_feature (217)..(648): Homolog of NCBI NO: 18400212 NR Description: putative acetyltransferase; protein id: supported by cDNA: gi_13605806, supported by cDNA: gi_20147146, by cDNA: gi_20260137 [Arabidopsis thaliana]
  misc_feature (206)..(648): Homolog of NCBI NO: 5669871 NR Description: dihydrolipoamide S-acetyltransferase [Zea mays]
SNPALFSPSALMVLPLFRRAAIARTSSLLRARLFAPASEFHSRFSNGLYHLDDKISSSNGVRSASIDLITRMDDSSPKPILRFGVQNFSSTGPISQTVLAMPALSPTMSHGNVVKWMKKEGDKVEVGDVLCEIETDKATVEFESQEEGFLAKILVTEGSKDIPVNEPIAIMVEEEDDIKNVPATIEGGRDGKEETSAHQVMKPDESTQQKSSIQPDASDLPPHVVLEMPALSPTMNQGNIAKWWKKEGDKIEVGDVIGEIETDKATLEFESLEEGYLAKILIPEGSKDVAVGKPIALIVEDAESIEAIKSSSAGSSEVDTVKEVPDSVVDKPTERKAGFTKISPAAKLLILEHGLEASSIEASGPYGTLLKSDVVAAIASGKASKSSASTKKKQPSKETPSKSSSTSKPSVTQSDNNYEDFPNSQIRKIIAKRLLESKQKIPHLYLQSDVVLDPLLAFRKELQENHGVKVSVNDIVIKAVAVALRNVRQANAFWDAEKGDIVMCDSVDISIAVATEKGLMTPIIKNADQKSISAISLEVKELAQKARSGKLAPHEFQGGTFSISNLGMYPVDNFCAIINPPQAGILAVGRGNKVVEPVIGLDGIEKPSVVTKMNVTLSADHRIFDGQVGASFMSELRSNFEDVRRLLL

SEQ ID NO: 84484 - protein, 637 aa, Arabidopsis thaliana; identical to SEQ ID NO: 39890
  peptide (1)..(637): Ceres Seq. ID no. 12675355
  misc_feature (404)..(637): Pfam Name: 2-oxoacid dehydrogenases acyltransferase Pfam Description: 2-oxoacid dehydrogenases acyltransferase
  misc_feature (28)..(637): Homolog of NCBI NO: 1076318 NR Description: dihydrolipoamide S-acetyltransferase (EC
  misc_feature (82)..(637): Homolog of NCBI NO: 21594641 NR Description: Unknown (protein for MGC:27747) [Mus musculus]
  misc_feature (82)..(637): Homolog of NCBI NO: 27762280 NR Description: dihydrolipoamide S-acetyltransferase [Danio rerio]
  misc_feature (82)..(637): Homolog of NCBI NO: 20805283 NR Description: dihydrolipoamide acetyltransferase precursor
  misc_feature (82)..(637): Homolog of NCBI NO: 34863356 NR Description: dihydrolipoamide acetyltransferase [Rattus
  misc_feature (82)..(637): Homolog of NCBI NO: 266685 NR Description: DIHYDROLIPOAMIDE ACETYLTRANSFERASE COMPONENT OF
  misc_feature (82)..(637): Homolog of NCBI NO: 16580128 NR Description: dihydrolipoamide S-acetyltransferase precursor
  misc_feature (82)..(637): Homolog of NCBI NO: 14587786 NR Description: dihydrolipoamide acetyltransferase [Sus scrofa]
  misc_feature (206)..(637): Homolog of NCBI NO: 18400212 NR Description: putative acetyltransferase; protein id: supported by cDNA: gi_13605806, supported by cDNA: gi_20147146, by cDNA: gi_20260137 [Arabidopsis thaliana]
  misc_feature (195)..(637): Homolog of NCBI NO: 5669871 NR Description: dihydrolipoamide S-acetyltransferase [Zea mays]

SEQ ID NO: 84485 - protein, 577 aa, Arabidopsis thaliana; identical to SEQ ID NO: 39891
  peptide (1)..(577): Ceres Seq. ID no. 12675356
  misc_feature (344)..(577): Pfam Name: 2-oxoacid dehydrogenases acyltransferase Pfam Description: 2-oxoacid dehydrogenases acyltransferase
  misc_feature (1)..(577): Homolog of NCBI NO: 1076318 NR Description: dihydrolipoamide S-acetyltransferase (EC
  misc_feature (22)..(577): Homolog of NCBI NO: 21594641 NR Description: Unknown (protein for MGC:27747) [Mus musculus]
  misc_feature (22)..(577): Homolog of NCBI NO: 27762280 NR Description: dihydrolipoamide S-acetyltransferase [Danio rerio]
  misc_feature (22)..(577): Homolog of NCBI NO: 20805283 NR Description: dihydrolipoamide acetyltransferase precursor
  misc_feature (22)..(577): Homolog of NCBI NO: 34863356 NR Description: dihydrolipoamide acetyltransferase [Rattus
  misc_feature (22)..(577): Homolog of NCBI NO: 266685 NR Description: DIHYDROLIPOAMIDE ACETYLTRANSFERASE COMPONENT OF
  misc_feature (22)..(577): Homolog of NCBI NO: 16580128 NR Description: dihydrolipoamide S-acetyltransferase precursor
  misc_feature (22)..(577): Homolog of NCBI NO: 14587786 NR Description: dihydrolipoamide acetyltransferase [Sus scrofa]
  misc_feature (146)..(577): Homolog of NCBI NO: 18400212 NR Description: putative acetyltransferase; protein id: supported by cDNA: gi_13605806, supported by cDNA: gi_20147146, by cDNA: gi_20260137 [Arabidopsis thaliana]
  misc_feature (135)..(577): Homolog of NCBI NO: 5669871 NR Description: dihydrolipoamide S-acetyltransferase [Zea mays]

SEQ ID NO: 84486 - DNA, 1451 bp, Arabidopsis thaliana
  misc_feature (1)..(1451): Ceres Seq. ID no. 12675441
  misc_feature: MA Experiment ID: 108569 Result: Up-regulated in Transcription
  misc_feature: MA Experiment 108569 PARAMETER Experiment Name: At_0.001%_MeJA__cDNA_P Parameter: Timepoint (hr) Value: 6
  misc_feature: MA Experiment 108569 PARAMETER Experiment Name: At_0.001%_MeJA__cDNA_P Parameter: Tissue Value: Aerial
  misc_feature: MA Experiment 108569 PARAMETER Experiment Name: At_0.001%_MeJA__cDNA_P Parameter: Treatment Value: 0.001% MeJA vs. No Treatment
  misc_feature: MA Experiment ID: 108572 Result: Down-regulated in Transcription
  misc_feature: MA Experiment 108572 PARAMETER Experiment Name: At_Drought_cDNA_P Parameter: Timepoint (hr) Value: 1
  misc_feature: MA Experiment 108572 PARAMETER Experiment Name: At_Drought_cDNA_P Parameter: Tissue Value: Aerial
  misc_feature: MA Experiment 108572 PARAMETER Experiment Name: At_Drought_cDNA_P Parameter: Treatment Value: Drought vs. No Drought
  misc_feature: MA Experiment ID: 108585 Result: Up-regulated in Transcription
  misc_feature: MA Experiment 108585 PARAMETER Experiment Name: At_5mM_NaNP_cDNA_P Parameter: Timepoint (hr) Value: 6
  misc_feature: MA Experiment 108585 PARAMETER Experiment Name: At_5mM_NaNP_cDNA_P Parameter: Tissue Value: Aerial
  misc_feature: MA Experiment 108585 PARAMETER Experiment Name: At_5mM_NaNP_cDNA_P Parameter: Treatment Value: null
  misc_feature: MA Experiment ID: 108595 Result: Down-regulated in Transcription
  misc_feature: MA Experiment 108595 PARAMETER Experiment Name: At_Ler-pi_Ovule_cDNA_P Parameter: Plant Line Value: null
  misc_feature: MA Experiment ID: 20000306 Result: Down-regulated in Transcription
  misc_feature: MA Experiment 20000306 PARAMETER Experiment Name: At_Germinating_Seeds_Sub_P Parameter: Age (hr) Value: 6 vs. 0
  misc_feature: MA Experiment 20000306 PARAMETER Experiment Name: At_Germinating_Seeds_Sub_P Parameter: Organism Value: A. thaliana
  misc_feature: MA Experiment 20000306 PARAMETER Experiment Name: At_Germinating_Seeds_Sub_P Parameter: Plant Line Value: WS
  misc_feature: MA Experiment 20000306 PARAMETER Experiment Name: At_Germinating_Seeds_Sub_P Parameter: Tissue Value: Germinating Seeds
  misc_feature: MA Experiment ID: 20000314 Result: Down-regulated in Transcription
  misc_feature: MA Experiment 20000314 PARAMETER Experiment Name: At_14day_Shoots-Roots_Sub_P Parameter: Age (day) Value: 14
  misc_feature: MA Experiment 20000314 PARAMETER Experiment Name: At_14day_Shoots-Roots_Sub_P Parameter: Organism Value: A. thaliana
  misc_feature: MA Experiment 20000314 PARAMETER Experiment Name: At_14day_Shoots-Roots_Sub_P Parameter: Plant Line Value: WS
  misc_feature: MA Experiment 20000314 PARAMETER Experiment Name: At_14day_Shoots-Roots_Sub_P Parameter: Tissue Value: Roots vs. Whole Plant
  misc_feature: MA Experiment ID: 20000315 Result: Down-regulated in Transcription
  misc_feature: MA Experiment 20000315 PARAMETER Experiment Name: At_14day_Shoots-Roots_Sub_P Parameter: Age (day) Value: 14
  misc_feature: MA Experiment 20000315 PARAMETER Experiment Name: At_14day_Shoots-Roots_Sub_P Parameter: Organism Value: A. thaliana
  misc_feature: MA Experiment 20000315 PARAMETER Experiment Name: At_14day_Shoots-Roots_Sub_P Parameter: Plant Line Value: WS
  misc_feature: MA Experiment 20000315 PARAMETER Experiment Name: At_14day_Shoots-Roots_Sub_P Parameter: Tissue Value: Shoots vs. Whole Plant
  misc_feature: MA Experiment ID: 20000327 Result: Down-regulated in Transcription
  misc_feature: MA Experiment 20000327 PARAMETER Experiment Name: At_42deg_Heat_Sub_P Parameter: Age (day) Value: 14
  misc_feature: MA Experiment 20000327 PARAMETER Experiment Name: At_42deg_Heat_Sub_P Parameter: Organism Value: A. thaliana
  misc_feature: MA Experiment 20000327 PARAMETER Experiment Name: At_42deg_Heat_Sub_P Parameter: Plant Line Value: WS
  misc_feature: MA Experiment 20000327 PARAMETER Experiment Name: At_42deg_Heat_Sub_P Parameter: Temperature (deg C) Value: 42 vs. 22
  misc_feature: MA Experiment 20000327 PARAMETER Experiment Name: At_42deg_Heat_Sub_P Parameter: Timepoint (hr) Value: 1
  misc_feature: MA Experiment 20000327 PARAMETER Experiment Name: At_42deg_Heat_Sub_P Parameter: Tissue Value: Aerial
  misc_feature: MA Experiment ID: 20000355 Result: Down-regulated in Transcription
  misc_feature: MA Experiment 20000355 PARAMETER Experiment Name: At_Siliques_Sub_P Parameter: Age (day) Value: 21
  misc_feature: MA Experiment 20000355 PARAMETER Experiment Name: At_Siliques_Sub_P Parameter: Organism Value: A. thaliana
  misc_feature: MA Experiment 20000355 PARAMETER Experiment Name: At_Siliques_Sub_P Parameter: Plant Line Value: WS
  misc_feature: MA Experiment 20000355 PARAMETER Experiment Name: At_Siliques_Sub_P Parameter: Tissue Value: Less Than 5mm Siliques vs. Whole Plant
  misc_feature: MA Experiment ID: 20000440 Result: Down-regulated in Transcription
  misc_feature: MA Experiment 20000440 PARAMETER Experiment Name: At_Closed-Flower__Sub_P Parameter: Tissue Value: Closed Flower vs. Whole Plant
  misc_feature: MA Experiment ID: 20001807 Result: Up-regulated in Transcription
  misc_feature: MA Experiment 20001807 PARAMETER Experiment Name: At_50mM_NH4NO3_L-to-H_Sub_P Parameter: Timepoint (hr) Value: 6
  misc_feature: MA Experiment 20001807 PARAMETER Experiment Name: At_50mM_NH4NO3_L-to-H_Sub_P Parameter: Tissue Value: Leaf
  misc_feature: MA Experiment 20001807 PARAMETER Experiment Name: At_50mM_NH4NO3_L-to-H_Sub_P Parameter: Treatment Value: 50mM NH4NO3 vs 100mM Mannitol
aacacaactcaaccatgaactcttgttgcttccctctcttcatctttgcattcgttatctttctccggtgtttaagtcccattgaagctgccacgtgtcatcctgatgacgaggcgggtcttttagcttttaaatcgggtataactcaagatcctacgggtattctcagctcttggaagaaaggtactgactgctgttcatggaagggtgtcggttgtctcaccaaccgcgtcaccggactcactatcaacggacaatctgatgttactggaagctttctttctggcactatctcgccgtcattggccaaactccaacaccttgttggtatttacttcaccaatcttcgaaacatcactggttcttttcctcaattccttttccaattaccaaatgtaaaacaagtctacttcacgaatagccgtctctccggtcctcttccagctaacattggtgcgctaagcgagttaggagaactaagtctcgacggaaacctgtttactggtccgatcccgagttccatttccaatttaacccggttatatctgctcaatcttggagataatctcttaaccggaactatacctttaggtcttgctaatctcaagatcttgttgtcactcaactttggcaacaatcgtctctctgaaaccataccggatattttcaaatccatgcagaagctccaatctctaaccctctcccgcaacaaattctctggaaatcttcctccgtccattgcatcactcaaaccaattctcaattacctcgatctaagccagaataatctctctgggacaatcccgacctttttatcaaacttcaaggtactagactcattggatctttctagaaataggttctctggggttgttccgaagagtttagccaatatgcctaaacttttccatctcaatctctcccacaattttctaactggtccactccctgccatgaagaacgttgatggccttgccactctagatctttcatacaaccaatttcacctcaaaacgataccgaaatgggtgacctcgtcgccgtccatgtactcgttgaagctggtaaaatgcgggatcaatatgagcttagacaattggaagccagtgagacccaatatttacttttacatcgatctgtcagaaaacgagatctcagggagtctaacatggttcttcaacctagcgcataacctatatgagtttcaagcgtcagggaacaaacttcgattcgacatggggaagctgaatttaagtgagagactagaaagcctcgatctatcaaggaatttgatatttgggaaggtaccaatgaccgtggctaaactgcaaaaattgaacttgagtcataaccatctttgtggaaagcttccagtgactaaattcccggccagcgcgtttgtcggtaatgactgtctctgcggctctccgctttctccttgtaaaatttag

SEQ ID NO: 84487 - protein, 482 aa, Arabidopsis thaliana
  peptide (1)..(482): Ceres Seq. ID no. 12675442
  misc_feature (5)..(482): Homolog of NCBI NO: 15217593 NR Description: leucine rich repeat protein family; protein id:
  misc_feature (5)..(481): Homolog of NCBI NO: 21536600 NR Description: putative disease resistance protein [Arabidopsis
  misc_feature (3)..(481): Homolog of NCBI NO: 25518158 NR Description: Hypothetical 55.6 kDa protein - Arabidopsis >gi|10998936|gb|AAG26075.1|AC069299_1 hypothetical protein
  misc_feature (5)..(481): Homolog of NCBI NO: 18398912 NR Description: disease resistance protein-related (LRR); protein
  misc_feature (5)..(481): Homolog of NCBI NO: 15225296 NR Description: disease resistance protien-related (LRR); protein At2g26380.1 [Arabidopsis thaliana] >gi|7487889|pir||T00971
  misc_feature (5)..(468): Homolog of NCBI NO: 15217600 NR Description: leucine rich repeat protein family; protein id: [Arabidopsis thaliana] >gi|25511729|pir||A86460 99.9K
  misc_feature (73)..(482): Homolog of NCBI NO: 15217600 NR Description: leucine rich repeat protein family; protein id: [Arabidopsis thaliana] >gi|25511729|pir||A86460 99.9K
  misc_feature (73)..(481): Homolog of NCBI NO: 15217610 NR Description: leucine rich repeat protein family; protein id:
  misc_feature (73)..(481): Homolog of NCBI NO: 25518387 NR Description: hypothetical protein F14M2.19 [imported] - thaliana >gi|9665100|gb|AAF97291.1|AC010164_13 Hypothetical
  misc_feature (12)..(457): Homolog of NCBI NO: 15237312 NR Description: disease resistance protein family (LRR); protein At5g23400.1, supported by cDNA: gi_20260367 [Arabidopsis
HNSTMNSCCFPLFIFAFVIFLRCLSPIEAATCHPDDEAGLLAFKSGITQDPTGILSSWKKGTDCCSWKGVGCLTNRVTGLTINGQSDVTGSFLSGTISPSLAKLQHLVGIYFTNLRNITGSFPQFLFQLPNVKQVYFTNSRLSGPLPANIGALSELGELSLDGNLFTGPIPSSISNLTRLYLLNLGDNLLTGTIPLGLANLKILLSLNFGNNRLSETIPDIFKSMQKLQSLTLSRNKFSGNLPPSIASLKPILNYLDLSQNNLSGTIPTFLSNFKVLDSLDLSRNRFSGVVPKSLANMPKLFHLNLSHNFLTGPLPAMKNVDGLATLDLSYNQFHLKTIPKWVTSSPSMYSLKLVKCGINMSLDNWKPVRPNIYFYIDLSENEISGSLTWFFNLAHNLYEFQASGNKLRFDMGKLNLSERLESLDLSRNLIFGKVPMTVAKLQKLNLSHNHLCGKLPVTKFPASAFVGNDCLCGSPLSPCKI

SEQ ID NO: 84488 - protein, 478 aa, Arabidopsis thaliana
  peptide (1)..(478): Ceres Seq. ID no. 12675443
  misc_feature (1)..(478): Homolog of NCBI NO: 15217593 NR Description: leucine rich repeat protein family; protein id:
  misc_feature (1)..(477): Homolog of NCBI NO: 21536600 NR Description: putative disease resistance protein [Arabidopsis
  misc_feature (1)..(477): Homolog of NCBI NO: 25518158 NR Description: Hypothetical 55.6 kDa protein - Arabidopsis >gi|10998936|gb|AAG26075.1|AC069299_1 hypothetical protein
  misc_feature (1)..(477): Homolog of NCBI NO: 18398912 NR Description: disease resistance protein-related (LRR); protein
  misc_feature (1)..(477): Homolog of NCBI NO: 15225296 NR Description: disease resistance protien-related (LRR); protein At2g26380.1 [Arabidopsis thaliana] >gi|7487889|pir||T00971
  misc_feature (1)..(464): Homolog of NCBI NO: 15217600 NR Description: leucine rich repeat protein family; protein id: [Arabidopsis thaliana] >gi|25511729|pir||A86460 99.9K
  misc_feature (69)..(478): Homolog of NCBI NO: 15217600 NR Description: leucine rich repeat protein family; protein id: [Arabidopsis thaliana] >gi|25511729|pir||A86460 99.9K
  misc_feature (69)..(477): Homolog of NCBI NO: 15217610 NR Description: leucine rich repeat protein family; protein id:
  misc_feature (69)..(477): Homolog of NCBI NO: 25518387 NR Description: hypothetical protein F14M2.19 [imported] - thaliana >gi|9665100|gb|AAF97291.1|AC010164_13 Hypothetical
  misc_feature (8)..(453): Homolog of NCBI NO: 15237312 NR Description: disease resistance protein family (LRR); protein At5g23400.1, supported by cDNA: gi_20260367 [Arabidopsis
MNSCCFPLFIFAFVIFLRCLSPIEAATCHPDDEAGLLAFKSGITQDPTGILSSWKKGTDCCSWKGVGCLTNRVTGLTINGQSDVTGSFLSGTISPSLAKLQHLVGIYFTNLRNITGSFPQFLFQLPNVKQVYFTNSRLSGPLPANIGALSELGELSLDGNLFTGPIPSSISNLTRLYLLNLGDNLLTGTIPLGLANLKILLSLNFGNNRLSETIPDIFKSMQKLQSLTLSRNKFSGNLPPSIASLKPILNYLDLSQNNLSGTIPTFLSNFKVLDSLDLSRNRFSGVVPKSLANMPKLFHLNLSHNFLTGPLPAMKNVDGLATLDLSYNQFHLKTIPKWVTSSPSMYSLKLVKCGINMSLDNWKPVRPNIYFYIDLSENEISGSLTWFFNLAHNLYEFQASGNKLRFDMGKLNLSERLESLDLSRNLIFGKVPMTVAKLQKLNLSHNHLCGKLPVTKFPASAFVGNDCLCGSPLSPCKI

SEQ ID NO: 84489 - protein, 258 aa, Arabidopsis thaliana
  peptide (1)..(258): Ceres Seq. ID no. 12675444
  misc_feature (1)..(258): Homolog of NCBI NO: 15217593 NR Description: leucine rich repeat protein family; protein id:
  misc_feature (1)..(257): Homolog of NCBI NO: 21536600 NR Description: putative disease resistance protein [Arabidopsis
  misc_feature (1)..(257): Homolog of NCBI NO: 25518158 NR Description: Hypothetical 55.6 kDa protein - Arabidopsis >gi|10998936|gb|AAG26075.1|AC069299_1 hypothetical protein
  misc_feature (1)..(257): Homolog of NCBI NO: 18398912 NR Description: disease resistance protein-related (LRR); protein
  misc_feature (1)..(257): Homolog of NCBI NO: 15225296 NR Description: disease resistance protien-related (LRR); protein At2g26380.1 [Arabidopsis thaliana] >gi|7487889|pir||T00971
  misc_feature (1)..(244): Homolog of NCBI NO: 15217600 NR Description: leucine rich repeat protein family; protein id: [Arabidopsis thaliana] >gi|25511729|pir||A86460 99.9K
  misc_feature (1)..(258): Homolog of NCBI NO: 15217600 NR Description: leucine rich repeat protein family; protein id: [Arabidopsis thaliana] >gi|25511729|pir||A86460 99.9K
  misc_feature (1)..(257): Homolog of NCBI NO: 15217610 NR Description: leucine rich repeat protein family; protein id:
  misc_feature (1)..(257): Homolog of NCBI NO: 25518387 NR Description: hypothetical protein F14M2.19 [imported] - thaliana >gi|9665100|gb|AAF97291.1|AC010164_13 Hypothetical
  misc_feature (1)..(233): Homolog of NCBI NO: 15237312 NR Description: disease resistance protein family (LRR); protein At5g23400.1, supported by cDNA: gi_20260367 [Arabidopsis
MQKLQSLTLSRNKFSGNLPPSIASLKPILNYLDLSQNNLSGTIPTFLSNFKVLDSLDLSRNRFSGVVPKSLANMPKLFHLNLSHNFLTGPLPAMKNVDGLATLDLSYNQFHLKTIPKWVTSSPSMYSLKLVKCGINMSLDNWKPVRPNIYFYIDLSENEISGSLTWFFNLAHNLYEFQASGNKLRFDMGKLNLSERLESLDLSRNLIFGKVPMTVAKLQKLNLSHNHLCGKLPVTKFPASAFVGNDCLCGSPLSPCKI

SEQ ID NO: 84490 - DNA, 1518 bp, Arabidopsis thaliana
  misc_feature (1)..(1518): Ceres Seq. ID no. 12675449
  misc_feature: MA Experiment ID: 20000182 Result: Up-regulated in Transcription
  misc_feature: MA Experiment 20000182 PARAMETER Experiment Name: At_2mM_SA_P Parameter: Age (day) Value: 14
  misc_feature: MA Experiment 20000182 PARAMETER Experiment Name: At_2mM_SA_P Parameter: Organism Value: A. thaliana
  misc_feature: MA Experiment 20000182 PARAMETER Experiment Name: At_2mM_SA_P Parameter: Plant Line Value: WS
  misc_feature: MA Experiment 20000182 PARAMETER Experiment Name: At_2mM_SA_P Parameter: Timepoint (hr) Value: 6
  misc_feature: MA Experiment 20000182 PARAMETER Experiment Name: At_2mM_SA_P Parameter: Tissue Value: Aerial
  misc_feature: MA Experiment 20000182 PARAMETER Experiment Name: At_2mM_SA_P Parameter: Treatment Value: 2mM SA vs. No Treatment
atggacatcatctcaggacaacctatgtttctccttttctgctttatcttatcatgttttcttttcttcactgccgcaagatcccgacggagccctactcaagtactatccaagtcacctccgggtcctccacgattacccataatcggaaacattcatctagtcggaaagaacccacaccactcattcacggacctctcaaaaacatatggaccagtcatgagtcttaagcttggatatttaaactcagtggtcataacttcacgagatgctgcgagagaagtactaaaagcacacgatcaaatcttgtctggacggtacataactcaagcgaccaaatccaacaatcatcatgagttttccgttggctggatacatccgtcgtcacctcgtttcaggaaagttgaggaaatgacgtttactcagctgttctcaccgcagcgtatcgaggctactaaagctctgagaatgaagaaggtgcaagaacttgtcaactttttgagtgaaagcagtgagagaggagaagctgttgacatttctcgtgcatctttcgtcacagctctcaatatcatatcgaatattttgttttcagtcaatctcggtagctacgattcgaaaaattcaagtgcgtttcaggagatggtgattggttacatggaatctatcggaaatccagacgtttctaacttcttcccatttatgaggttacttgacttacaaggtaatagtaagaagatgaaagagtactcgggtaaattgcttcaggtatttagagagttttacgatgctaggattttggaaaactcatcgcgtatagatgagaaagatgtttcgagcagagacttcttggatgcactaatcgatctccaacaaggagatgaatctgaaatcaacattgacgagatcgaacacctacttctcgatatgtttctagcaggcacagatacaaactctagtaccgtggaatgggcaatgacagagttacttggaaaccctaaaacgatgacaaaagttcaagacgagatcaatcgtgtgataaggcaaaacggcgacgttcaagagtctcatatctcaaaactgccgtatttacaagcggtcataaaagaaactttccgattacacccggctgctccatttctcctcccaagaaaagcggaaagggacgtagatattcttggattccatgtgcctaaagactctcatgttcttgtgaacgtgtgggccataggacgagacccaaatgtatgggaaaatccgactcagtttgagccagagaggtttttagggaaagatattgatgtaaaaggtacaaattatgagcttacaccatttggggccgggcgtagaatttgtccgggactgcctttagctttgaaaacagtgcatctcatgcttgcttctcttctctatacctttgagtggaagcttccaaacggtgtcggttcagaggatttagacatgggagagacctttggtctcacagtgcacaagacaaacccgttacttgcgtgcctctga

SEQ ID NO: 84491 - protein, 505 aa, Arabidopsis thaliana
  peptide (1)..(505): Ceres Seq. ID no. 12675450
  misc_feature (1)..(505): Homolog of NCBI NO: 25282569 NR Description: probable cytochrome P450 [imported] - Arabidopsis >gi|9665096|gb|AAF97287.1|AC010164_9 Putative cytochrome P450
  misc_feature (1)..(503): Homolog of NCBI NO: 15217636 NR Description: cytochrome P450 monooxygenase; protein id: [Arabidopsis thaliana] >gi|25282568|pir||F86460 probable
  misc_feature (138)..(505): Homolog of NCBI NO: 15217637 NR Description: cytochrome p450 family; protein id: At1g33730.1
  misc_feature (1)..(503): Homolog of NCBI NO: 15225510 NR Description: cytochrome p450 family; protein id: At2g45550.1
  misc_feature (1)..(503): Homolog of NCBI NO: 15225512 NR Description: cytochrome p450 family; protein id: At2g45570.1, by cDNA: gi_17065047 [Arabidopsis thaliana] Cytochrome P450 76C2 >gi|7430675|pir||T00870 probable cytochrome
  misc_feature (1)..(503): Homolog of NCBI NO: 30690062 NR Description: cytochrome P450 family [Arabidopsis thaliana]
  misc_feature (1)..(488): Homolog of NCBI NO: 25282599 NR Description: cytochrome P450 monooxygenase [imported] - thaliana >gi|3164130|dbj|BAA28540.1| cytochrome P450
  misc_feature (1)..(503): Homolog of NCBI NO: 30690070 NR Description: cytochrome p450 family [Arabidopsis thaliana]
  misc_feature (1)..(503): Homolog of NCBI NO: 26451374 NR Description: putative cytochrome P450 [Arabidopsis thaliana]
  misc_feature (9)..(503): Homolog of NCBI NO: 5915833 NR Description: Cytochrome P450 76C3 >gi|7430676|pir||T00871
MDIISGQPMFLLFCFILSCFLFFTAARSRRSPTQVLSKSPPGPPRLPIIGNIHLVGKNPHHSFTDLSKTYGPVMSLKLGYLNSVVITSRDAAREVLKAHDQILSGRYITQATKSNNHHEFSVGWIHPSSPRFRKVEEMTFTQLFSPQRIEATKALRMKKVQELVNFLSESSERGEAVDISRASFVTALNIISNILFSVNLGSYDSKNSSAFQEMVIGYMESIGNPDVSNFFPFMRLLDLQGNSKKMKEYSGKLLQVFREFYDARILENSSRIDEKDVSSRDFLDALIDLQQGDESEINIDEIEHLLLDMFLAGTDTNSSTVEWAMTELLGNPKTMTKVQDEINRVIRQNGDVQESHISKLPYLQAVIKETFRLHPAAPFLLPRKAERDVDILGFHVPKDSHVLVNVWAIGRDPNVWENPTQFEPERFLGKDIDVKGTNYELTPFGAGRRICPGLPLALKTVHLMLASLLYTFEWKLPNGVGSEDLDMGETFGLTVHKTNPLLACL

SEQ ID NO: 84492 - protein, 497 aa, Arabidopsis thaliana
  peptide (1)..(497): Ceres Seq. ID no. 12675451
  misc_feature (1)..(497): Homolog of NCBI NO: 25282569 NR Description: probable cytochrome P450 [imported] - Arabidopsis >gi|9665096|gb|AAF97287.1|AC010164_9 Putative cytochrome P450
  misc_feature (1)..(495): Homolog of NCBI NO: 15217636 NR Description: cytochrome P450 monooxygenase; protein id: [Arabidopsis thaliana] >gi|25282568|pir||F86460 probable
  misc_feature (130)..(497): Homolog of NCBI NO: 15217637 NR Description: cytochrome p450 family; protein id: At1g33730.1
  misc_feature (1)..(495): Homolog of NCBI NO: 15225510 NR Description: cytochrome p450 family; protein id: At2g45550.1
  misc_feature (1)..(495): Homolog of NCBI NO: 15225512 NR Description: cytochrome p450 family; protein id: At2g45570.1, by cDNA: gi_17065047 [Arabidopsis thaliana] Cytochrome P450 76C2 >gi|7430675|pir||T00870 probable cytochrome
  misc_feature (1)..(495): Homolog of NCBI NO: 30690062 NR Description: cytochrome P450 family [Arabidopsis thaliana]
  misc_feature (1)..(480): Homolog of NCBI NO: 25282599 NR Description: cytochrome P450 monooxygenase [imported] - thaliana >gi|3164130|dbj|BAA28540.1| cytochrome P450
  misc_feature (1)..(495): Homolog of NCBI NO: 30690070 NR Description: cytochrome p450 family [Arabidopsis thaliana]
  misc_feature (1)..(495): Homolog of NCBI NO: 26451374 NR Description: putative cytochrome P450 [Arabidopsis thaliana]
  misc_feature (1)..(495): Homolog of NCBI NO: 5915833 NR Description: Cytochrome P450 76C3 >gi|7430676|pir||T00871
MFLLFCFILSCFLFFTAARSRRSPTQVLSKSPPGPPRLPIIGNIHLVGKNPHHSFTDLSKTYGPVMSLKLGYLNSVVITSRDAAREVLKAHDQILSGRYITQATKSNNHHEFSVGWIHPSSPRFRKVEEMTFTQLFSPQRIEATKALRMKKVQELVNFLSESSERGEAVDISRASFVTALNIISNILFSVNLGSYDSKNSSAFQEMVIGYMESIGNPDVSNFFPFMRLLDLQGNSKKMKEYSGKLLQVFREFYDARILENSSRIDEKDVSSRDFLDALIDLQQGDESEINIDEIEHLLLDMFLAGTDTNSSTVEWAMTELLGNPKTMTKVQDEINRVIRQNGDVQESHISKLPYLQAVIKETFRLHPAAPFLLPRKAERDVDILGFHVPKDSHVLVNVWAIGRDPNVWENPTQFEPERFLGKDIDVKGTNYELTPFGAGRRICPGLPLALKTVHLMLASLLYTFEWKLPNGVGSEDLDMGETFGLTVHKTNPLLACL

SEQ ID NO: 84493 - protein, 432 aa, Arabidopsis thaliana
  peptide (1)..(432): Ceres Seq. ID no. 12675452
  misc_feature (1)..(432): Homolog of NCBI NO: 25282569 NR Description: probable cytochrome P450 [imported] - Arabidopsis >gi|9665096|gb|AAF97287.1|AC010164_9 Putative cytochrome P450
  misc_feature (1)..(430): Homolog of NCBI NO: 15217636 NR Description: cytochrome P450 monooxygenase; protein id: [Arabidopsis thaliana] >gi|25282568|pir||F86460 probable
  misc_feature (65)..(432): Homolog of NCBI NO: 15217637 NR Description: cytochrome p450 family; protein id: At1g33730.1
  misc_feature (1)..(430): Homolog of NCBI NO: 15225510 NR Description: cytochrome p450 family; protein id: At2g45550.1
  misc_feature (1)..(430): Homolog of NCBI NO: 15225512 NR Description: cytochrome p450 family; protein id: At2g45570.1, by cDNA: gi_17065047 [Arabidopsis thaliana] Cytochrome P450 76C2 >gi|7430675|pir||T00870 probable cytochrome
  misc_feature (1)..(430): Homolog of NCBI NO: 30690062 NR Description: cytochrome P450 family [Arabidopsis thaliana]
  misc_feature (1)..(415): Homolog of NCBI NO: 25282599 NR Description: cytochrome P450 monooxygenase [imported] - thaliana >gi|3164130|dbj|BAA28540.1| cytochrome P450
  misc_feature (1)..(430): Homolog of NCBI NO: 30690070 NR Description: cytochrome p450 family [Arabidopsis thaliana]
  misc_feature (1)..(430): Homolog of NCBI NO: 26451374 NR Description: putative cytochrome P450 [Arabidopsis thaliana]
  misc_feature (1)..(430): Homolog of NCBI NO: 5915833 NR Description: Cytochrome P450 76C3 >gi|7430676|pir||T00871
MSLKLGYLNSVVITSRDAAREVLKAHDQILSGRYITQATKSNNHHEFSVGWIHPSSPRFRKVEEMTFTQLFSPQRIEATKALRMKKVQELVNFLSESSERGEAVDISRASFVTALNIISNILFSVNLGSYDSKNSSAFQEMVIGYMESIGNPDVSNFFPFMRLLDLQGNSKKMKEYSGKLLQVFREFYDARILENSSRIDEKDVSSRDFLDALIDLQQGDESEINIDEIEHLLLDMFLAGTDTNSSTVEWAMTELLGNPKTMTKVQDEINRVIRQNGDVQESHISKLPYLQAVIKETFRLHPAAPFLLPRKAERDVDILGFHVPKDSHVLVNVWAIGRDPNVWENPTQFEPERFLGKDIDVKGTNYELTPFGAGRRICPGLPLALKTVHLMLASLLYTFEWKLPNGVGSEDLDMGETFGLTVHKTNPLLACL

SEQ ID NO: 84494 - DNA, 1216 bp, Arabidopsis thaliana
  misc_feature (1)..(1216): Ceres Seq. ID no. 12675460
  misc_feature: MA Experiment ID: 20000173 Result: Down-regulated in Transcription
  misc_feature: MA Experiment 20000173 PARAMETER Experiment Name: At_42deg_Heat_P Parameter: Age (day) Value: 14
  misc_feature: MA Experiment 20000173 PARAMETER Experiment Name: At_42deg_Heat_P Parameter: Organism Value: A. thaliana
  misc_feature: MA Experiment 20000173 PARAMETER Experiment Name: At_42deg_Heat_P Parameter: Plant Line Value: WS
  misc_feature: MA Experiment 20000173 PARAMETER Experiment Name: At_42deg_Heat_P Parameter: Temperature (deg C) Value: 42 vs. 22
  misc_feature: MA Experiment 20000173 PARAMETER Experiment Name: At_42deg_Heat_P Parameter: Timepoint (hr) Value: 6
  misc_feature: MA Experiment 20000173 PARAMETER Experiment Name: At_42deg_Heat_P Parameter: Tissue Value: Aerial
  misc_feature: MA Experiment ID: 20000180 Result: Up-regulated in Transcription
  misc_feature: MA Experiment 20000180 PARAMETER Experiment Name: At_Germinating_Seeds_P Parameter: Age (hr) Value: 24 vs. 0
  misc_feature: MA Experiment 20000180 PARAMETER Experiment Name: At_Germinating_Seeds_P Parameter: Tissue Value: Germinating Seeds
  misc_feature: MA Experiment ID: 20000184 Result: Down-regulated in Transcription
  misc_feature: MA Experiment 20000184 PARAMETER Experiment Name: At_Shoots__P Parameter: Age (day) Value: 7
  misc_feature: MA Experiment 20000184 PARAMETER Experiment Name: At_Shoots__P Parameter: Tissue Value: Shoots vs. Whole Plant
  misc_feature: MA Experiment ID: 20000227 Result: Up-regulated in Transcription
  misc_feature: MA Experiment 20000227 PARAMETER Experiment Name: At_Root-Tips-vs-Tops_P Parameter: Tissue Value: Root Tips vs. Root Tops
  misc_feature: MA Experiment ID: 20000264 Result: Down-regulated in Transcription
  misc_feature: MA Experiment 20000264 PARAMETER Experiment Name: At_Open_Flower_P Parameter: Age (day) Value: 21
  misc_feature: MA Experiment 20000264 PARAMETER Experiment Name: At_Open_Flower_P Parameter: Plant Line Value: WS
  misc_feature: MA Experiment 20000264 PARAMETER Experiment Name: At_Open_Flower_P Parameter: Tissue Value: Open Flower vs. Whole Plant
  misc_feature: MA Experiment ID: 20000265 Result: Down-regulated in Transcription
  misc_feature: MA Experiment 20000265 PARAMETER Experiment Name: At_Open_Flower_P Parameter: Age (day) Value: 21
  misc_feature: MA Experiment 20000265 PARAMETER Experiment Name: At_Open_Flower_P Parameter: Plant Line Value: WS
  misc_feature: MA Experiment 20000265 PARAMETER Experiment Name: At_Open_Flower_P Parameter: Tissue Value: Closed Flower vs. Whole Plant
  misc_feature: MA Experiment ID: 20000286 Result: Down-regulated in Transcription
  misc_feature: MA Experiment 20000286 PARAMETER Experiment Name: At_Open_Flower_P Parameter: Age (day) Value: 21
  misc_feature: MA Experiment 20000286 PARAMETER Experiment Name: At_Open_Flower_P Parameter: Plant Line Value: WS
  misc_feature: MA Experiment 20000286 PARAMETER Experiment Name: At_Open_Flower_P Parameter: Tissue Value: Half Open vs. Whole Plant
  misc_feature: MA Experiment ID: 20000438 Result: Down-regulated in Transcription
  misc_feature: MA Experiment 20000438 PARAMETER Experiment Name: At_Shoots__P Parameter: Age (day) Value: 14
  misc_feature: MA Experiment 20000438 PARAMETER Experiment Name: At_Shoots__P Parameter: Tissue Value: Shoots vs. Whole Plant
  misc_feature: MA Experiment ID: 20000527 Result: Down-regulated in Transcription
  misc_feature: MA Experiment 20000527 PARAMETER Experiment Name: At_10percent_PEG_P Parameter: Age (day) Value: 20
  misc_feature: MA Experiment 20000527 PARAMETER Experiment Name: At_10percent_PEG_P Parameter: Organism Value: A. thaliana
  misc_feature: MA Experiment 20000527 PARAMETER Experiment Name: At_10percent_PEG_P Parameter: Plant Line Value: WS
  misc_feature: MA Experiment 20000527 PARAMETER Experiment Name: At_10percent_PEG_P Parameter: Timepoint (day) Value: 20
  misc_feature: MA Experiment 20000527 PARAMETER Experiment Name: At_10percent_PEG_P Parameter: Tissue Value: Whole Plant
  misc_feature: MA Experiment 20000527 PARAMETER Experiment Name: At_10percent_PEG_P Parameter: Treatment Value: 10percent PEG vs. No Treatment
  misc_feature: MA Experiment ID: 20000794 Result: Down-regulated in Transcription
  misc_feature: MA Experiment 20000794 PARAMETER Experiment Name: At_Petals_P Parameter: Age (day) Value: 23-25 days
  misc_feature: MA Experiment 20000794 PARAMETER Experiment Name: At_Petals_P Parameter: Plant Line Value: WS
  misc_feature: MA Experiment 20000794 PARAMETER Experiment Name: At_Petals_P Parameter: Tissue Value: Petals vs. Whole plant
  misc_feature: MA Experiment ID: 20001248 Result: Down-regulated in Transcription
  misc_feature: MA Experiment 20001248 PARAMETER Experiment Name: At_Far-red-induction_P Parameter: Age (day) Value: 7
  misc_feature: MA Experiment 20001248 PARAMETER Experiment Name: At_Far-red-induction_P Parameter: Light Value: Far-red vs. White
  misc_feature: MA Experiment 20001248 PARAMETER Experiment Name: At_Far-red-induction_P Parameter: Organism Value: A. thaliana
  misc_feature: MA Experiment 20001248 PARAMETER Experiment Name: At_Far-red-induction_P Parameter: Plant Line Value: Columbia
  misc_feature: MA Experiment 20001248 PARAMETER Experiment Name: At_Far-red-induction_P Parameter: Timepoint (hr) Value: 4
  misc_feature: MA Experiment 20001248 PARAMETER Experiment Name: At_Far-red-induction_P Parameter: Tissue Value: Whole Plant
  misc_feature: MA Experiment ID: 20001450 Result: Down-regulated in Transcription
  misc_feature: MA Experiment 20001450 PARAMETER Experiment Name: At_Far-red-induction_P Parameter: Age (day) Value: 7
  misc_feature: MA Experiment 20001450 PARAMETER Experiment Name: At_Far-red-induction_P Parameter: Light Value: Far-red vs. White
  misc_feature: MA Experiment 20001450 PARAMETER Experiment Name: At_Far-red-induction_P Parameter: Organism Value: A. thaliana
  misc_feature: MA Experiment 20001450 PARAMETER Experiment Name: At_Far-red-induction_P Parameter: Plant Line Value: Columbia
  misc_feature: MA Experiment 20001450 PARAMETER Experiment Name: At_Far-red-induction_P Parameter: Timepoint (hr) Value: 8
  misc_feature: MA Experiment 20001450 PARAMETER Experiment Name: At_Far-red-induction_P Parameter: Tissue Value: Whole Plant
  misc_feature: MA Experiment ID: 20001556 Result: Down-regulated in Transcription
  misc_feature: MA Experiment 20001556 PARAMETER Experiment Name: At_Drought_Soil_Dry_P Parameter: Age (day) Value: 26
  misc_feature: MA Experiment 20001556 PARAMETER Experiment Name: At_Drought_Soil_Dry_P Parameter: Organism Value: A. thaliana
  misc_feature: MA Experiment 20001556 PARAMETER Experiment Name: At_Drought_Soil_Dry_P Parameter: Plant Line Value: WS
  misc_feature: MA Experiment 20001556 PARAMETER Experiment Name: At_Drought_Soil_Dry_P Parameter: Post Timepoint (hr) Value: None
  misc_feature: MA Experiment 20001556 PARAMETER Experiment Name: At_Drought_Soil_Dry_P Parameter: Post-Treatment Value: None
  misc_feature: MA Experiment 20001556 PARAMETER Experiment Name: At_Drought_Soil_Dry_P Parameter: Timepoint (day) Value: 12
  misc_feature: MA Experiment 20001556 PARAMETER Experiment Name: At_Drought_Soil_Dry_P Parameter: Treatment Value: Drought vs. No Drought
  misc_feature: MA Experiment ID: 20001558 Result: Down-regulated in Transcription
  misc_feature: MA Experiment 20001558 PARAMETER Experiment Name: At_Drought_Soil_Dry_P Parameter: Age (day) Value: 27
  misc_feature: MA Experiment 20001558 PARAMETER Experiment Name: At_Drought_Soil_Dry_P Parameter: Organism Value: A. thaliana
  misc_feature: MA Experiment 20001558 PARAMETER Experiment Name: At_Drought_Soil_Dry_P Parameter: Plant Line Value: WS
  misc_feature: MA Experiment 20001558 PARAMETER Experiment Name: At_Drought_Soil_Dry_P Parameter: Post Timepoint (hr) Value: 6
  misc_feature: MA Experiment 20001558 PARAMETER Experiment Name: At_Drought_Soil_Dry_P Parameter: Post-Treatment Value: Re-Water vs. No Drought
  misc_feature: MA Experiment 20001558 PARAMETER Experiment Name: At_Drought_Soil_Dry_P Parameter: Timepoint (day) Value: 13
  misc_feature: MA Experiment 20001558 PARAMETER Experiment Name: At_Drought_Soil_Dry_P Parameter: Treatment Value: Drought vs. No Drought
  misc_feature: MA Experiment ID: 20001757 Result: Up-regulated in Transcription
  misc_feature: MA Experiment 20001757 PARAMETER Experiment Name: At_50mM_NH4NO3_L-to-H_P Parameter: Timepoint (hr) Value: 6
  misc_feature: MA Experiment 20001757 PARAMETER Experiment Name: At_50mM_NH4NO3_L-to-H_P Parameter: Tissue Value: Leaf
  misc_feature: MA Experiment 20001757 PARAMETER Experiment Name: At_50mM_NH4NO3_L-to-H_P Parameter: Treatment Value: 50mM NH4NO3 vs 100mM Mannitol
  misc_feature: MA Experiment ID: 20001768 Result: Up-regulated in Transcription
  misc_feature: MA Experiment 20001768 PARAMETER Experiment Name: At_Far-red-enriched-adult_P Parameter: Age (day) Value: 28
  misc_feature: MA Experiment 20001768 PARAMETER Experiment Name: At_Far-red-enriched-adult_P Parameter: Light Value: Far-red enriched vs. White
  misc_feature: MA Experiment 20001768 PARAMETER Experiment Name: At_Far-red-enriched-adult_P Parameter: Organism Value: A. thaliana
  misc_feature: MA Experiment 20001768 PARAMETER Experiment Name: At_Far-red-enriched-adult_P Parameter: Plant Line Value: Columbia
  misc_feature: MA Experiment 20001768 PARAMETER Experiment Name: At_Far-red-enriched-adult_P Parameter: Timepoint (hr) Value: 1
  misc_feature: MA Experiment 20001768 PARAMETER Experiment Name: At_Far-red-enriched-adult_P Parameter: Tissue Value: Aerial
  misc_feature: MA Experiment ID: 20001773 Result: Up-regulated in Transcription
  misc_feature: MA Experiment 20001773 PARAMETER Experiment Name: At_Far-red-enriched-adult_P Parameter: Age (day) Value: 30
  misc_feature: MA Experiment 20001773 PARAMETER Experiment Name: At_Far-red-enriched-adult_P Parameter: Light Value: Far-red enriched vs. White
  misc_feature: MA Experiment 20001773 PARAMETER Experiment Name: At_Far-red-enriched-adult_P Parameter: Organism Value: A. thaliana
  misc_feature: MA Experiment 20001773 PARAMETER Experiment Name: At_Far-red-enriched-adult_P Parameter: Plant Line Value: Columbia
  misc_feature: MA Experiment 20001773 PARAMETER Experiment Name: At_Far-red-enriched-adult_P Parameter: Timepoint (hr) Value: 48
  misc_feature: MA Experiment 20001773 PARAMETER Experiment Name: At_Far-red-enriched-adult_P Parameter: Tissue Value: Aerial
  misc_feature: MA Experiment ID: 20001911 Result: Down-regulated in Transcription
  misc_feature: MA Experiment 20001911 PARAMETER Experiment Name: At_Drought_Reproduction_P Parameter: Age (day) Value: 40
  misc_feature: MA Experiment 20001911 PARAMETER Experiment Name: At_Drought_Reproduction_P Parameter: Organism Value: A. thaliana
  misc_feature: MA Experiment 20001911 PARAMETER Experiment Name: At_Drought_Reproduction_P Parameter: Plant Line Value: WS
  misc_feature: MA Experiment 20001911 PARAMETER Experiment Name: At_Drought_Reproduction_P Parameter: Timepoint (day) Value: 10
  misc_feature: MA Experiment 20001911 PARAMETER Experiment Name: At_Drought_Reproduction_P Parameter: Tissue Value: Flowers
  misc_feature: MA Experiment 20001911 PARAMETER Experiment Name: At_Drought_Reproduction_P Parameter: Treatment Value: Drought vs. No Drought
atcttcctcattcatagatccaaaaacccaaatcgaaaaatcgattctttagtcagaaaaaatgaggaccaaatctccatcttctcttaatctcaaggtcatattcataggttcctcaatcttgatcttgatcatcatctacttagcaagatcaaacatctcttcttcctcttcaaagccaatctccaaaacaaatctctcccaagaagaagaagaaactcagcataaacaagaaggatgtccaacaacacaacaatgcacaaagatgccactttctttatccgatgcattggttcattacgtcactagtaacgtcactccacaacaaacatttgatgaagtctctgtctcaaagagagtcttggacaagaagtctccttgtaacttccttgtctttggcttaggtcacgacagtttaatgtgggcatctcttaaccatggtggtcgtaccttgtttattgaagaagaccaagcttggattgcgatagtaactaagaagttcccaaacttagaatcttaccacgtagtttacgacacaaaagtcaaagattcagacaagctgatggaactaggaagatcagaagagtgtagatctgtgtctgatccgagaaactccaaatgtgatcttgcgttgaaagatttcccggcggacttttacgagacgaaatgggatctgatcatggttgatgcaccaactggttaccatgaagaagctccggggaggatgagtgctatttacacggcggggcttttggctcgtaaccgtgaagatggtgaaactgacgtttttgttcacgacgttaaccgtccggtggaagatgagttctcggcgactttcttgtgtaaaggttatatgagggagcaaaatgggagacttagacattttactattcctagtcatcgggctcgtgctggacgacctttttgtccggtggaagttgatcgccgccgttaattttgtggtgggagatttatttagttcaccgtcgttggtcggtcaacggactcagggctggtaaattgttttacctagtggacattgaaggacttgcttagctggcattttgtatttgttttgttttgtttttgcttgatttaaatacgtttttcaagattttagtgcatttactgaaatcgatacatactagtattcgcatgattatttgtgatttcattatcccttttgattaatgaatacaaataaggaatttatctg

SEQ ID NO: 84495 - protein, 297 aa, Arabidopsis thaliana; identical to SEQ ID NO: 40458
  peptide (1)..(297): Ceres Seq. ID no. 12675461
  misc_feature (51)..(289): Pfam Name: Protein of unknown function (DUF579) Pfam Description: Protein of unknown function (DUF579)
  misc_feature (1)..(297): Homolog of NCBI NO: 18398986 NR Description: expressed protein; protein id: At1g33800.1, by cDNA: 114466., supported by cDNA: gi_17979548, supported by gi_20453344 [Arabidopsis thaliana] >gi|25354651|pir||E86461
  misc_feature (1)..(296): Homolog of NCBI NO: 15234881 NR Description: putative protein; protein id: At4g09990.1
  misc_feature (1)..(290): Homolog of NCBI NO: 15217566 NR Description: unknown protein; protein id: At1g09610.1
  misc_feature (44)..(290): Homolog of NCBI NO: 25402555 NR Description: hypothetical protein [imported] - Arabidopsis >gi|3482933|gb|AAC33218.1| Similar to cdc2 protein kinases
  misc_feature (1)..(290): Homolog of NCBI NO: 18409879 NR Description: hypothetical protein; protein id: At1g71690.1
  misc_feature (19)..(290): Homolog of NCBI NO: 25354648 NR Description: hypothetical protein F14O23.3 [imported] - thaliana >gi|7239492|gb|AAF43218.1|AC012654_2 EST gb|AI999169
  misc_feature (135)..(296): Homolog of NCBI NO: 27754730 NR Description: unknown protein [Arabidopsis thaliana]
  misc_feature (67)..(289): Homolog of NCBI NO: 15220402 NR Description: unknown protein; protein id: At1g67330.1 thaliana] >gi|9828617|gb|AAG00240.1|AC002130_5 F1N21.15
  misc_feature (70)..(284): Homolog of NCBI NO: 18396558 NR Description: expressed protein; protein id: At1g27930.1, by cDNA: 1367., supported by cDNA: gi_15215712 [Arabidopsis
  misc_feature (70)..(284): Homolog of NCBI NO: 21537399 NR Description: unknown [Arabidopsis thaliana]

SEQ ID NO: 84496 - protein, 229 aa, Arabidopsis thaliana; identical to SEQ ID NO: 40459
  peptide (1)..(229): Ceres Seq. ID no. 12675462
  misc_feature (1)..(221): Pfam Name: Protein of unknown function (DUF579) Pfam Description: Protein of unknown function (DUF579)
  misc_feature (1)..(229): Homolog of NCBI NO: 18398986 NR Description: expressed protein; protein id: At1g33800.1, by cDNA: 114466., supported by cDNA: gi_17979548, supported by gi_20453344 [Arabidopsis thaliana] >gi|25354651|pir||E86461
  misc_feature (1)..(228): Homolog of NCBI NO: 15234881 NR Description: putative protein; protein id: At4g09990.1
  misc_feature (1)..(222): Homolog of NCBI NO: 15217566 NR Description: unknown protein; protein id: At1g09610.1
  misc_feature (1)..(222): Homolog of NCBI NO: 25402555 NR Description: hypothetical protein [imported] - Arabidopsis >gi|3482933|gb|AAC33218.1| Similar to cdc2 protein kinases
  misc_feature (1)..(222): Homolog of NCBI NO: 18409879 NR Description: hypothetical protein; protein id: At1g71690.1
  misc_feature (1)..(222): Homolog of NCBI NO: 25354648 NR Description: hypothetical protein F14O23.3 [imported] - thaliana >gi|7239492|gb|AAF43218.1|AC012654_2 EST gb|AI999169
  misc_feature (67)..(228): Homolog of NCBI NO: 27754730 NR Description: unknown protein [Arabidopsis thaliana]
  misc_feature (1)..(221): Homolog of NCBI NO: 15220402 NR Description: unknown protein; protein id: At1g67330.1 thaliana] >gi|9828617|gb|AAG00240.1|AC002130_5 F1N21.15
  misc_feature (2)..(216): Homolog of NCBI NO: 18396558 NR Description: expressed protein; protein id: At1g27930.1, by cDNA: 1367., supported by cDNA: gi_15215712 [Arabidopsis
  misc_feature (2)..(216): Homolog of NCBI NO: 21537399 NR Description: unknown [Arabidopsis thaliana]

SEQ ID NO: 84497 - protein, 178 aa, Arabidopsis thaliana; identical to SEQ ID NO: 40460
  peptide (1)..(178): Ceres Seq. ID no. 12675463
  misc_feature (1)..(170): Pfam Name: Protein of unknown function (DUF579) Pfam Description: Protein of unknown function (DUF579)
  misc_feature (1)..(178): Homolog of NCBI NO: 18398986 NR Description: expressed protein; protein id: At1g33800.1, by cDNA: 114466., supported by cDNA: gi_17979548, supported by gi_20453344 [Arabidopsis thaliana] >gi|25354651|pir||E86461
  misc_feature (1)..(177): Homolog of NCBI NO: 15234881 NR Description: putative protein; protein id: At4g09990.1
  misc_feature (1)..(171): Homolog of NCBI NO: 15217566 NR Description: unknown protein; protein id: At1g09610.1
  misc_feature (1)..(171): Homolog of NCBI NO: 25402555 NR Description: hypothetical protein [imported] - Arabidopsis >gi|3482933|gb|AAC33218.1| Similar to cdc2 protein kinases
  misc_feature (1)..(171): Homolog of NCBI NO: 18409879 NR Description: hypothetical protein; protein id: At1g71690.1
  misc_feature (1)..(171): Homolog of NCBI NO: 25354648 NR Description: hypothetical protein F14O23.3 [imported] - thaliana >gi|7239492|gb|AAF43218.1|AC012654_2 EST gb|AI999169
  misc_feature (16)..(177): Homolog of NCBI NO: 27754730 NR Description: unknown protein [Arabidopsis thaliana]
  misc_feature (1)..(170): Homolog of NCBI NO: 15220402 NR Description: unknown protein; protein id: At1g67330.1 thaliana] >gi|9828617|gb|AAG00240.1|AC002130_5 F1N21.15
  misc_feature (1)..(165): Homolog of NCBI NO: 18396558 NR Description: expressed protein; protein id: At1g27930.1, by cDNA: 1367., supported by cDNA: gi_15215712 [Arabidopsis
  misc_feature (1)..(165): Homolog of NCBI NO: 21537399 NR Description: unknown [Arabidopsis thaliana]

SEQ ID NO: 84498 - DNA, 684 bp, Arabidopsis thaliana
  misc_feature (1)..(684): Ceres Seq. ID no. 12675476
  misc_feature: MA Experiment ID: 20000314 Result: Down-regulated in Transcription
  misc_feature: MA Experiment 20000314 PARAMETER Experiment Name: At_14day_Shoots-Roots_Sub_P Parameter: Age (day) Value: 14
  misc_feature: MA Experiment 20000314 PARAMETER Experiment Name: At_14day_Shoots-Roots_Sub_P Parameter: Organism Value: A. thaliana
  misc_feature: MA Experiment 20000314 PARAMETER Experiment Name: At_14day_Shoots-Roots_Sub_P Parameter: Plant Line Value: WS
  misc_feature: MA Experiment 20000314 PARAMETER Experiment Name: At_14day_Shoots-Roots_Sub_P Parameter: Tissue Value: Roots vs. Whole Plant
  misc_feature: MA Experiment ID: 20000315 Result: Down-regulated in Transcription
  misc_feature: MA Experiment 20000315 PARAMETER Experiment Name: At_14day_Shoots-Roots_Sub_P Parameter: Age (day) Value: 14
  misc_feature: MA Experiment 20000315 PARAMETER Experiment Name: At_14day_Shoots-Roots_Sub_P Parameter: Organism Value: A. thaliana
  misc_feature: MA Experiment 20000315 PARAMETER Experiment Name: At_14day_Shoots-Roots_Sub_P Parameter: Plant Line Value: WS
  misc_feature: MA Experiment 20000315 PARAMETER Experiment Name: At_14day_Shoots-Roots_Sub_P Parameter: Tissue Value: Shoots vs. Whole Plant
  misc_feature: MA Experiment ID: 20000327 Result: Down-regulated in Transcription
  misc_feature: MA Experiment 20000327 PARAMETER Experiment Name: At_42deg_Heat_Sub_P Parameter: Age (day) Value: 14
  misc_feature: MA Experiment 20000327 PARAMETER Experiment Name: At_42deg_Heat_Sub_P Parameter: Organism Value: A. thaliana
  misc_feature: MA Experiment 20000327 PARAMETER Experiment Name: At_42deg_Heat_Sub_P Parameter: Plant Line Value: WS
  misc_feature: MA Experiment 20000327 PARAMETER Experiment Name: At_42deg_Heat_Sub_P Parameter: Temperature (deg C) Value: 42 vs. 22
  misc_feature: MA Experiment 20000327 PARAMETER Experiment Name: At_42deg_Heat_Sub_P Parameter: Timepoint (hr) Value: 1
  misc_feature: MA Experiment 20000327 PARAMETER Experiment Name: At_42deg_Heat_Sub_P Parameter: Tissue Value: Aerial
  misc_feature: MA Experiment ID: 20000328 Result: Down-regulated in Transcription
  misc_feature: MA Experiment 20000328 PARAMETER Experiment Name: At_42deg_Heat_Sub_P Parameter: Age (day) Value: 14
  misc_feature: MA Experiment 20000328 PARAMETER Experiment Name: At_42deg_Heat_Sub_P Parameter: Organism Value: A. thaliana
  misc_feature: MA Experiment 20000328 PARAMETER Experiment Name: At_42deg_Heat_Sub_P Parameter: Plant Line Value: WS
  misc_feature: MA Experiment 20000328 PARAMETER Experiment Name: At_42deg_Heat_Sub_P Parameter: Temperature (deg C) Value: 42 vs. 22
  misc_feature: MA Experiment 20000328 PARAMETER Experiment Name: At_42deg_Heat_Sub_P Parameter: Timepoint (hr) Value: 6
  misc_feature: MA Experiment 20000328 PARAMETER Experiment Name: At_42deg_Heat_Sub_P Parameter: Tissue Value: Aerial
  misc_feature: MA Experiment ID: 20000347 Result: Up-regulated in Transcription
  misc_feature: MA Experiment 20000347 PARAMETER Experiment Name: At_2mM_SA_Sub_P Parameter: Age (day) Value: 14
  misc_feature: MA Experiment 20000347 PARAMETER Experiment Name: At_2mM_SA_Sub_P Parameter: Organism Value: A. thaliana
  misc_feature: MA Experiment 20000347 PARAMETER Experiment Name: At_2mM_SA_Sub_P Parameter: Plant Line Value: WS
  misc_feature: MA Experiment 20000347 PARAMETER Experiment Name: At_2mM_SA_Sub_P Parameter: Timepoint (hr) Value: 6
  misc_feature: MA Experiment 20000347 PARAMETER Experiment Name: At_2mM_SA_Sub_P Parameter: Tissue Value: Aerial
  misc_feature: MA Experiment 20000347 PARAMETER Experiment Name: At_2mM_SA_Sub_P Parameter: Treatment Value: 2mM SA vs. No Treatment
  misc_feature: MA Experiment ID: 20000355 Result: Down-regulated in Transcription
  misc_feature: MA Experiment 20000355 PARAMETER Experiment Name: At_Siliques_Sub_P Parameter: Age (day) Value: 21
  misc_feature: MA Experiment 20000355 PARAMETER Experiment Name: At_Siliques_Sub_P Parameter: Organism Value: A. thaliana
  misc_feature: MA Experiment 20000355 PARAMETER Experiment Name: At_Siliques_Sub_P Parameter: Plant Line Value: WS
  misc_feature: MA Experiment 20000355 PARAMETER Experiment Name: At_Siliques_Sub_P Parameter: Tissue Value: Less Than 5mm Siliques vs. Whole Plant
  misc_feature: MA Experiment ID: 20000440 Result: Down-regulated in Transcription
  misc_feature: MA Experiment 20000440 PARAMETER Experiment Name: At_Closed-Flower__Sub_P Parameter: Tissue Value: Closed Flower vs. Whole Plant
atgcagcagccctatgagtaccgttacccacaaggcactggcccttcggctcctccgccgcctccaaaagccggagtgatagtggatccaaagtactgctctctgcaccctgtagatttggcgatcgtacggaaggtgttgaagataacggacggtaacttcgtgataacgaatgcggaaggaaacttgttgttcaaggtgaaggatcctttttttagtcttcacgagaagaggatcttgatggatggttttggaactaaggtcttgactttgaaagggaagataatgaccatgcatgacaggtggctagtgtttagaggagggagtacggaggaggttgatctgctatacacggtgaaaagatcaaacatggttcagataaccaccaaacttgatgtgtttttggctgataacatagagcagaagaaatgtgattacagactcgaaggggtttggctcgagacttcttgttttgtctacgctggcgattctgacatcattcttgcccaaatgcgcgagaagaaaacgatgcagagcgttctctttggaaaggacaatttctgcctcactgttaatccaaatgttgattatgccttcattgcctctctcattgtcatcctttacacagaaagctcaagtttgagtcagttcacaacaacactccttgaccagctgttcttttga

SEQ ID NO: 84499 - protein, 227 aa, Arabidopsis thaliana
  peptide (1)..(227): Ceres Seq. ID no. 12675477
  misc_feature (25)..(206): Pfam Name: Protein of unknown function (DUF567) Pfam Description: Protein of unknown function (DUF567)
  misc_feature (1)..(222): Homolog of NCBI NO: 9665105 NR Description: Hypothetical protein [Arabidopsis thaliana]
  misc_feature (26)..(214): Homolog of NCBI NO: 15217694 NR Description: unknown protein; protein id: At1g33840.1
  misc_feature (1)..(173): Homolog of NCBI NO: 25352417 NR Description: hypothetical protein T3M13.14 - Arabidopsis
  misc_feature (1)..(207): Homolog of NCBI NO: 30679390 NR Description: expressed protein [Arabidopsis thaliana]
  misc_feature (26)..(222): Homolog of NCBI NO: 15225960 NR Description: unknown protein; protein id: At2g14560.1, by cDNA: gi_17979320 [Arabidopsis thaliana]
  misc_feature (26)..(222): Homolog of NCBI NO: 17979321 NR Description: unknown protein [Arabidopsis thaliana]
  misc_feature (1)..(171): Homolog of NCBI NO: 18413737 NR Description: expressed protein; protein id: At5g01750.1,
  misc_feature (1)..(171): Homolog of NCBI NO: 21553506 NR Description: unknown [Arabidopsis thaliana]
  misc_feature (130)..(207): Homolog of NCBI NO: 15229837 NR Description: hypothetical protein; protein id: At3g11740.1 thaliana] >gi|6671930|gb|AAF23190.1|AC016795_3 hypothetical
  misc_feature (27)..(92): Homolog of NCBI NO: 15229837 NR Description: hypothetical protein; protein id: At3g11740.1 thaliana] >gi|6671930|gb|AAF23190.1|AC016795_3 hypothetical
MQQPYEYRYPQGTGPSAPPPPPKAGVIVDPKYCSLHPVDLAIVRKVLKITDGNFVITNAEGNLLFKVKDPFFSLHEKRILMDGFGTKVLTLKGKIMTMHDRWLVFRGGSTEEVDLLYTVKRSNMVQITTKLDVFLADNIEQKKCDYRLEGVWLETSCFVYAGDSDIILAQMREKKTMQSVLFGKDNFCLTVNPNVDYAFIASLIVILYTESSSLSQFTTTLLDQLFF

SEQ ID NO: 84500 - protein, 147 aa, Arabidopsis thaliana
  peptide (1)..(147): Ceres Seq. ID no. 12675478
  misc_feature (1)..(126): Pfam Name: Protein of unknown function (DUF567) Pfam Description: Protein of unknown function (DUF567)
  misc_feature (1)..(142): Homolog of NCBI NO: 9665105 NR Description: Hypothetical protein [Arabidopsis thaliana]
  misc_feature (1)..(134): Homolog of NCBI NO: 15217694 NR Description: unknown protein; protein id: At1g33840.1
  misc_feature (1)..(93): Homolog of NCBI NO: 25352417 NR Description: hypothetical protein T3M13.14 - Arabidopsis
  misc_feature (1)..(127): Homolog of NCBI NO: 30679390 NR Description: expressed protein [Arabidopsis thaliana]
  misc_feature (1)..(142): Homolog of NCBI NO: 15225960 NR Description: unknown protein; protein id: At2g14560.1, by cDNA: gi_17979320 [Arabidopsis thaliana]
  misc_feature (1)..(142): Homolog of NCBI NO: 17979321 NR Description: unknown protein [Arabidopsis thaliana]
  misc_feature (1)..(91): Homolog of NCBI NO: 18413737 NR Description: expressed protein; protein id: At5g01750.1,
  misc_feature (1)..(91): Homolog of NCBI NO: 21553506 NR Description: unknown [Arabidopsis thaliana]
  misc_feature (50)..(127): Homolog of NCBI NO: 15229837 NR Description: hypothetical protein; protein id: At3g11740.1 thaliana] >gi|6671930|gb|AAF23190.1|AC016795_3 hypothetical
  misc_feature (1)..(12): Homolog of NCBI NO: 15229837 NR Description: hypothetical protein; protein id: At3g11740.1 thaliana] >gi|6671930|gb|AAF23190.1|AC016795_3 hypothetical
MDGFGTKVLTLKGKIMTMHDRWLVFRGGSTEEVDLLYTVKRSNMVQITTKLDVFLADNIEQKKCDYRLEGVWLETSCFVYAGDSDIILAQMREKKTMQSVLFGKDNFCLTVNPNVDYAFIASLIVILYTESSSLSQFTTTLLDQLFF

SEQ ID NO: 84501 - protein, 132 aa, Arabidopsis thaliana
  peptide (1)..(132): Ceres Seq. ID no. 12675479
  misc_feature (1)..(111): Pfam Name: Protein of unknown function (DUF567) Pfam Description: Protein of unknown function (DUF567)
  misc_feature (1)..(127): Homolog of NCBI NO: 9665105 NR Description: Hypothetical protein [Arabidopsis thaliana]
  misc_feature (1)..(119): Homolog of NCBI NO: 15217694 NR Description: unknown protein; protein id: At1g33840.1
  misc_feature (1)..(78): Homolog of NCBI NO: 25352417 NR Description: hypothetical protein T3M13.14 - Arabidopsis
  misc_feature (1)..(112): Homolog of NCBI NO: 30679390 NR Description: expressed protein [Arabidopsis thaliana]
  misc_feature (1)..(127): Homolog of NCBI NO: 15225960 NR Description: unknown protein; protein id: At2g14560.1, by cDNA: gi_17979320 [Arabidopsis thaliana]
  misc_feature (1)..(127): Homolog of NCBI NO: 17979321 NR Description: unknown protein [Arabidopsis thaliana]
  misc_feature (1)..(76): Homolog of NCBI NO: 18413737 NR Description: expressed protein; protein id: At5g01750.1,
  misc_feature (1)..(76): Homolog of NCBI NO: 21553506 NR Description: unknown [Arabidopsis thaliana]
  misc_feature (35)..(112): Homolog of NCBI NO: 15229837 NR Description: hypothetical protein; protein id: At3g11740.1 thaliana] >gi|6671930|gb|AAF23190.1|AC016795_3 hypothetical
  misc_feature (1)..(112): Homolog of NCBI NO: 27818079 NR Description: OSJNBa0086N05.7 [Oryza sativa (japonica
MTMHDRWLVFRGGSTEEVDLLYTVKRSNMVQITTKLDVFLADNIEQKKCDYRLEGVWLETSCFVYAGDSDIILAQMREKKTMQSVLFGKDNFCLTVNPNVDYAFIASLIVILYTESSSLSQFTTTLLDQLFF

SEQ ID NO: 84502 - DNA, 879 bp, Arabidopsis thaliana
  misc_feature (1)..(879): Ceres Seq. ID no. 12675490
  misc_feature: MA Experiment ID: 20000173 Result: Down-regulated in Transcription
  misc_feature: MA Experiment 20000173 PARAMETER Experiment Name: At_42deg_Heat_P Parameter: Age (day) Value: 14
  misc_feature: MA Experiment 20000173 PARAMETER Experiment Name: At_42deg_Heat_P Parameter: Organism Value: A. thaliana
  misc_feature: MA Experiment 20000173 PARAMETER Experiment Name: At_42deg_Heat_P Parameter: Plant Line Value: WS
  misc_feature: MA Experiment 20000173 PARAMETER Experiment Name: At_42deg_Heat_P Parameter: Temperature (deg C) Value: 42 vs. 22
  misc_feature: MA Experiment 20000173 PARAMETER Experiment Name: At_42deg_Heat_P Parameter: Timepoint (hr) Value: 6
  misc_feature: MA Experiment 20000173 PARAMETER Experiment Name: At_42deg_Heat_P Parameter: Tissue Value: Aerial
atggctgaagatcagaacacaactgaccgttgggagttgccttcagcgtcagagcccgtcaaaaacgttgaccgttgggagttgccttcagcgtcagagcccgtcaaaaacgtagttctggtaggccgtactgggaatggaaaaagcgccactggaaattccatcatcggaagaaaggttttcgagtcaaaatatcaagctgttggtgttaccacaagatgtaagacatttagagctgtgacaccggatggccccataatcaatgtgattgacactcctggtctcttcgacctggccgtgtccgctgagtttattagtaaggaaatcgtcaactgccttattcttgctagagaagggctacatgctgtggtgttagttctatccttgtcgactcggatttcacaagaggaagaaaacgcactttgtacgttacagatgttgttcgggggtaaaatcgttgactatttgatcgttgtattcacttgtggtgatatgttggaagatcgaaatatgactttagaagattatttgtccaatggttgccctgaatttctaaagaatgttctcagactatgtggaggcagaagggttgtatttgataaccgaacgaaagatgaaggtgtgaaggctaagcaagtccagcagcttctggtccatgtcgcagcgattgaaaaggaaactggtgggaatccctttacggacacgatgcaccgtaggatacaggaagaggctgcaagggttaaaagggaagagaaggaaattgaagaaaaaaacattgcagacgaagagaaagcagcgttgaagaagcagttagacatgtcgtatagccaaaacatgaacatgatggcattgatgattgatgtagtgaatttgctgtag

SEQ ID NO: 84503 - protein, 292 aa, Arabidopsis thaliana
  peptide (1)..(292): Ceres Seq. ID no. 12675491
  misc_feature (36)..(251): Pfam Name: AIG1 family Pfam Description: AIG1 family
  misc_feature (1)..(287): Homolog of NCBI NO: 15217724 NR Description: AIG1-like protein; protein id: At1g33930.1
  misc_feature (28)..(286): Homolog of NCBI NO: 15217719 NR Description: AIG1-like protein; protein id: At1g33900.1
  misc_feature (1)..(287): Homolog of NCBI NO: 15217731 NR Description: AIG1; protein id: At1g33960.1, supported by cDNA: [Arabidopsis thaliana] >gi|1703219|sp|P54120|AIG1_ARATH AIG1 >gi|1127804|gb|AAC49282.1| AIG1
  misc_feature (1)..(285): Homolog of NCBI NO: 10092442 NR Description: disease resistance protein AIG1; 916-2572
  misc_feature (27)..(286): Homolog of NCBI NO: 15217717 NR Description: AIG1-like protein; protein id: At1g33890.1
  misc_feature (24)..(287): Homolog of NCBI NO: 15217720 NR Description: AIG1-like protein; protein id: At1g33910.1
  misc_feature (32)..(273): Homolog of NCBI NO: 15225799 NR Description: similar to avrRpt2-induced protein 1; protein id:
  misc_feature (31)..(287): Homolog of NCBI NO: 15220922 NR Description: AIG1-like protein; protein id: At1g33950.1
  misc_feature (24)..(287): Homolog of NCBI NO: 18399081 NR Description: expressed protein; protein id: At1g33970.1,
  misc_feature (24)..(287): Homolog of NCBI NO: 25373414 NR Description: hypothetical protein F12G12.21 - Arabidopsis >gi|10086478|gb|AAG12538.1|AC015446_19 Similar to AIG1 protein thaliana] >gi|10092443|gb|AAG12846.1|AC079286_3 disease
MAEDQNTTDRWELPSASEPVKNVDRWELPSASEPVKNVVLVGRTGNGKSATGNSIIGRKVFESKYQAVGVTTRCKTFRAVTPDGPIINVIDTPGLFDLAVSAEFISKEIVNCLILAREGLHAVVLVLSLSTRISQEEENALCTLQMLFGGKIVDYLIVVFTCGDMLEDRNMTLEDYLSNGCPEFLKNVLRLCGGRRVVFDNRTKDEGVKAKQVQQLLVHVAAIEKETGGNPFTDTMHRRIQEEAARVKREEKEIEEKNIADEEKAALKKQLDMSYSQNMNMMALMIDVVNLL

SEQ ID NO: 84504 - protein, 147 aa, Arabidopsis thaliana
  peptide (1)..(147): Ceres Seq. ID no. 12675492
  misc_feature (1)..(106): Pfam Name: AIG1 family Pfam Description: AIG1 family
  misc_feature (1)..(142): Homolog of NCBI NO: 15217724 NR Description: AIG1-like protein; protein id: At1g33930.1
  misc_feature (1)..(141): Homolog of NCBI NO: 15217719 NR Description: AIG1-like protein; protein id: At1g33900.1
  misc_feature (1)..(142): Homolog of NCBI NO: 15217731 NR Description: AIG1; protein id: At1g33960.1, supported by cDNA: [Arabidopsis thaliana] >gi|1703219|sp|P54120|AIG1_ARATH AIG1 >gi|1127804|gb|AAC49282.1| AIG1
  misc_feature (1)..(140): Homolog of NCBI NO: 10092442 NR Description: disease resistance protein AIG1; 916-2572
  misc_feature (1)..(141): Homolog of NCBI NO: 15217717 NR Description: AIG1-like protein; protein id: At1g33890.1
  misc_feature (1)..(142): Homolog of NCBI NO: 15217720 NR Description: AIG1-like protein; protein id: At1g33910.1
  misc_feature (1)..(128): Homolog of NCBI NO: 15225799 NR Description: similar to avrRpt2-induced protein 1; protein id:
  misc_feature (1)..(142): Homolog of NCBI NO: 15220922 NR Description: AIG1-like protein; protein id: At1g33950.1
  misc_feature (1)..(142): Homolog of NCBI NO: 18399081 NR Description: expressed protein; protein id: At1g33970.1,
  misc_feature (1)..(142): Homolog of NCBI NO: 25373414 NR Description: hypothetical protein F12G12.21 - Arabidopsis >gi|10086478|gb|AAG12538.1|AC015446_19 Similar to AIG1 protein thaliana] >gi|10092443|gb|AAG12846.1|AC079286_3 disease
MLFGGKIVDYLIVVFTCGDMLEDRNMTLEDYLSNGCPEFLKNVLRLCGGRRVVFDNRTKDEGVKAKQVQQLLVHVAAIEKETGGNPFTDTMHRRIQEEAARVKREEKEIEEKNIADEEKAALKKQLDMSYSQNMNMMALMIDVVNLL

SEQ ID NO: 84505 - DNA, 1161 bp, Arabidopsis thaliana
  misc_feature (1)..(1161): Ceres Seq. ID no. 12675507
  misc_feature: MA Experiment ID: 108435 Result: Down-regulated in Transcription
  misc_feature: MA Experiment 108435 PARAMETER Experiment Name: At_stm_Mutants_cDNA_P Parameter: Plant Line Value: wt Landsburg vs stm
  misc_feature: MA Experiment 108435 PARAMETER Experiment Name: At_stm_Mutants_cDNA_P Parameter: Tissue Value: Shoot Apical Meristem Region
  misc_feature: MA Experiment ID: 108461 Result: Down-regulated in Transcription
  misc_feature: MA Experiment 108461 PARAMETER Experiment Name: At_Germinating_Seeds_cDNA_P Parameter: Age (day) Value: 1 vs. 0
  misc_feature: MA Experiment 108461 PARAMETER Experiment Name: At_Germinating_Seeds_cDNA_P Parameter: Tissue Value: Germinating Seeds
  misc_feature: MA Experiment ID: 108462 Result: Down-regulated in Transcription
  misc_feature: MA Experiment 108462 PARAMETER Experiment Name: At_Germinating_Seeds_cDNA_P Parameter: Age (day) Value: 2 vs. 0
  misc_feature: MA Experiment 108462 PARAMETER Experiment Name: At_Germinating_Seeds_cDNA_P Parameter: Tissue Value: Germinating Seeds
  misc_feature: MA Experiment ID: 108488 Result: Down-regulated in Transcription
  misc_feature: MA Experiment ID: 20000069 Result: Up-regulated in Transcription
  misc_feature: MA Experiment 20000069 PARAMETER Experiment Name: At_100uM_ABA_Mutants_cDNA_P Parameter: Plant Line Value: CS23
  misc_feature: MA Experiment 20000069 PARAMETER Experiment Name: At_100uM_ABA_Mutants_cDNA_P Parameter: Timepoint (hr) Value: 6
  misc_feature: MA Experiment 20000069 PARAMETER Experiment Name: At_100uM_ABA_Mutants_cDNA_P Parameter: Tissue Value: Aerial
  misc_feature: MA Experiment 20000069 PARAMETER Experiment Name: At_100uM_ABA_Mutants_cDNA_P Parameter: Treatment Value: 100uM ABA vs. No Treatment
  misc_feature: MA Experiment ID: 20000071 Result: Up-regulated in Transcription
  misc_feature: MA Experiment 20000071 PARAMETER Experiment Name: At_100uM_ABA_Mutants_cDNA_P Parameter: Plant Line Value: CS8104
  misc_feature: MA Experiment 20000071 PARAMETER Experiment Name: At_100uM_ABA_Mutants_cDNA_P Parameter: Timepoint (hr) Value: 6
  misc_feature: MA Experiment 20000071 PARAMETER Experiment Name: At_100uM_ABA_Mutants_cDNA_P Parameter: Tissue Value: Aerial
  misc_feature: MA Experiment 20000071 PARAMETER Experiment Name: At_100uM_ABA_Mutants_cDNA_P Parameter: Treatment Value: 100uM ABA vs. No Treatment
  misc_feature: MA Experiment ID: 20000072 Result: Up-regulated in Transcription
  misc_feature: MA Experiment 20000072 PARAMETER Experiment Name: At_100uM_ABA_Mutants_cDNA_P Parameter: Plant Line Value: CS8105
  misc_feature: MA Experiment 20000072 PARAMETER Experiment Name: At_100uM_ABA_Mutants_cDNA_P Parameter: Timepoint (hr) Value: 6
  misc_feature: MA Experiment 20000072 PARAMETER Experiment Name: At_100uM_ABA_Mutants_cDNA_P Parameter: Tissue Value: Aerial
  misc_feature: MA Experiment 20000072 PARAMETER Experiment Name: At_100uM_ABA_Mutants_cDNA_P Parameter: Treatment Value: 100uM ABA vs. No Treatment
  misc_feature: MA Experiment ID: 20000086 Result: Up-regulated in Transcription
  misc_feature: MA Experiment 20000086 PARAMETER Experiment Name: At_100uM_ABA_Mutants_cDNA_P Parameter: Plant Line Value: CS22
  misc_feature: MA Experiment 20000086 PARAMETER Experiment Name: At_100uM_ABA_Mutants_cDNA_P Parameter: Timepoint (hr) Value: 6
  misc_feature: MA Experiment 20000086 PARAMETER Experiment Name: At_100uM_ABA_Mutants_cDNA_P Parameter: Tissue Value: Aerial
  misc_feature: MA Experiment 20000086 PARAMETER Experiment Name: At_100uM_ABA_Mutants_cDNA_P Parameter: Treatment Value: 100uM ABA vs. No Treatment
  misc_feature: MA Experiment ID: 20000087 Result: Up-regulated in Transcription
  misc_feature: MA Experiment 20000087 PARAMETER Experiment Name: At_100uM_ABA_Mutants_cDNA_P Parameter: Plant Line Value: WS
  misc_feature: MA Experiment 20000087 PARAMETER Experiment Name: At_100uM_ABA_Mutants_cDNA_P Parameter: Timepoint (hr) Value: 6
  misc_feature: MA Experiment 20000087 PARAMETER Experiment Name: At_100uM_ABA_Mutants_cDNA_P Parameter: Tissue Value: Aerial
  misc_feature: MA Experiment 20000087 PARAMETER Experiment Name: At_100uM_ABA_Mutants_cDNA_P Parameter: Treatment Value: 100uM ABA vs. No Treatment
  misc_feature: MA Experiment ID: 20000088 Result: Up-regulated in Transcription
  misc_feature: MA Experiment 20000088 PARAMETER Experiment Name: At_100uM_ABA_Mutants_cDNA_P Parameter: Plant Line Value: Landsberg
  misc_feature: MA Experiment 20000088 PARAMETER Experiment Name: At_100uM_ABA_Mutants_cDNA_P Parameter: Timepoint (hr) Value: 6
  misc_feature: MA Experiment 20000088 PARAMETER Experiment Name: At_100uM_ABA_Mutants_cDNA_P Parameter: Tissue Value: Aerial
  misc_feature: MA Experiment 20000088 PARAMETER Experiment Name: At_100uM_ABA_Mutants_cDNA_P Parameter: Treatment Value: 100uM ABA vs. No Treatment
  misc_feature: MA Experiment ID: 20000089 Result: Up-regulated in Transcription
  misc_feature: MA Experiment ID: 20000090 Result: Up-regulated in Transcription
  misc_feature: MA Experiment ID: 20000111 Result: Down-regulated in Transcription
  misc_feature: MA Experiment 20000111 PARAMETER Experiment Name: At_42deg_Heat_cDNA_P Parameter: Temperature (deg C) Value: 42 vs. 22
  misc_feature: MA Experiment 20000111 PARAMETER Experiment Name: At_42deg_Heat_cDNA_P Parameter: Timepoint (hr) Value: 6
  misc_feature: MA Experiment 20000111 PARAMETER Experiment Name: At_42deg_Heat_cDNA_P Parameter: Tissue Value: Aerial
  misc_feature: MA Experiment ID: 20000117 Result: Up-regulated in Transcription
  misc_feature: MA Experiment 20000117 PARAMETER Experiment Name: At_100uM_ABA_Mutants_cDNA_P Parameter: Plant Line Value: Columbia
  misc_feature: MA Experiment 20000117 PARAMETER Experiment Name: At_100uM_ABA_Mutants_cDNA_P Parameter: Timepoint (hr) Value: 6
  misc_feature: MA Experiment 20000117 PARAMETER Experiment Name: At_100uM_ABA_Mutants_cDNA_P Parameter: Tissue Value: Aerial
  misc_feature: MA Experiment 20000117 PARAMETER Experiment Name: At_100uM_ABA_Mutants_cDNA_P Parameter: Treatment Value: 100uM ABA vs. No Treatment
atgaagaagaagaagaagaaaagtgaaacacatcaatacgctaattttgccctaatttttgtttcctctcttccctttcctctgggaaaagaaaaaattaaaatacccgtagacaaatcaatcttcgggtatatgagtttgttggacatgggtggagatatgatggaagatgattgggaatttgcgtcatcatcaaaccctaaaagaaccctagttcttgtgggccgtactggaaacggaaagagtgcgacaggtaacagtatccttgggaggaaagcttttaggtcaagagctagaactgtaggagtgacaagcacgtgcgagtcacagagagttgttcaagaagatggtgatatcattaatgttgttgatactcctggtttgtttgatttgtctactgcagctgattttattggtaaagagattgtgaggtgtataagtttggcagaagatgggattcatgcgatcttgttggtattctctgtgaggcggcttgctgaagaggagcaaactgtgcttagtttcttgcaagcgctattcggcagtaagatcgctgactatatgatcgttgtttttaccggtggcgatgagttggaagagaatgaggagacattggaggagtatttggctgactattgccctgagtttcttaaagaaattcttgggatatgtgacaatcggttggtgttgtttaataacaagactactgataaggtgaagaaagctgagcaagttcagaagcttctctcacttgttgaatctgttgttaaacagaacaatggaaaaccgtattcagatgagttgttccatgagctacaggaagaggctatcaagctaagggaccagaaaaaggaggttgagttacttcagggttactctaataatgagatagatgagttcaagaagcaaatcgatatgtcctatgataggcagcttagccgcatcaccgagatggtggagactaagctgagagacactgctaagagactagagcagcaactaggtgaagagcaagctgcaagacttgaagcggagaagagggcaaacgaagttcagaagcggtcgagcgatgagattaagaagctcagagagaatctggagagggcggaaaaagagacgaaggaacttcagaaaaaactgggaaagtgcatcaatctatga

SEQ ID NO: 84506 - protein, 386 aa, Arabidopsis thaliana
  peptide (1)..(386): Ceres Seq. ID no. 12675508
  misc_feature (69)..(283): Pfam Name: AIG1 family Pfam Description: AIG1 family
  misc_feature (45)..(386): Homolog of NCBI NO: 18399081 NR Description: expressed protein; protein id: At1g33970.1,
  misc_feature (50)..(386): Homolog of NCBI NO: 25373414 NR Description: hypothetical protein F12G12.21 - Arabidopsis >gi|10086478|gb|AAG12538.1|AC015446_19 Similar to AIG1 protein thaliana] >gi|10092443|gb|AAG12846.1|AC079286_3 disease
  misc_feature (50)..(386): Homolog of NCBI NO: 24417378 NR Description: unknown [Arabidopsis thaliana]
  misc_feature (93)..(386): Homolog of NCBI NO: 12324509 NR Description: AIG1-like protein, 5' partial; 1-1205
  misc_feature (50)..(377): Homolog of NCBI NO: 4097585 NR Description: NTGP4 [Nicotiana tabacum]
  misc_feature (47)..(382): Homolog of NCBI NO: 15234871 NR Description: AIG1-like protein; protein id: At4g09950.1
  misc_feature (52)..(374): Homolog of NCBI NO: 15234855 NR Description: AIG1-like protein; protein id: At4g09940.1
  misc_feature (60)..(379): Homolog of NCBI NO: 15217731 NR Description: AIG1; protein id: At1g33960.1, supported by cDNA: [Arabidopsis thaliana] >gi|1703219|sp|P54120|AIG1_ARATH AIG1 >gi|1127804|gb|AAC49282.1| AIG1
  misc_feature (60)..(379): Homolog of NCBI NO: 10092442 NR Description: disease resistance protein AIG1; 916-2572
  misc_feature (55)..(358): Homolog of NCBI NO: 15217719 NR Description: AIG1-like protein; protein id: At1g33900.1
MKKKKKKSETHQYANFALIFVSSLPFPLGKEKIKIPVDKSIFGYMSLLDMGGDMMEDDWEFASSSNPKRTLVLVGRTGNGKSATGNSILGRKAFRSRARTVGVTSTCESQRVVQEDGDIINVVDTPGLFDLSTAADFIGKEIVRCISLAEDGIHAILLVFSVRRLAEEEQTVLSFLQALFGSKIADYMIVVFTGGDELEENEETLEEYLADYCPEFLKEILGICDNRLVLFNNKTTDKVKKAEQVQKLLSLVESVVKQNNGKPYSDELFHELQEEAIKLRDQKKEVELLQGYSNNEIDEFKKQIDMSYDRQLSRITEMVETKLRDTAKRLEQQLGEEQAARLEAEKRANEVQKRSSDEIKKLRENLERAEKETKELQKKLGKCINL

SEQ ID NO: 84507 - protein, 342 aa, Arabidopsis thaliana; identical to SEQ ID NO: 23839
  peptide (1)..(342): Ceres Seq. ID no. 12675509
  misc_feature (25)..(239): Pfam Name: AIG1 family Pfam Description: AIG1 family
  misc_feature (1)..(342): Homolog of NCBI NO: 18399081 NR Description: expressed protein; protein id: At1g33970.1,
  misc_feature (6)..(342): Homolog of NCBI NO: 25373414 NR Description: hypothetical protein F12G12.21 - Arabidopsis >gi|10086478|gb|AAG12538.1|AC015446_19 Similar to AIG1 protein thaliana] >gi|10092443|gb|AAG12846.1|AC079286_3 disease
  misc_feature (6)..(342): Homolog of NCBI NO: 24417378 NR Description: unknown [Arabidopsis thaliana]
  misc_feature (49)..(342): Homolog of NCBI NO: 12324509 NR Description: AIG1-like protein, 5' partial; 1-1205
  misc_feature (6)..(333): Homolog of NCBI NO: 4097585 NR Description: NTGP4 [Nicotiana tabacum]
  misc_feature (3)..(338): Homolog of NCBI NO: 15234871 NR Description: AIG1-like protein; protein id: At4g09950.1
  misc_feature (8)..(330): Homolog of NCBI NO: 15234855 NR Description: AIG1-like protein; protein id: At4g09940.1
  misc_feature (16)..(335): Homolog of NCBI NO: 15217731 NR Description: AIG1; protein id: At1g33960.1, supported by cDNA: [Arabidopsis thaliana] >gi|1703219|sp|P54120|AIG1_ARATH AIG1 >gi|1127804|gb|AAC49282.1| AIG1
  misc_feature (16)..(335): Homolog of NCBI NO: 10092442 NR Description: disease resistance protein AIG1; 916-2572
  misc_feature (11)..(314): Homolog of NCBI NO: 15217719 NR Description: AIG1-like protein; protein id: At1g33900.1

SEQ ID NO: 84508 - protein, 337 aa, Arabidopsis thaliana; identical to SEQ ID NO: 23840
  peptide (1)..(337): Ceres Seq. ID no. 12675510
  misc_feature (20)..(234): Pfam Name: AIG1 family Pfam Description: AIG1 family
  misc_feature (1)..(337): Homolog of NCBI NO: 18399081 NR Description: expressed protein; protein id: At1g33970.1,
  misc_feature (1)..(337): Homolog of NCBI NO: 25373414 NR Description: hypothetical protein F12G12.21 - Arabidopsis >gi|10086478|gb|AAG12538.1|AC015446_19 Similar to AIG1 protein thaliana] >gi|10092443|gb|AAG12846.1|AC079286_3 disease
  misc_feature (1)..(337): Homolog of NCBI NO: 24417378 NR Description: unknown [Arabidopsis thaliana]
  misc_feature (44)..(337): Homolog of NCBI NO: 12324509 NR Description: AIG1-like protein, 5' partial; 1-1205
  misc_feature (1)..(328): Homolog of NCBI NO: 4097585 NR Description: NTGP4 [Nicotiana tabacum]
  misc_feature (1)..(333): Homolog of NCBI NO: 15234871 NR Description: AIG1-like protein; protein id: At4g09950.1
  misc_feature (3)..(325): Homolog of NCBI NO: 15234855 NR Description: AIG1-like protein; protein id: At4g09940.1
  misc_feature (11)..(330): Homolog of NCBI NO: 15217731 NR Description: AIG1; protein id: At1g33960.1, supported by cDNA: [Arabidopsis thaliana] >gi|1703219|sp|P54120|AIG1_ARATH AIG1 >gi|1127804|gb|AAC49282.1| AIG1
  misc_feature (11)..(330): Homolog of NCBI NO: 10092442 NR Description: disease resistance protein AIG1; 916-2572
  misc_feature (6)..(309): Homolog of NCBI NO: 15217719 NR Description: AIG1-like protein; protein id: At1g33900.1

SEQ ID NO: 84509 - DNA, 1032 bp, Arabidopsis thaliana
  misc_feature (1)..(1032): Ceres Seq. ID no. 12675541
  misc_feature: MA Experiment ID: 20000173 Result: Down-regulated in Transcription
  misc_feature: MA Experiment 20000173 PARAMETER Experiment Name: At_42deg_Heat_P Parameter: Age (day) Value: 14
  misc_feature: MA Experiment 20000173 PARAMETER Experiment Name: At_42deg_Heat_P Parameter: Organism Value: A. thaliana
  misc_feature: MA Experiment 20000173 PARAMETER Experiment Name: At_42deg_Heat_P Parameter: Plant Line Value: WS
  misc_feature: MA Experiment 20000173 PARAMETER Experiment Name: At_42deg_Heat_P Parameter: Temperature (deg C) Value: 42 vs. 22
  misc_feature: MA Experiment 20000173 PARAMETER Experiment Name: At_42deg_Heat_P Parameter: Timepoint (hr) Value: 6
  misc_feature: MA Experiment 20000173 PARAMETER Experiment Name: At_42deg_Heat_P Parameter: Tissue Value: Aerial
  misc_feature: MA Experiment ID: 20000179 Result: Up-regulated in Transcription
  misc_feature: MA Experiment 20000179 PARAMETER Experiment Name: At_Germinating_Seeds_P Parameter: Age (hr) Value: 6 vs. 0
  misc_feature: MA Experiment 20000179 PARAMETER Experiment Name: At_Germinating_Seeds_P Parameter: Tissue Value: Germinating Seeds
  misc_feature: MA Experiment ID: 20000180 Result: Up-regulated in Transcription
  misc_feature: MA Experiment 20000180 PARAMETER Experiment Name: At_Germinating_Seeds_P Parameter: Age (hr) Value: 24 vs. 0
  misc_feature: MA Experiment 20000180 PARAMETER Experiment Name: At_Germinating_Seeds_P Parameter: Tissue Value: Germinating Seeds
  misc_feature: MA Experiment ID: 20000234 Result: Up-regulated in Transcription
  misc_feature: MA Experiment 20000234 PARAMETER Experiment Name: At_Siliques_P Parameter: Age (day) Value: 21
  misc_feature: MA Experiment 20000234 PARAMETER Experiment Name: At_Siliques_P Parameter: Organism Value: A. thaliana
  misc_feature: MA Experiment 20000234 PARAMETER Experiment Name: At_Siliques_P Parameter: Plant Line Value: WS
  misc_feature: MA Experiment 20000234 PARAMETER Experiment Name: At_Siliques_P Parameter: Tissue Value: Less Than 5mm Siliques vs. Whole Plant
  misc_feature: MA Experiment ID: 20000235 Result: Up-regulated in Transcription
  misc_feature: MA Experiment 20000235 PARAMETER Experiment Name: At_Siliques_P Parameter: Age (day) Value: 21
  misc_feature: MA Experiment 20000235 PARAMETER Experiment Name: At_Siliques_P Parameter: Organism Value: A. thaliana
  misc_feature: MA Experiment 20000235 PARAMETER Experiment Name: At_Siliques_P Parameter: Plant Line Value: WS
  misc_feature: MA Experiment 20000235 PARAMETER Experiment Name: At_Siliques_P Parameter: Tissue Value: 5-10mm Siliques vs. Whole Plant
  misc_feature: MA Experiment ID: 20000264 Result: Up-regulated in Transcription
  misc_feature: MA Experiment 20000264 PARAMETER Experiment Name: At_Open_Flower_P Parameter: Age (day) Value: 21
  misc_feature: MA Experiment 20000264 PARAMETER Experiment Name: At_Open_Flower_P Parameter: Plant Line Value: WS
  misc_feature: MA Experiment 20000264 PARAMETER Experiment Name: At_Open_Flower_P Parameter: Tissue Value: Open Flower vs. Whole Plant
  misc_feature: MA Experiment ID: 20000265 Result: Up-regulated in Transcription
  misc_feature: MA Experiment 20000265 PARAMETER Experiment Name: At_Open_Flower_P Parameter: Age (day) Value: 21
  misc_feature: MA Experiment 20000265 PARAMETER Experiment Name: At_Open_Flower_P Parameter: Plant Line Value: WS
  misc_feature: MA Experiment 20000265 PARAMETER Experiment Name: At_Open_Flower_P Parameter: Tissue Value: Closed Flower vs. Whole Plant
  misc_feature: MA Experiment ID: 20000286 Result: Up-regulated in Transcription
  misc_feature: MA Experiment 20000286 PARAMETER Experiment Name: At_Open_Flower_P Parameter: Age (day) Value: 21
  misc_feature: MA Experiment 20000286 PARAMETER Experiment Name: At_Open_Flower_P Parameter: Plant Line Value: WS
  misc_feature: MA Experiment 20000286 PARAMETER Experiment Name: At_Open_Flower_P Parameter: Tissue Value: Half Open vs. Whole Plant
  misc_feature: MA Experiment ID: 20000495 Result: Up-regulated in Transcription
  misc_feature: MA Experiment 20000495 PARAMETER Experiment Name: At_Guard_Cells_P Parameter: Harvest Date Value: 8/2/2002
  misc_feature: MA Experiment 20000495 PARAMETER Experiment Name: At_Guard_Cells_P Parameter: Organism Value: A. thaliana
  misc_feature: MA Experiment 20000495 PARAMETER Experiment Name: At_Guard_Cells_P Parameter: Tissue Value: Guard Cells vs. Leaves
  misc_feature: MA Experiment ID: 20000496 Result: Up-regulated in Transcription
  misc_feature: MA Experiment 20000496 PARAMETER Experiment Name: At_Guard_Cells_P Parameter: Harvest Date Value: 7/19/2002
  misc_feature: MA Experiment 20000496 PARAMETER Experiment Name: At_Guard_Cells_P Parameter: Organism Value: Canola
  misc_feature: MA Experiment 20000496 PARAMETER Experiment Name: At_Guard_Cells_P Parameter: Tissue Value: Guard Cells vs. Leaves
atgacgaaagctctctctggcttctgttgctctctcagtctctctaccttgatggatagtgacattgtttccagtagcatagatcgatctcagacagcaatgcctgatgctttagcattcaagagtatcaatgatcctatcaagaaccagatcaatagttgtgctgcaatctgtgttaagcaagatgatccatgccatttcttgcgtgtcctttatgagtctctgataacaggagggttagctggtgttgtggtggaagctgctttgtatccaattgatacaatcaaaactcgaatacaggtagctcgggatggtggaaagataatatggaaggattatactctggtcttggtggaaatcttgtcggtgtcttaccgtaatgcttcggctctattttttggtgtatatgaaccaaccaaacagaagctgctaaaggttttaccagataatcttagtgcggttgcacatttggctgcaggtgcgttaggaggtgctgtttcatctattgttcgggtaccaacagaagttgtgaaacagcggatgcagactggtcaatttgtttcggcccctgacgctgttcgccttattatagccaaggagggctttggaggcatgtatgcggcacaccttgagggttatggatccttcttattgcgagatttgccttttgacgcgctccagttttgtgtttatgagcaattacgaattggatacaagttggctgcaagaagagatctaaatgatccagagaatgcgatgattggtgcttttgctggtgctgtcactggagttttgaccactcctcttgatgttatcaaaaccagattaatggttcagggctcaggaactcagtataaaggagtttcggattgcattaagacgataataagagaagaaggttcatcagctttgtggaagggaatgggtccaagggtattgtggataggtattggaggttcaattttctttggtgttttggaaaagacaaagcagattctttcagagagaagccaaaagagtcacaatgcttaa

SEQ ID NO: 84510 - protein, 343 aa, Arabidopsis thaliana
  peptide (1)..(343): Ceres Seq. ID no. 12675542
  misc_feature (18)..(343): Homolog of NCBI NO: 18399114 NR Description: allinase, putative; protein id: At1g34065.1
  misc_feature (26)..(336): Homolog of NCBI NO: 18420458 NR Description: mitochondrial carrier protein family; protein id: supported by cDNA: 32654., supported by cDNA: gi_15028274, by cDNA: gi_19310698 [Arabidopsis thaliana]
  misc_feature (66)..(339): Homolog of NCBI NO: 34394981 NR Description: mitochondrial aspartate-glutamate carrier
  misc_feature (26)..(306): Homolog of NCBI NO: 7486053 NR Description: hypothetical protein F23K16.90 - Arabidopsis
  misc_feature (83)..(241): Homolog of NCBI NO: 25518662 NR Description: hypothetical protein F12G12.11 [imported] - thaliana >gi|10086470|gb|AAG12530.1|AC015446_11 Hypothetical
  misc_feature (36)..(101): Homolog of NCBI NO: 25518662 NR Description: hypothetical protein F12G12.11 [imported] - thaliana >gi|10086470|gb|AAG12530.1|AC015446_11 Hypothetical
  misc_feature (1)..(58): Homolog of NCBI NO: 25518662 NR Description: hypothetical protein F12G12.11 [imported] - thaliana >gi|10086470|gb|AAG12530.1|AC015446_11 Hypothetical
  misc_feature (52)..(337): Homolog of NCBI NO: 24650120 NR Description: CG4743-PA [Drosophila melanogaster]
  misc_feature (74)..(340): Homolog of NCBI NO: 27754081 NR Description: RIKEN cDNA 4930433D19; expressed sequence [Mus musculus] >gi|22477482|gb|AAH37142.1| Unknown (protein for
  misc_feature (66)..(324): Homolog of NCBI NO: 19115553 NR Description: agpet8 protein. [Schizosaccharomyces pombe]
MTKALSGFCCSLSLSTLMDSDIVSSSIDRSQTAMPDALAFKSINDPIKNQINSCAAICVKQDDPCHFLRVLYESLITGGLAGVVVEAALYPIDTIKTRIQVARDGGKIIWKDYTLVLVEILSVSYRNASALFFGVYEPTKQKLLKVLPDNLSAVAHLAAGALGGAVSSIVRVPTEVVKQRMQTGQFVSAPDAVRLIIAKEGFGGMYAAHLEGYGSFLLRDLPFDALQFCVYEQLRIGYKLAARRDLNDPENAMIGAFAGAVTGVLTTPLDVIKTRLMVQGSGTQYKGVSDCIKTIIREEGSSALWKGMGPRVLWIGIGGSIFFGVLEKTKQILSERSQKSHNA

SEQ ID NO: 84511 - protein, 326 aa, Arabidopsis thaliana
  peptide (1)..(326): Ceres Seq. ID no. 12675543
  misc_feature (1)..(326): Homolog of NCBI NO: 18399114 NR Description: allinase, putative; protein id: At1g34065.1
  misc_feature (9)..(319): Homolog of NCBI NO: 18420458 NR Description: mitochondrial carrier protein family; protein id: supported by cDNA: 32654., supported by cDNA: gi_15028274, by cDNA: gi_19310698 [Arabidopsis thaliana]
  misc_feature (49)..(322): Homolog of NCBI NO: 34394981 NR Description: mitochondrial aspartate-glutamate carrier
  misc_feature (9)..(289): Homolog of NCBI NO: 7486053 NR Description: hypothetical protein F23K16.90 - Arabidopsis
  misc_feature (66)..(224): Homolog of NCBI NO: 25518662 NR Description: hypothetical protein F12G12.11 [imported] - thaliana >gi|10086470|gb|AAG12530.1|AC015446_11 Hypothetical
  misc_feature (19)..(84): Homolog of NCBI NO: 25518662 NR Description: hypothetical protein F12G12.11 [imported] - thaliana >gi|10086470|gb|AAG12530.1|AC015446_11 Hypothetical
  misc_feature (1)..(41): Homolog of NCBI NO: 25518662 NR Description: hypothetical protein F12G12.11 [imported] - thaliana >gi|10086470|gb|AAG12530.1|AC015446_11 Hypothetical
  misc_feature (35)..(320): Homolog of NCBI NO: 24650120 NR Description: CG4743-PA [Drosophila melanogaster]
  misc_feature (57)..(323): Homolog of NCBI NO: 27754081 NR Description: RIKEN cDNA 4930433D19; expressed sequence [Mus musculus] >gi|22477482|gb|AAH37142.1| Unknown (protein for
  misc_feature (49)..(307): Homolog of NCBI NO: 19115553 NR Description: agpet8 protein. [Schizosaccharomyces pombe]
MDSDIVSSSIDRSQTAMPDALAFKSINDPIKNQINSCAAICVKQDDPCHFLRVLYESLITGGLAGVVVEAALYPIDTIKTRIQVARDGGKIIWKDYTLVLVEILSVSYRNASALFFGVYEPTKQKLLKVLPDNLSAVAHLAAGALGGAVSSIVRVPTEVVKQRMQTGQFVSAPDAVRLIIAKEGFGGMYAAHLEGYGSFLLRDLPFDALQFCVYEQLRIGYKLAARRDLNDPENAMIGAFAGAVTGVLTTPLDVIKTRLMVQGSGTQYKGVSDCIKTIIREEGSSALWKGMGPRVLWIGIGGSIFFGVLEKTKQILSERSQKSHNA

SEQ ID NO: 84512 - protein, 310 aa, Arabidopsis thaliana
  peptide (1)..(310): Ceres Seq. ID no. 12675544
  misc_feature (1)..(310): Homolog of NCBI NO: 18399114 NR Description: allinase, putative; protein id: At1g34065.1
  misc_feature (1)..(303): Homolog of NCBI NO: 18420458 NR Description: mitochondrial carrier protein family; protein id: supported by cDNA: 32654., supported by cDNA: gi_15028274, by cDNA: gi_19310698 [Arabidopsis thaliana]
  misc_feature (33)..(306): Homolog of NCBI NO: 34394981 NR Description: mitochondrial aspartate-glutamate carrier
  misc_feature (1)..(273): Homolog of NCBI NO: 7486053 NR Description: hypothetical protein F23K16.90 - Arabidopsis
  misc_feature (50)..(208): Homolog of NCBI NO: 25518662 NR Description: hypothetical protein F12G12.11 [imported] - thaliana >gi|10086470|gb|AAG12530.1|AC015446_11 Hypothetical
  misc_feature (3)..(68): Homolog of NCBI NO: 25518662 NR Description: hypothetical protein F12G12.11 [imported] - thaliana >gi|10086470|gb|AAG12530.1|AC015446_11 Hypothetical
  misc_feature (1)..(25): Homolog of NCBI NO: 25518662 NR Description: hypothetical protein F12G12.11 [imported] - thaliana >gi|10086470|gb|AAG12530.1|AC015446_11 Hypothetical
  misc_feature (19)..(304): Homolog of NCBI NO: 24650120 NR Description: CG4743-PA [Drosophila melanogaster]
  misc_feature (41)..(307): Homolog of NCBI NO: 27754081 NR Description: RIKEN cDNA 4930433D19; expressed sequence [Mus musculus] >gi|22477482|gb|AAH37142.1| Unknown (protein for
  misc_feature (33)..(291): Homolog of NCBI NO: 19115553 NR Description: agpet8 protein. [Schizosaccharomyces pombe]
MPDALAFKSINDPIKNQINSCAAICVKQDDPCHFLRVLYESLITGGLAGVVVEAALYPIDTIKTRIQVARDGGKIIWKDYTLVLVEILSVSYRNASALFFGVYEPTKQKLLKVLPDNLSAVAHLAAGALGGAVSSIVRVPTEVVKQRMQTGQFVSAPDAVRLIIAKEGFGGMYAAHLEGYGSFLLRDLPFDALQFCVYEQLRIGYKLAARRDLNDPENAMIGAFAGAVTGVLTTPLDVIKTRLMVQGSGTQYKGVSDCIKTIIREEGSSALWKGMGPRVLWIGIGGSIFFGVLEKTKQILSERSQKSHNA

SEQ ID NO: 84513 - DNA, 1830 bp, Arabidopsis thaliana
  misc_feature (1)..(1830): Ceres Seq. ID no. 12675602
  misc_feature: MA Experiment ID: 20000171 Result: Down-regulated in Transcription
  misc_feature: MA Experiment 20000171 PARAMETER Experiment Name: At_42deg_Heat_P Parameter: Age (day) Value: 14
  misc_feature: MA Experiment 20000171 PARAMETER Experiment Name: At_42deg_Heat_P Parameter: Organism Value: A. thaliana
  misc_feature: MA Experiment 20000171 PARAMETER Experiment Name: At_42deg_Heat_P Parameter: Plant Line Value: WS
  misc_feature: MA Experiment 20000171 PARAMETER Experiment Name: At_42deg_Heat_P Parameter: Temperature (deg C) Value: 42 vs. 22
  misc_feature: MA Experiment 20000171 PARAMETER Experiment Name: At_42deg_Heat_P Parameter: Timepoint (hr) Value: 1
  misc_feature: MA Experiment 20000171 PARAMETER Experiment Name: At_42deg_Heat_P Parameter: Tissue Value: Aerial
  misc_feature: MA Experiment ID: 20000173 Result: Down-regulated in Transcription
  misc_feature: MA Experiment 20000173 PARAMETER Experiment Name: At_42deg_Heat_P Parameter: Age (day) Value: 14
  misc_feature: MA Experiment 20000173 PARAMETER Experiment Name: At_42deg_Heat_P Parameter: Organism Value: A. thaliana
  misc_feature: MA Experiment 20000173 PARAMETER Experiment Name: At_42deg_Heat_P Parameter: Plant Line Value: WS
  misc_feature: MA Experiment 20000173 PARAMETER Experiment Name: At_42deg_Heat_P Parameter: Temperature (deg C) Value: 42 vs. 22
  misc_feature: MA Experiment 20000173 PARAMETER Experiment Name: At_42deg_Heat_P Parameter: Timepoint (hr) Value: 6
  misc_feature: MA Experiment 20000173 PARAMETER Experiment Name: At_42deg_Heat_P Parameter: Tissue Value: Aerial
  misc_feature: MA Experiment ID: 20000184 Result: Down-regulated in Transcription
  misc_feature: MA Experiment 20000184 PARAMETER Experiment Name: At_Shoots__P Parameter: Age (day) Value: 7
  misc_feature: MA Experiment 20000184 PARAMETER Experiment Name: At_Shoots__P Parameter: Tissue Value: Shoots vs. Whole Plant
  misc_feature: MA Experiment ID: 20001451 Result: Down-regulated in Transcription
  misc_feature: MA Experiment 20001451 PARAMETER Experiment Name: At_Far-red-induction_P Parameter: Age (day) Value: 7
  misc_feature: MA Experiment 20001451 PARAMETER Experiment Name: At_Far-red-induction_P Parameter: Light Value: Far-red vs. White
  misc_feature: MA Experiment 20001451 PARAMETER Experiment Name: At_Far-red-induction_P Parameter: Organism Value: A. thaliana
  misc_feature: MA Experiment 20001451 PARAMETER Experiment Name: At_Far-red-induction_P Parameter: Plant Line Value: Columbia
  misc_feature: MA Experiment 20001451 PARAMETER Experiment Name: At_Far-red-induction_P Parameter: Timepoint (hr) Value: 24
  misc_feature: MA Experiment 20001451 PARAMETER Experiment Name: At_Far-red-induction_P Parameter: Tissue Value: Whole Plant
  misc_feature: MA Experiment ID: 20001905 Result: Down-regulated in Transcription
  misc_feature: MA Experiment 20001905 PARAMETER Experiment Name: At_Drought_Reproduction_P Parameter: Age (day) Value: 40
  misc_feature: MA Experiment 20001905 PARAMETER Experiment Name: At_Drought_Reproduction_P Parameter: Organism Value: A. thaliana
  misc_feature: MA Experiment 20001905 PARAMETER Experiment Name: At_Drought_Reproduction_P Parameter: Plant Line Value: WS
  misc_feature: MA Experiment 20001905 PARAMETER Experiment Name: At_Drought_Reproduction_P Parameter: Timepoint (day) Value: 10
  misc_feature: MA Experiment 20001905 PARAMETER Experiment Name: At_Drought_Reproduction_P Parameter: Tissue Value: Rosettes
  misc_feature: MA Experiment 20001905 PARAMETER Experiment Name: At_Drought_Reproduction_P Parameter: Treatment Value: Drought vs. No Drought
atgggtgggctttgttcaaggagttcatctgtaaataatgctcctggtggaacctttgcacatgttaatggtcatcatctcaataacaatgcctctgacttgaattctcattctggtgaaagtggacttaaagatgatccttctcctgttaccgagaatgttgatgataataagcatacatcggaatcgttttcgtttcctatagtctctagtggatctcatcctcaaaatatcgaggatgggattcctcggttatcgagggttttatctcagaaatctagatccactaagtctagacaagctgctgttgctaaggtttcggaagtaagctctcttttgggtagggctggtactatgggacttggtaaagctgtggatgtgttggatacactcgggagtagtatgacgaatctgaatcttagtggggggttttcttctgcgacgacggtgaaagggaataagatatcaatcttgtcttttgaagttgctaatactattgttaaaggcgccaatcttatgcattctctttcgaaagatagcattactcatttgaaagaggttgtgttaccttcagaaggtgttcagaacctgatatcgaaagacatggatgaactgttgagaattgctgctgctgataaaaggttccaacatgatcctgtcactttggtggtcacacaacgggacttgtatcatgaactccatgcgctggataggtttgaacaagattaccaacgtaagatccaggaagaagagaacccaagcacagcacaacgaggtgtgggagataccctcgctatcttgagaactgaattaaagagtcagaagaagcatgttagaaacttaaagaaaaagtctctttggtctaggatcttggaagaggtgatggagaaactagtagatgttgtccatttcttgcatttagagattcacgaagcctttggtggtgcggatcctgataagcctgcaaatgacccgccaatcaatcataaaaaactgggctctgctggtcttgccttgcattacgcaaacatcattactcaaattgatactcttgtgtcccggtctagcactatgcctgcaagcacaagagatgctttgtaccaaggtttacccccaagcataaaatctgctttacgctccagaatacagtccttccaggttaaagaagagctcactgttcctcaaataaaagctgaaatggaaaaaacattgcagtggcttgttcctgttgctacaaacaccaccaaagcgcatcatggttttggatgggttggagaatgggcaagttccgggtcggaggcgaaccagagacctgcaggtcaaaccatactaaggatagatactcttcaccatgcagataaagaaaaaaccgaggcttacatattagacctggtggtgtggctccatcatctcgttacccaagtcagggccactacaggttatggcctaagatctcctgttaagtctccaatcagatcacctaaccagaaaacgatccaactctccagcggttcacacaacccgagtatgggtttgccattgctgactacggaggatcaagagatgcttagagatgtaagcaagcggagaaagacgccaggaataagcaagagccaagagtttgaaacggtggctaaagcacgtctttgtaagcaccataggctaagcaaaagcagtagccactcaccaatgatgggcgagatgatgaagaataagaaggatactttctcaaccagaagaccttcttctgttcccatcattgattttgacattgatcgcatgaaagctctcgatgtgattgatcgcgtggacaccattcgaagcttgtag

SEQ ID NO: 84514 - protein, 609 aa, Arabidopsis thaliana
  peptide (1)..(609): Ceres Seq. ID no. 12675603
  misc_feature (331)..(416): Pfam Name: Protein of unknown function (DUF668) Pfam Description: Protein of unknown function (DUF668)
  misc_feature (217)..(609): Homolog of NCBI NO: 15218580 NR Description: hypothetical protein; protein id: At1g34320.1
  misc_feature (1)..(250): Homolog of NCBI NO: 15218580 NR Description: hypothetical protein; protein id: At1g34320.1
  misc_feature (220)..(607): Homolog of NCBI NO: 30682523 NR Description: expressed protein [Arabidopsis thaliana]
  misc_feature (1)..(250): Homolog of NCBI NO: 30682523 NR Description: expressed protein [Arabidopsis thaliana]
  misc_feature (1)..(608): Homolog of NCBI NO: 34908726 NR Description: P0491F11.23 [Oryza sativa (japonica
  misc_feature (222)..(474): Homolog of NCBI NO: 38345368 NR Description: OSJNBa0088K19.7 [Oryza sativa (japonica
  misc_feature (112)..(257): Homolog of NCBI NO: 38345368 NR Description: OSJNBa0088K19.7 [Oryza sativa (japonica
  misc_feature (211)..(571): Homolog of NCBI NO: 18397646 NR Description: unknown protein; protein id: At1g30755.1, by cDNA: gi_20466801 [Arabidopsis thaliana]
  misc_feature (211)..(416): Homolog of NCBI NO: 25513510 NR Description: T5I8.21 protein - Arabidopsis thaliana
  misc_feature (136)..(414): Homolog of NCBI NO: 37534274 NR Description: contains similarity to receptor-like protein
MGGLCSRSSSVNNAPGGTFAHVNGHHLNNNASDLNSHSGESGLKDDPSPVTENVDDNKHTSESFSFPIVSSGSHPQNIEDGIPRLSRVLSQKSRSTKSRQAAVAKVSEVSSLLGRAGTMGLGKAVDVLDTLGSSMTNLNLSGGFSSATTVKGNKISILSFEVANTIVKGANLMHSLSKDSITHLKEVVLPSEGVQNLISKDMDELLRIAAADKRFQHDPVTLVVTQRDLYHELHALDRFEQDYQRKIQEEENPSTAQRGVGDTLAILRTELKSQKKHVRNLKKKSLWSRILEEVMEKLVDVVHFLHLEIHEAFGGADPDKPANDPPINHKKLGSAGLALHYANIITQIDTLVSRSSTMPASTRDALYQGLPPSIKSALRSRIQSFQVKEELTVPQIKAEMEKTLQWLVPVATNTTKAHHGFGWVGEWASSGSEANQRPAGQTILRIDTLHHADKEKTEAYILDLVVWLHHLVTQVRATTGYGLRSPVKSPIRSPNQKTIQLSSGSHNPSMGLPLLTTEDQEMLRDVSKRRKTPGISKSQEFETVAKARLCKHHRLSKSSSHSPMMGEMMKNKKDTFSTRRPSSVPIIDFDIDRMKALDVIDRVDTIRSL

SEQ ID NO: 84515 - protein, 491 aa, Arabidopsis thaliana
  peptide (1)..(491): Ceres Seq. ID no. 12675604
  misc_feature (213)..(298): Pfam Name: Protein of unknown function (DUF668) Pfam Description: Protein of unknown function (DUF668)
  misc_feature (99)..(491): Homolog of NCBI NO: 15218580 NR Description: hypothetical protein; protein id: At1g34320.1
  misc_feature (1)..(132): Homolog of NCBI NO: 15218580 NR Description: hypothetical protein; protein id: At1g34320.1
  misc_feature (102)..(489): Homolog of NCBI NO: 30682523 NR Description: expressed protein [Arabidopsis thaliana]
  misc_feature (1)..(132): Homolog of NCBI NO: 30682523 NR Description: expressed protein [Arabidopsis thaliana]
  misc_feature (1)..(490): Homolog of NCBI NO: 34908726 NR Description: P0491F11.23 [Oryza sativa (japonica
  misc_feature (104)..(356): Homolog of NCBI NO: 38345368 NR Description: OSJNBa0088K19.7 [Oryza sativa (japonica
  misc_feature (1)..(139): Homolog of NCBI NO: 38345368 NR Description: OSJNBa0088K19.7 [Oryza sativa (japonica
  misc_feature (93)..(453): Homolog of NCBI NO: 18397646 NR Description: unknown protein; protein id: At1g30755.1, by cDNA: gi_20466801 [Arabidopsis thaliana]
  misc_feature (93)..(298): Homolog of NCBI NO: 25513510 NR Description: T5I8.21 protein - Arabidopsis thaliana
  misc_feature (18)..(296): Homolog of NCBI NO: 37534274 NR Description: contains similarity to receptor-like protein
MGLGKAVDVLDTLGSSMTNLNLSGGFSSATTVKGNKISILSFEVANTIVKGANLMHSLSKDSITHLKEVVLPSEGVQNLISKDMDELLRIAAADKRFQHDPVTLVVTQRDLYHELHALDRFEQDYQRKIQEEENPSTAQRGVGDTLAILRTELKSQKKHVRNLKKKSLWSRILEEVMEKLVDVVHFLHLEIHEAFGGADPDKPANDPPINHKKLGSAGLALHYANIITQIDTLVSRSSTMPASTRDALYQGLPPSIKSALRSRIQSFQVKEELTVPQIKAEMEKTLQWLVPVATNTTKAHHGFGWVGEWASSGSEANQRPAGQTILRIDTLHHADKEKTEAYILDLVVWLHHLVTQVRATTGYGLRSPVKSPIRSPNQKTIQLSSGSHNPSMGLPLLTTEDQEMLRDVSKRRKTPGISKSQEFETVAKARLCKHHRLSKSSSHSPMMGEMMKNKKDTFSTRRPSSVPIIDFDIDRMKALDVIDRVDTIRSL

SEQ ID NO: 84516 - protein, 475 aa, Arabidopsis thaliana
  peptide (1)..(475): Ceres Seq. ID no. 12675605
  misc_feature (197)..(282): Pfam Name: Protein of unknown function (DUF668) Pfam Description: Protein of unknown function (DUF668)
  misc_feature (83)..(475): Homolog of NCBI NO: 15218580 NR Description: hypothetical protein; protein id: At1g34320.1
  misc_feature (1)..(116): Homolog of NCBI NO: 15218580 NR Description: hypothetical protein; protein id: At1g34320.1
  misc_feature (86)..(473): Homolog of NCBI NO: 30682523 NR Description: expressed protein [Arabidopsis thaliana]
  misc_feature (1)..(116): Homolog of NCBI NO: 30682523 NR Description: expressed protein [Arabidopsis thaliana]
  misc_feature (1)..(474): Homolog of NCBI NO: 34908726 NR Description: P0491F11.23 [Oryza sativa (japonica
  misc_feature (88)..(340): Homolog of NCBI NO: 38345368 NR Description: OSJNBa0088K19.7 [Oryza sativa (japonica
  misc_feature (1)..(123): Homolog of NCBI NO: 38345368 NR Description: OSJNBa0088K19.7 [Oryza sativa (japonica
  misc_feature (77)..(437): Homolog of NCBI NO: 18397646 NR Description: unknown protein; protein id: At1g30755.1, by cDNA: gi_20466801 [Arabidopsis thaliana]
  misc_feature (77)..(282): Homolog of NCBI NO: 25513510 NR Description: T5I8.21 protein - Arabidopsis thaliana
  misc_feature (2)..(280): Homolog of NCBI NO: 37534274 NR Description: contains similarity to receptor-like protein
MTNLNLSGGFSSATTVKGNKISILSFEVANTIVKGANLMHSLSKDSITHLKEVVLPSEGVQNLISKDMDELLRIAAADKRFQHDPVTLVVTQRDLYHELHALDRFEQDYQRKIQEEENPSTAQRGVGDTLAILRTELKSQKKHVRNLKKKSLWSRILEEVMEKLVDVVHFLHLEIHEAFGGADPDKPANDPPINHKKLGSAGLALHYANIITQIDTLVSRSSTMPASTRDALYQGLPPSIKSALRSRIQSFQVKEELTVPQIKAEMEKTLQWLVPVATNTTKAHHGFGWVGEWASSGSEANQRPAGQTILRIDTLHHADKEKTEAYILDLVVWLHHLVTQVRATTGYGLRSPVKSPIRSPNQKTIQLSSGSHNPSMGLPLLTTEDQEMLRDVSKRRKTPGISKSQEFETVAKARLCKHHRLSKSSSHSPMMGEMMKNKKDTFSTRRPSSVPIIDFDIDRMKALDVIDRVDTIRSL

SEQ ID NO: 84517 - DNA, 828 bp, Arabidopsis thaliana
  misc_feature (1)..(828): Ceres Seq. ID no. 12675606
  misc_feature: MA Experiment ID: 20000307 Result: Up-regulated in Transcription
  misc_feature: MA Experiment 20000307 PARAMETER Experiment Name: At_Germinating_Seeds_Sub_P Parameter: Age (hr) Value: 24 vs. 0
  misc_feature: MA Experiment 20000307 PARAMETER Experiment Name: At_Germinating_Seeds_Sub_P Parameter: Organism Value: A. thaliana
  misc_feature: MA Experiment 20000307 PARAMETER Experiment Name: At_Germinating_Seeds_Sub_P Parameter: Plant Line Value: WS
  misc_feature: MA Experiment 20000307 PARAMETER Experiment Name: At_Germinating_Seeds_Sub_P Parameter: Tissue Value: Germinating Seeds
  misc_feature: MA Experiment ID: 20000314 Result: Up-regulated in Transcription
  misc_feature: MA Experiment 20000314 PARAMETER Experiment Name: At_14day_Shoots-Roots_Sub_P Parameter: Age (day) Value: 14
  misc_feature: MA Experiment 20000314 PARAMETER Experiment Name: At_14day_Shoots-Roots_Sub_P Parameter: Organism Value: A. thaliana
  misc_feature: MA Experiment 20000314 PARAMETER Experiment Name: At_14day_Shoots-Roots_Sub_P Parameter: Plant Line Value: WS
  misc_feature: MA Experiment 20000314 PARAMETER Experiment Name: At_14day_Shoots-Roots_Sub_P Parameter: Tissue Value: Roots vs. Whole Plant
atgagggcaatcacagcttcgtttttcattttctgcttccttgttccctctgttttcgggaagctccgacgtgggttttatgacagttcatgccctctcgctgaatctaccgtgtctagagttgttgccaaacatcactcccttaaccaaaccgttactgcagcgttgcttcgtatgcagtttcatgattgctttgtcaacggttgtgatgcttccctcttgatcgactcaacgcccgaaaggccatctgagaaaagcgcggaggcaaacgtaagcgtgagaggcttcgagatcatcgatgaggttaagaaagagcttgagatagtttgcccaaaaacagtctcatgcgcagacattgtaactctagccacaaaagactcgattgcattagcgggtgattttgaaggtaaaggtttgaatgtcaccaacatggttgcacttattggtggtggtcacagcgtcggtgttgcacattgcagtctttttcaggataggcttaaggatcctaaaatggacagcaaactgaaagctaagttacagaacacatgtcgtggtccaaatgacccatcagtggtcttggaccaaatgacgccacttgaggtagacaatcaaatctataaacagataaaaagtcaaagaggaatccttagaattgatcaaaacttgggtctcgatgactcaaccagtaggatcgtatcaaattttgcattaaatgaaacattattcggagaaagatttgctgaagcaatgcagataatgggtgaaataaaagttcttacgggaaattctggagagatcaggacaaactgcatagtcgtcagccactga

SEQ ID NO: 84518 - protein, 275 aa, Arabidopsis thaliana
  peptide (1)..(275): Ceres Seq. ID no. 12675607
  misc_feature (1)..(275): Homolog of NCBI NO: 25285597 NR Description: probable peroxidase, 81098-80059 [imported] -
  misc_feature (1)..(275): Homolog of NCBI NO: 15218596 NR Description: peroxidase, putative; protein id: At1g34330.1
  misc_feature (1)..(275): Homolog of NCBI NO: 5091615 NR Description: Similar to gb|X98322 peroxidase (prxr10) from
  misc_feature (117)..(270): Homolog of NCBI NO: 15218665 NR Description: peroxidase, putative; protein id: At1g34510.1 thaliana] >gi|25453210|sp|Q9LNL0|PER8_ARATH Peroxidase 8 (Atperox P8) >gi|25285599|pir||A86469 protein F12K21.18
  misc_feature (1)..(132): Homolog of NCBI NO: 15218665 NR Description: peroxidase, putative; protein id: At1g34510.1 thaliana] >gi|25453210|sp|Q9LNL0|PER8_ARATH Peroxidase 8 (Atperox P8) >gi|25285599|pir||A86469 protein F12K21.18
  misc_feature (121)..(275): Homolog of NCBI NO: 18416663 NR Description: peroxidase, putative; protein id: At4g26010.1, by cDNA: gi_15724251, supported by cDNA: gi_16226554, supported cDNA: gi_17530565, supported by cDNA: gi_19699109 [Arabidopsis
  misc_feature (1)..(132): Homolog of NCBI NO: 18416663 NR Description: peroxidase, putative; protein id: At4g26010.1, by cDNA: gi_15724251, supported by cDNA: gi_16226554, supported cDNA: gi_17530565, supported by cDNA: gi_19699109 [Arabidopsis
  misc_feature (121)..(275): Homolog of NCBI NO: 7433094 NR Description: peroxidase homolog F20B18.120 - Arabidopsis >gi|4538930|emb|CAB39666.1| putative peroxidase [Arabidopsis >gi|7269452|emb|CAB79456.1| putative peroxidase [Arabidopsis
  misc_feature (1)..(132): Homolog of NCBI NO: 7433094 NR Description: peroxidase homolog F20B18.120 - Arabidopsis >gi|4538930|emb|CAB39666.1| putative peroxidase [Arabidopsis >gi|7269452|emb|CAB79456.1| putative peroxidase [Arabidopsis
  misc_feature (121)..(270): Homolog of NCBI NO: 15238030 NR Description: peroxidase, putative; protein id: At5g17820.1, by cDNA: 39195. [Arabidopsis thaliana] Peroxidase 57 precursor (Atperox P57) (PRXR10) (ATP13a)
MRAITASFFIFCFLVPSVFGKLRRGFYDSSCPLAESTVSRVVAKHHSLNQTVTAALLRMQFHDCFVNGCDASLLIDSTPERPSEKSAEANVSVRGFEIIDEVKKELEIVCPKTVSCADIVTLATKDSIALAGDFEGKGLNVTNMVALIGGGHSVGVAHCSLFQDRLKDPKMDSKLKAKLQNTCRGPNDPSVVLDQMTPLEVDNQIYKQIKSQRGILRIDQNLGLDDSTSRIVSNFALNETLFGERFAEAMQIMGEIKVLTGNSGEIRTNCIVVSH

SEQ ID NO: 84519 - protein, 217 aa, Arabidopsis thaliana
  peptide (1)..(217): Ceres Seq. ID no. 12675608
  misc_feature (1)..(217): Homolog of NCBI NO: 25285597 NR Description: probable peroxidase, 81098-80059 [imported] -
  misc_feature (1)..(217): Homolog of NCBI NO: 15218596 NR Description: peroxidase, putative; protein id: At1g34330.1
  misc_feature (1)..(217): Homolog of NCBI NO: 5091615 NR Description: Similar to gb|X98322 peroxidase (prxr10) from
  misc_feature (59)..(212): Homolog of NCBI NO: 15218665 NR Description: peroxidase, putative; protein id: At1g34510.1 thaliana] >gi|25453210|sp|Q9LNL0|PER8_ARATH Peroxidase 8 (Atperox P8) >gi|25285599|pir||A86469 protein F12K21.18
  misc_feature (1)..(74): Homolog of NCBI NO: 15218665 NR Description: peroxidase, putative; protein id: At1g34510.1 thaliana] >gi|25453210|sp|Q9LNL0|PER8_ARATH Peroxidase 8 (Atperox P8) >gi|25285599|pir||A86469 protein F12K21.18
  misc_feature (63)..(217): Homolog of NCBI NO: 18416663 NR Description: peroxidase, putative; protein id: At4g26010.1, by cDNA: gi_15724251, supported by cDNA: gi_16226554, supported cDNA: gi_17530565, supported by cDNA: gi_19699109 [Arabidopsis
  misc_feature (1)..(74): Homolog of NCBI NO: 18416663 NR Description: peroxidase, putative; protein id: At4g26010.1, by cDNA: gi_15724251, supported by cDNA: gi_16226554, supported cDNA: gi_17530565, supported by cDNA: gi_19699109 [Arabidopsis
  misc_feature (63)..(217): Homolog of NCBI NO: 7433094 NR Description: peroxidase homolog F20B18.120 - Arabidopsis >gi|4538930|emb|CAB39666.1| putative peroxidase [Arabidopsis >gi|7269452|emb|CAB79456.1| putative peroxidase [Arabidopsis
  misc_feature (1)..(74): Homolog of NCBI NO: 7433094 NR Description: peroxidase homolog F20B18.120 - Arabidopsis >gi|4538930|emb|CAB39666.1| putative peroxidase [Arabidopsis >gi|7269452|emb|CAB79456.1| putative peroxidase [Arabidopsis
  misc_feature (63)..(212): Homolog of NCBI NO: 15238030 NR Description: peroxidase, putative; protein id: At5g17820.1, by cDNA: 39195. [Arabidopsis thaliana] Peroxidase 57 precursor (Atperox P57) (PRXR10) (ATP13a)
MQFHDCFVNGCDASLLIDSTPERPSEKSAEANVSVRGFEIIDEVKKELEIVCPKTVSCADIVTLATKDSIALAGDFEGKGLNVTNMVALIGGGHSVGVAHCSLFQDRLKDPKMDSKLKAKLQNTCRGPNDPSVVLDQMTPLEVDNQIYKQIKSQRGILRIDQNLGLDDSTSRIVSNFALNETLFGERFAEAMQIMGEIKVLTGNSGEIRTNCIVVSH

SEQ ID NO: 84520 - DNA, 1566 bp, Arabidopsis thaliana
  misc_feature (1)..(1566): Ceres Seq. ID no. 12675647
  misc_feature: MA Experiment ID: 108595 Result: Down-regulated in Transcription
  misc_feature: MA Experiment 108595 PARAMETER Experiment Name: At_Ler-pi_Ovule_cDNA_P Parameter: Plant Line Value: null
gctagagaaatcttttacctttttcgtaaatttagatgcttcttcatcactacaatttctctcctgtcactctcttcttctacgctcttgtctttatatccgatctacctcgttccctctcaaatccctaaatcgtctcctatatcctttcgcaaatggacaaacccaagatctgaaaaagtttttgtcttttctctcccaatcgcctgattcaagcctaaagctcggtttttttcttctgggtatttaggggttaagtgtattgtagaaaagcatggcgagtttgagtgggagttggagagatgcgtataaaggaatgtcatcggataatataaagggtttagtattggctttatcttcaagcttattcattggtgctagtttcattgttaagaagaaaggtctcaagagagctggtgcttctggtctcagagcaggttctggaggttattcttacctgcttgagcctctctggtgggtaggcatgataacgatgattgtaggggaaattgccaattttgctgcttatgcctttgcgcctgccattttagtaactcctcttggtgctctcagcataattatcagtgctgctcttgctcatgtcatcctacacgaaaagttgcatactttcgggcttcttggttgtgtcttatgtgttgttggttcgataactattgtcttacatgctcctcaagaacaagagattgattctgtgttacaagtatggaatcttgcgacagaacctgcttttcttctctacgctgcagcagtagtaggagcagccattatactcatagttcagtttgtaccacagtacggtcagtcacatgtcatggtatatatcggggtttgttctcttgttggatcattgtcggtcatgagcgtcaaagcgctcgggatagcattaaagcttacgttttcaggaatgaatcagttaatttaccctcagacatgggtcttcacgctgatagttctcacctgcgtgataacccaaatgaactatctaaacaaggcgcttgacactttcaacacggctgtagtttcacctatatactatgttatgttcacatcattgaccatcctagctagtgtcatcatgtttaaggactgggatcgacaggacggaactcagatagtgacggagttgtgtgggtttgtgacaatcctttcaggaacctttttgcttcacaaaacaaaggatatggttgatggttcttcgtccttgggaaatttggctcttcgccttcctaaacaattggaagatagtaatgggtttgagcaagaagggatcccactcactctcagacgccacgagtgtaccaagtcgccaaggccaatgcgtcaattcattctaccgcaagacggtcctgaagctgtgtaaggagatacaaagtagattcaatatatgtaaaccacgcggcttcagagacagcatgaagaaaaagagaagatagattattggtacaaattgcatagggaatttttcacatattcatttgttatgctttctctagagatgtgaaaatgtgtctgacagattgatttaactgttatataaacacatat

SEQ ID NO: 84521 - protein, 368 aa, Arabidopsis thaliana
  peptide (1)..(368): Ceres Seq. ID no. 12675648
  misc_feature (15)..(314): Pfam Name: Protein of unknown function (DUF803) Pfam Description: Protein of unknown function (DUF803)
  misc_feature (1)..(368): Homolog of NCBI NO: 18399280 NR Description: expressed protein; protein id: At1g34470.1, by cDNA: 110782. [Arabidopsis thaliana] F12K21.21 [Arabidopsis thaliana]
  misc_feature (1)..(352): Homolog of NCBI NO: 18409942 NR Description: expressed protein; protein id: At1g71900.1, by cDNA: gi_15028240, supported by cDNA: gi_19310780 [Arabidopsis >gi|15028241|gb|AAK76709.1| unknown protein [Arabidopsis
  misc_feature (1)..(314): Homolog of NCBI NO: 25406128 NR Description: unknown protein F17M19.5 [imported] - Arabidopsis
  misc_feature (6)..(355): Homolog of NCBI NO: 20161440 NR Description: B1065E10.15 [Oryza sativa (japonica
  misc_feature (15)..(338): Homolog of NCBI NO: 15229534 NR Description: unknown protein; protein id: At3g23870.1 thaliana] >gi|9294655|dbj|BAB03004.1|
  misc_feature (15)..(319): Homolog of NCBI NO: 18414079 NR Description: expressed protein; protein id: At4g13800.1,
  misc_feature (15)..(319): Homolog of NCBI NO: 21593618 NR Description: unknown [Arabidopsis thaliana]
  misc_feature (15)..(309): Homolog of NCBI NO: 30681265 NR Description: expressed protein [Arabidopsis thaliana]
  misc_feature (15)..(320): Homolog of NCBI NO: 21742149 NR Description: OSJNBa0069D17.4 [Oryza sativa (japonica
  misc_feature (15)..(309): Homolog of NCBI NO: 26449939 NR Description: unknown protein [Arabidopsis thaliana]
MASLSGSWRDAYKGMSSDNIKGLVLALSSSLFIGASFIVKKKGLKRAGASGLRAGSGGYSYLLEPLWWVGMITMIVGEIANFAAYAFAPAILVTPLGALSIIISAALAHVILHEKLHTFGLLGCVLCVVGSITIVLHAPQEQEIDSVLQVWNLATEPAFLLYAAAVVGAAIILIVQFVPQYGQSHVMVYIGVCSLVGSLSVMSVKALGIALKLTFSGMNQLIYPQTWVFTLIVLTCVITQMNYLNKALDTFNTAVVSPIYYVMFTSLTILASVIMFKDWDRQDGTQIVTELCGFVTILSGTFLLHKTKDMVDGSSSLGNLALRLPKQLEDSNGFEQEGIPLTLRRHECTKSPRPMRQFILPQDGPEAV

SEQ ID NO: 84522 - protein, 354 aa, Arabidopsis thaliana
  peptide (1)..(354): Ceres Seq. ID no. 12675649
  misc_feature (1)..(300): Pfam Name: Protein of unknown function (DUF803) Pfam Description: Protein of unknown function (DUF803)
  misc_feature (1)..(354): Homolog of NCBI NO: 18399280 NR Description: expressed protein; protein id: At1g34470.1, by cDNA: 110782. [Arabidopsis thaliana] F12K21.21 [Arabidopsis thaliana]
  misc_feature (1)..(338): Homolog of NCBI NO: 18409942 NR Description: expressed protein; protein id: At1g71900.1, by cDNA: gi_15028240, supported by cDNA: gi_19310780 [Arabidopsis >gi|15028241|gb|AAK76709.1| unknown protein [Arabidopsis
  misc_feature (1)..(300): Homolog of NCBI NO: 25406128 NR Description: unknown protein F17M19.5 [imported] - Arabidopsis
  misc_feature (1)..(341): Homolog of NCBI NO: 20161440 NR Description: B1065E10.15 [Oryza sativa (japonica
  misc_feature (1)..(324): Homolog of NCBI NO: 15229534 NR Description: unknown protein; protein id: At3g23870.1 thaliana] >gi|9294655|dbj|BAB03004.1|
  misc_feature (1)..(305): Homolog of NCBI NO: 18414079 NR Description: expressed protein; protein id: At4g13800.1,
  misc_feature (1)..(305): Homolog of NCBI NO: 21593618 NR Description: unknown [Arabidopsis thaliana]
  misc_feature (1)..(295): Homolog of NCBI NO: 30681265 NR Description: expressed protein [Arabidopsis thaliana]
  misc_feature (1)..(306): Homolog of NCBI NO: 21742149 NR Description: OSJNBa0069D17.4 [Oryza sativa (japonica
  misc_feature (1)..(295): Homolog of NCBI NO: 26449939 NR Description: unknown protein [Arabidopsis thaliana]
MSSDNIKGLVLALSSSLFIGASFIVKKKGLKRAGASGLRAGSGGYSYLLEPLWWVGMITMIVGEIANFAAYAFAPAILVTPLGALSIIISAALAHVILHEKLHTFGLLGCVLCVVGSITIVLHAPQEQEIDSVLQVWNLATEPAFLLYAAAVVGAAIILIVQFVPQYGQSHVMVYIGVCSLVGSLSVMSVKALGIALKLTFSGMNQLIYPQTWVFTLIVLTCVITQMNYLNKALDTFNTAVVSPIYYVMFTSLTILASVIMFKDWDRQDGTQIVTELCGFVTILSGTFLLHKTKDMVDGSSSLGNLALRLPKQLEDSNGFEQEGIPLTLRRHECTKSPRPMRQFILPQDGPEAV

SEQ ID NO: 84523 - protein, 298 aa, Arabidopsis thaliana
  peptide (1)..(298): Ceres Seq. ID no. 12675650
  misc_feature (1)..(244): Pfam Name: Protein of unknown function (DUF803) Pfam Description: Protein of unknown function (DUF803)
  misc_feature (1)..(298): Homolog of NCBI NO: 18399280 NR Description: expressed protein; protein id: At1g34470.1, by cDNA: 110782. [Arabidopsis thaliana] F12K21.21 [Arabidopsis thaliana]
  misc_feature (1)..(282): Homolog of NCBI NO: 18409942 NR Description: expressed protein; protein id: At1g71900.1, by cDNA: gi_15028240, supported by cDNA: gi_19310780 [Arabidopsis >gi|15028241|gb|AAK76709.1| unknown protein [Arabidopsis
  misc_feature (1)..(244): Homolog of NCBI NO: 25406128 NR Description: unknown protein F17M19.5 [imported] - Arabidopsis
  misc_feature (1)..(285): Homolog of NCBI NO: 20161440 NR Description: B1065E10.15 [Oryza sativa (japonica
  misc_feature (1)..(268): Homolog of NCBI NO: 15229534 NR Description: unknown protein; protein id: At3g23870.1 thaliana] >gi|9294655|dbj|BAB03004.1|
  misc_feature (1)..(249): Homolog of NCBI NO: 18414079 NR Description: expressed protein; protein id: At4g13800.1,
  misc_feature (1)..(249): Homolog of NCBI NO: 21593618 NR Description: unknown [Arabidopsis thaliana]
  misc_feature (1)..(239): Homolog of NCBI NO: 30681265 NR Description: expressed protein [Arabidopsis thaliana]
  misc_feature (1)..(250): Homolog of NCBI NO: 21742149 NR Description: OSJNBa0069D17.4 [Oryza sativa (japonica
  misc_feature (1)..(239): Homolog of NCBI NO: 26449939 NR Description: unknown protein [Arabidopsis thaliana]
MITMIVGEIANFAAYAFAPAILVTPLGALSIIISAALAHVILHEKLHTFGLLGCVLCVVGSITIVLHAPQEQEIDSVLQVWNLATEPAFLLYAAAVVGAAIILIVQFVPQYGQSHVMVYIGVCSLVGSLSVMSVKALGIALKLTFSGMNQLIYPQTWVFTLIVLTCVITQMNYLNKALDTFNTAVVSPIYYVMFTSLTILASVIMFKDWDRQDGTQIVTELCGFVTILSGTFLLHKTKDMVDGSSSLGNLALRLPKQLEDSNGFEQEGIPLTLRRHECTKSPRPMRQFILPQDGPEAV

SEQ ID NO: 84524 - DNA, 2109 bp, Arabidopsis thaliana
  misc_feature (1)..(2109): Ceres Seq. ID no. 12675654
  misc_feature: MA Experiment ID: 20000184 Result: Down-regulated in Transcription
  misc_feature: MA Experiment 20000184 PARAMETER Experiment Name: At_Shoots__P Parameter: Age (day) Value: 7
  misc_feature: MA Experiment 20000184 PARAMETER Experiment Name: At_Shoots__P Parameter: Tissue Value: Shoots vs. Whole Plant
  misc_feature: MA Experiment ID: 20001451 Result: Down-regulated in Transcription
  misc_feature: MA Experiment 20001451 PARAMETER Experiment Name: At_Far-red-induction_P Parameter: Age (day) Value: 7
  misc_feature: MA Experiment 20001451 PARAMETER Experiment Name: At_Far-red-induction_P Parameter: Light Value: Far-red vs. White
  misc_feature: MA Experiment 20001451 PARAMETER Experiment Name: At_Far-red-induction_P Parameter: Organism Value: A. thaliana
  misc_feature: MA Experiment 20001451 PARAMETER Experiment Name: At_Far-red-induction_P Parameter: Plant Line Value: Columbia
  misc_feature: MA Experiment 20001451 PARAMETER Experiment Name: At_Far-red-induction_P Parameter: Timepoint (hr) Value: 24
  misc_feature: MA Experiment 20001451 PARAMETER Experiment Name: At_Far-red-induction_P Parameter: Tissue Value: Whole Plant
atgtgtatatatatgttcgggtataaaaaatactcacggatatcgggttctgttcgggtaatacccgatacccacaattatttgaaaacagaatccgatcaggtaattagttggaaccgaagtagaacggattcagatatttcaggtcagattcgagtgctcatcgacgacgacaatgctaaaatggctcaatttagacaatcgggaacagatagatttagtgttcgcggcaacggcggaggagcttcttctgatcacgtaacgatcgggatccgaaacggcgtcggtggagctactaaaggtaacaacaacaggtggcgaagatccgtgagagctgataagattcgtcgacttggaatcggttctgttgtgtttgttctttgctttgtgcttcttgttactgttctcgcttactgttatatctctgggtttacttataatagctacgatgataaaggatttgttgattcatatgagggtgattttttgacgaatgtgactagattagatccttcgaaagtgcttgagtttggtcaaggttcagtgattcatggacgagattcgaggtattgggataaagatgatagaagaagagatgatgattataatgaggatgaagtgaaaaaggatgtacaacaagttcataatcctgtgaaggggattggtttgtataatgaagctggaaggaatgagttgaagatgtatgaagctgagtataaagctacgcttgggaaaggtggtcatgagaaaaacaatgagggagttgatagggatcgtgaggatgatgatgcgattgattctcatgatggggatgaatatgttgattctgggcatgaggatgataatgaagaggtgcataaagagaaggttgttcatttggtgaccaagcaagagaatgtggacaaggatgatggaggtgtttcaaaaatgtcacttggggattcttctcttgttagtaagggtggtaagtctgggaaaacatcacgatctgatactaaaagaagaggtcgtcgcagatcttcaggttcatgtgaaatgaagctattgaattctagtcaaccaatagtggagcccttgaatactcgaaaatctgctagattttctttacagtacatagagaaggaagataagcctgatgaagaagaacagtgggagcctagatttgcaggtcatcagagtttacaggagcgagaagattccttcgtggctcaagacaagaaaattcattgcggctttgtcaaaggtcccaaaggatcttcaagcactgggtttgacctgacagaagatgatactaattatatcagtagatgccacatcgctgttagctcatgcatctttggcaattctgatcgtttgaggcctcctgccaacaaaatgataagtcggttgtcgagaaaaaatgtatgcttcattgtgttcgtggacgagattaccatgcaaacactttctgcagaaggacatgccccagacagagcaggattcattggtctgtggaagttggttgtcgtgaagaatcttccttacgcagatatgcggagggtaggaaaaataccaaaaatgttgccacaccgacttttcccatcagcaaggtactcaatctggttggacagcaagttacgacttcagttggacccactactcattctggagtacttcctatggcgtaaaggtcacgagtatgctatatccaatcactatgaccgtcattgtttatgggaagaggttgcacaaaacaagaagctgaacaagtataaccatactgttattaatcaacagtttcagttttacaaggctgatgggctgaccagattcaatgcttcggatccgttcaagcttcttcctagcaatgttccagaggggtctttcatagtacgagctcatactcccatgtcgaacctattctcatgtctttggttcaatgaagtggaacgcttcactccccgggaccagctgagctttgcctatacttaccagaaactaagaaggatgaatcctgataaaccatttaatcttcacatgttcaaggactgtgagagaagaaaaattgcaaagttgttccgtcacagatcagacgagaagcgaaaccttatacaagcagcaatacaataa

SEQ ID NO: 84525 - protein, 702 aa, Arabidopsis thaliana
  peptide (1)..(702): Ceres Seq. ID no. 12675655
  misc_feature (368)..(688): Pfam Name: Protein of unknown function (DUF616) Pfam Description: Protein of unknown function (DUF616)
  misc_feature (238)..(700): Homolog of NCBI NO: 15233955 NR Description: putative protein; protein id: At4g09630.1
  misc_feature (62)..(284): Homolog of NCBI NO: 15233955 NR Description: putative protein; protein id: At4g09630.1
  misc_feature (344)..(691): Homolog of NCBI NO: 15227062 NR Description: unknown protein; protein id: At2g02910.1
  misc_feature (368)..(689): Homolog of NCBI NO: 25405617 NR Description: hypothetical protein F8L10.10 [imported] - thaliana >gi|9454542|gb|AAF87865.1|AC022520_9 Unknown protein
  misc_feature (368)..(689): Homolog of NCBI NO: 30695403 NR Description: expressed protein [Arabidopsis thaliana]
  misc_feature (368)..(694): Homolog of NCBI NO: 15217874 NR Description: unknown protein; protein id: At1g28240.1,
  misc_feature (368)..(694): Homolog of NCBI NO: 17064856 NR Description: Unknown protein [Arabidopsis thaliana]
  misc_feature (368)..(688): Homolog of NCBI NO: 7452444 NR Description: hypothetical protein F20M13.60 - Arabidopsis >gi|4467137|emb|CAB37506.1| putative protein [Arabidopsis >gi|7270833|emb|CAB80514.1| putative protein [Arabidopsis
  misc_feature (368)..(688): Homolog of NCBI NO: 18420250 NR Description: putative protein; protein id: At4g38500.1, by cDNA: gi_15010783 [Arabidopsis thaliana] AT4g38500/F20M13_60 [Arabidopsis thaliana]
  misc_feature (388)..(688): Homolog of NCBI NO: 10177269 NR Description: gb|AAC32911.1~gene_id:MJB21.3~similar to unknown
MCIYMFGYKKYSRISGSVRVIPDTHNYLKTESDQVISWNRSRTDSDISGQIRVLIDDDNAKMAQFRQSGTDRFSVRGNGGGASSDHVTIGIRNGVGGATKGNNNRWRRSVRADKIRRLGIGSVVFVLCFVLLVTVLAYCYISGFTYNSYDDKGFVDSYEGDFLTNVTRLDPSKVLEFGQGSVIHGRDSRYWDKDDRRRDDDYNEDEVKKDVQQVHNPVKGIGLYNEAGRNELKMYEAEYKATLGKGGHEKNNEGVDRDREDDDAIDSHDGDEYVDSGHEDDNEEVHKEKVVHLVTKQENVDKDDGGVSKMSLGDSSLVSKGGKSGKTSRSDTKRRGRRRSSGSCEMKLLNSSQPIVEPLNTRKSARFSLQYIEKEDKPDEEEQWEPRFAGHQSLQEREDSFVAQDKKIHCGFVKGPKGSSSTGFDLTEDDTNYISRCHIAVSSCIFGNSDRLRPPANKMISRLSRKNVCFIVFVDEITMQTLSAEGHAPDRAGFIGLWKLVVVKNLPYADMRRVGKIPKMLPHRLFPSARYSIWLDSKLRLQLDPLLILEYFLWRKGHEYAISNHYDRHCLWEEVAQNKKLNKYNHTVINQQFQFYKADGLTRFNASDPFKLLPSNVPEGSFIVRAHTPMSNLFSCLWFNEVERFTPRDQLSFAYTYQKLRRMNPDKPFNLHMFKDCERRKIAKLFRHRSDEKRNLIQAAIQ

SEQ ID NO: 84526 - protein, 698 aa, Arabidopsis thaliana
  peptide (1)..(698): Ceres Seq. ID no. 12675656
  misc_feature (364)..(684): Pfam Name: Protein of unknown function (DUF616) Pfam Description: Protein of unknown function (DUF616)
  misc_feature (234)..(696): Homolog of NCBI NO: 15233955 NR Description: putative protein; protein id: At4g09630.1
  misc_feature (58)..(280): Homolog of NCBI NO: 15233955 NR Description: putative protein; protein id: At4g09630.1
  misc_feature (340)..(687): Homolog of NCBI NO: 15227062 NR Description: unknown protein; protein id: At2g02910.1
  misc_feature (364)..(685): Homolog of NCBI NO: 25405617 NR Description: hypothetical protein F8L10.10 [imported] - thaliana >gi|9454542|gb|AAF87865.1|AC022520_9 Unknown protein
  misc_feature (364)..(685): Homolog of NCBI NO: 30695403 NR Description: expressed protein [Arabidopsis thaliana]
  misc_feature (364)..(690): Homolog of NCBI NO: 15217874 NR Description: unknown protein; protein id: At1g28240.1,
  misc_feature (364)..(690): Homolog of NCBI NO: 17064856 NR Description: Unknown protein [Arabidopsis thaliana]
  misc_feature (364)..(684): Homolog of NCBI NO: 7452444 NR Description: hypothetical protein F20M13.60 - Arabidopsis >gi|4467137|emb|CAB37506.1| putative protein [Arabidopsis >gi|7270833|emb|CAB80514.1| putative protein [Arabidopsis
  misc_feature (364)..(684): Homolog of NCBI NO: 18420250 NR Description: putative protein; protein id: At4g38500.1, by cDNA: gi_15010783 [Arabidopsis thaliana] AT4g38500/F20M13_60 [Arabidopsis thaliana]
  misc_feature (384)..(684): Homolog of NCBI NO: 10177269 NR Description: gb|AAC32911.1~gene_id:MJB21.3~similar to unknown
MFGYKKYSRISGSVRVIPDTHNYLKTESDQVISWNRSRTDSDISGQIRVLIDDDNAKMAQFRQSGTDRFSVRGNGGGASSDHVTIGIRNGVGGATKGNNNRWRRSVRADKIRRLGIGSVVFVLCFVLLVTVLAYCYISGFTYNSYDDKGFVDSYEGDFLTNVTRLDPSKVLEFGQGSVIHGRDSRYWDKDDRRRDDDYNEDEVKKDVQQVHNPVKGIGLYNEAGRNELKMYEAEYKATLGKGGHEKNNEGVDRDREDDDAIDSHDGDEYVDSGHEDDNEEVHKEKVVHLVTKQENVDKDDGGVSKMSLGDSSLVSKGGKSGKTSRSDTKRRGRRRSSGSCEMKLLNSSQPIVEPLNTRKSARFSLQYIEKEDKPDEEEQWEPRFAGHQSLQEREDSFVAQDKKIHCGFVKGPKGSSSTGFDLTEDDTNYISRCHIAVSSCIFGNSDRLRPPANKMISRLSRKNVCFIVFVDEITMQTLSAEGHAPDRAGFIGLWKLVVVKNLPYADMRRVGKIPKMLPHRLFPSARYSIWLDSKLRLQLDPLLILEYFLWRKGHEYAISNHYDRHCLWEEVAQNKKLNKYNHTVINQQFQFYKADGLTRFNASDPFKLLPSNVPEGSFIVRAHTPMSNLFSCLWFNEVERFTPRDQLSFAYTYQKLRRMNPDKPFNLHMFKDCERRKIAKLFRHRSDEKRNLIQAAIQ

SEQ ID NO: 84527 - protein, 641 aa, Arabidopsis thaliana
  peptide (1)..(641): Ceres Seq. ID no. 12675657
  misc_feature (307)..(627): Pfam Name: Protein of unknown function (DUF616) Pfam Description: Protein of unknown function (DUF616)
  misc_feature (177)..(639): Homolog of NCBI NO: 15233955 NR Description: putative protein; protein id: At4g09630.1
  misc_feature (1)..(223): Homolog of NCBI NO: 15233955 NR Description: putative protein; protein id: At4g09630.1
  misc_feature (283)..(630): Homolog of NCBI NO: 15227062 NR Description: unknown protein; protein id: At2g02910.1
  misc_feature (307)..(628): Homolog of NCBI NO: 25405617 NR Description: hypothetical protein F8L10.10 [imported] - thaliana >gi|9454542|gb|AAF87865.1|AC022520_9 Unknown protein
  misc_feature (307)..(628): Homolog of NCBI NO: 30695403 NR Description: expressed protein [Arabidopsis thaliana]
  misc_feature (307)..(633): Homolog of NCBI NO: 15217874 NR Description: unknown protein; protein id: At1g28240.1,
  misc_feature (307)..(633): Homolog of NCBI NO: 17064856 NR Description: Unknown protein [Arabidopsis thaliana]
  misc_feature (307)..(627): Homolog of NCBI NO: 7452444 NR Description: hypothetical protein F20M13.60 - Arabidopsis >gi|4467137|emb|CAB37506.1| putative protein [Arabidopsis >gi|7270833|emb|CAB80514.1| putative protein [Arabidopsis
  misc_feature (307)..(627): Homolog of NCBI NO: 18420250 NR Description: putative protein; protein id: At4g38500.1, by cDNA: gi_15010783 [Arabidopsis thaliana] AT4g38500/F20M13_60 [Arabidopsis thaliana]
  misc_feature (327)..(627): Homolog of NCBI NO: 10177269 NR Description: gb|AAC32911.1~gene_id:MJB21.3~similar to unknown
MAQFRQSGTDRFSVRGNGGGASSDHVTIGIRNGVGGATKGNNNRWRRSVRADKIRRLGIGSVVFVLCFVLLVTVLAYCYISGFTYNSYDDKGFVDSYEGDFLTNVTRLDPSKVLEFGQGSVIHGRDSRYWDKDDRRRDDDYNEDEVKKDVQQVHNPVKGIGLYNEAGRNELKMYEAEYKATLGKGGHEKNNEGVDRDREDDDAIDSHDGDEYVDSGHEDDNEEVHKEKVVHLVTKQENVDKDDGGVSKMSLGDSSLVSKGGKSGKTSRSDTKRRGRRRSSGSCEMKLLNSSQPIVEPLNTRKSARFSLQYIEKEDKPDEEEQWEPRFAGHQSLQEREDSFVAQDKKIHCGFVKGPKGSSSTGFDLTEDDTNYISRCHIAVSSCIFGNSDRLRPPANKMISRLSRKNVCFIVFVDEITMQTLSAEGHAPDRAGFIGLWKLVVVKNLPYADMRRVGKIPKMLPHRLFPSARYSIWLDSKLRLQLDPLLILEYFLWRKGHEYAISNHYDRHCLWEEVAQNKKLNKYNHTVINQQFQFYKADGLTRFNASDPFKLLPSNVPEGSFIVRAHTPMSNLFSCLWFNEVERFTPRDQLSFAYTYQKLRRMNPDKPFNLHMFKDCERRKIAKLFRHRSDEKRNLIQAAIQ

SEQ ID NO: 84528 - DNA, 1102 bp, Arabidopsis thaliana
  misc_feature (1)..(1102): Ceres Seq. ID no. 12675661
aaaacatttcatctctctccaacaactattcaccacattcaatggagtcaccaccactatacgagatatcctcaagctcttcttctgaaaaacctagacaccatttccaatcccttgatctcttccctaacctcaaccaaaactcttgtatcaacaataccctaattgagcctttaccgcttattgatcgcataaacttgaactcaaacctagacctaaaccctaatcccttgtatgcggaagaaggagagcaagaggaggaagaagaagaagaagaagaccgtgaagtggacgtggacttacacatcggccttcctggttttggtaaaccaagcaatgatgctaaacagctgaagaagagaaatgggaaggagatcgccacatatgacgccggaaaaggcatcgagaatgaactttccggaaaggcatactggatcccggcgccggagcaaattctcatagggttcactcatttttcttgccatgtatgcttcaagacattcaatcgctacaacaatcttcagatgcacatgtggggacatggttcacaatacaggaaaggaccggagtcactgaaaggcacacagccacgagccatgttagggatcccttgttactgctgcgttgaagggtgcaggaaccacattgaccatcctcgttccaagccactgaaagactttaggacgctccaaacgcactacaaacgcaaacacggacacaaacccttctcgtgtcgcctttgcggtaagcttttggctgtcaagggcgattggcgaacacatgagaagaattgtggaaaacgttgggtttgcgtttgcggttctgattttaaacacaaacgttctcttaaggaccatgttaaggcgtttgggtctggtcatgggccttatccaactggtttgtttgaagagcaggcttctaattcatctgtctccgagactttgtttttttaaatttgggcatctttttctttcgcttatgaaatatctatttactttagaaaaataataatgtggtatctaattgttccaaattaggaacacgaagtgtaccattatatttttcatcactacaaatgttattcagagaaaattatcattaa

SEQ ID NO: 84529 - protein, 316 aa, Arabidopsis thaliana
  peptide (1)..(316): Ceres Seq. ID no. 12675662
  misc_feature (158)..(180): Pfam Name: Zinc finger, C2H2 type Pfam Description: Zinc finger, C2H2 type
  misc_feature (14)..(316): Homolog of NCBI NO: 30693123 NR Description: transparent testa 1 (TT1) protein [Arabidopsis >gi|27151706|sp|Q8VWG3|TT1_ARATH TRANSPARENT TESTA 1 protein finger protein TT1) (TTL1) >gi|18253279|gb|AAL66405.1|AF190297_1
  misc_feature (14)..(316): Homolog of NCBI NO: 18253283 NR Description: transparent testa 1 [Arabidopsis thaliana]
  misc_feature (14)..(174): Homolog of NCBI NO: 18026946 NR Description: mutant transparent testa 1 protein TT1 thaliana] >gi|18253285|gb|AAL66408.1|AF190300_1 mutant
  misc_feature (129)..(314): Homolog of NCBI NO: 15230370 NR Description: zinc finger - like protein; protein id: supported by cDNA: gi_18027011 [Arabidopsis thaliana]
  misc_feature (129)..(314): Homolog of NCBI NO: 28973719 NR Description: putative zinc finger protein [Arabidopsis
  misc_feature (54)..(295): Homolog of NCBI NO: 15223781 NR Description: hypothetical protein; protein id: At1g51220.1 thaliana] >gi|18376498|emb|CAC86167.1| WIP5 protein [Arabidopsis
NISSLSNNYSPHSMESPPLYEISSSSSSEKPRHHFQSLDLFPNLNQNSCINNTLIEPLPLIDRINLNSNLDLNPNPLYAEEGEQEEEEEEEEDREVDVDLHIGLPGFGKPSNDAKQLKKRNGKEIATYDAGKGIENELSGKAYWIPAPEQILIGFTHFSCHVCFKTFNRYNNLQMHMWGHGSQYRKGPESLKGTQPRAMLGIPCYCCVEGCRNHIDHPRSKPLKDFRTLQTHYKRKHGHKPFSCRLCGKLLAVKGDWRTHEKNCGKRWVCVCGSDFKHKRSLKDHVKAFGSGHGPYPTGLFEEQASNSSVSETLFF

SEQ ID NO: 84530 - protein, 303 aa, Arabidopsis thaliana
  peptide (1)..(303): Ceres Seq. ID no. 12675663
  misc_feature (145)..(167): Pfam Name: Zinc finger, C2H2 type Pfam Description: Zinc finger, C2H2 type
  misc_feature (1)..(303): Homolog of NCBI NO: 30693123 NR Description: transparent testa 1 (TT1) protein [Arabidopsis >gi|27151706|sp|Q8VWG3|TT1_ARATH TRANSPARENT TESTA 1 protein finger protein TT1) (TTL1) >gi|18253279|gb|AAL66405.1|AF190297_1
  misc_feature (1)..(303): Homolog of NCBI NO: 18253283 NR Description: transparent testa 1 [Arabidopsis thaliana]
  misc_feature (1)..(161): Homolog of NCBI NO: 18026946 NR Description: mutant transparent testa 1 protein TT1 thaliana] >gi|18253285|gb|AAL66408.1|AF190300_1 mutant
  misc_feature (116)..(301): Homolog of NCBI NO: 15230370 NR Description: zinc finger - like protein; protein id: supported by cDNA: gi_18027011 [Arabidopsis thaliana]
  misc_feature (116)..(301): Homolog of NCBI NO: 28973719 NR Description: putative zinc finger protein [Arabidopsis
  misc_feature (41)..(282): Homolog of NCBI NO: 15223781 NR Description: hypothetical protein; protein id: At1g51220.1 thaliana] >gi|18376498|emb|CAC86167.1| WIP5 protein [Arabidopsis
MESPPLYEISSSSSSEKPRHHFQSLDLFPNLNQNSCINNTLIEPLPLIDRINLNSNLDLNPNPLYAEEGEQEEEEEEEEDREVDVDLHIGLPGFGKPSNDAKQLKKRNGKEIATYDAGKGIENELSGKAYWIPAPEQILIGFTHFSCHVCFKTFNRYNNLQMHMWGHGSQYRKGPESLKGTQPRAMLGIPCYCCVEGCRNHIDHPRSKPLKDFRTLQTHYKRKHGHKPFSCRLCGKLLAVKGDWRTHEKNCGKRWVCVCGSDFKHKRSLKDHVKAFGSGHGPYPTGLFEEQASNSSVSETLFF

SEQ ID NO: 84531 - DNA, 1021 bp, Arabidopsis thaliana
  misc_feature (1)..(1021): Ceres Seq. ID no. 12675664
aaaacatttcatctctctccaacaactattcaccacattcaatggagtcaccaccactatacgagatatcctcaagctcttcttctgaaaaacctagacaccatttccaatcccttgatctcttccctaacctcaaccaaaactcttgtatcaacaataccctaattgagcctttaccgcttattgatcgcataaacttgaactcaaacctagacctaaaccctaatcccttgtatgcggaagaaggagagcaagaggaggaagaagaagaagaagaagaccgtgaagtggacgtggacttacacatcggccttcctggttttggtaaaccaagcaatgatgctaaacagctgaagaagagaaatgggaaggagatcgccacatatgacgccggaaaaggcatcgagaatgaactttccggaaaggcatactggatcccggcgccggagcaaattctcatagggttcactcatttttcttgccatgtatgcttcaagacattcaatcgctacaacaatcttcaggaaaggaccggagtcactgaaaggcacacagccacgagccatgttagggatcccttgttactgctgcgttgaagggtgcaggaaccacattgaccatcctcgttccaagccactgaaagactttaggacgctccaaacgcactacaaacgcaaacacggacacaaacccttctcgtgtcgcctttgcggtaagcttttggctgtcaagggcgattggcgaacacatgagaagaattgtggaaaacgttgggtttgcgtttgcggttctgattttaaacacaaacgttctcttaaggaccatgttaaggcgtttgggtctggtcatgggccttatccaactggtttgtttgaagagcaggcttctaattcatctgtctccgagactttgtttttttaaatttgggcatctttttctttcgcttatgaaatatctatttactttagaaaaataataatgtggtatctaattgttccaaattaggaacacgaagtgtacc

SEQ ID NO: 84532 - protein, 197 aa, Arabidopsis thaliana
  peptide (1)..(197): Ceres Seq. ID no. 12675665
  misc_feature (14)..(174): Homolog of NCBI NO: 30693123 NR Description: transparent testa 1 (TT1) protein [Arabidopsis >gi|27151706|sp|Q8VWG3|TT1_ARATH TRANSPARENT TESTA 1 protein finger protein TT1) (TTL1) >gi|18253279|gb|AAL66405.1|AF190297_1
  misc_feature (14)..(174): Homolog of NCBI NO: 18253283 NR Description: transparent testa 1 [Arabidopsis thaliana]
  misc_feature (14)..(197): Homolog of NCBI NO: 18026946 NR Description: mutant transparent testa 1 protein TT1 thaliana] >gi|18253285|gb|AAL66408.1|AF190300_1 mutant
  misc_feature (129)..(174): Homolog of NCBI NO: 15230370 NR Description: zinc finger - like protein; protein id: supported by cDNA: gi_18027011 [Arabidopsis thaliana]
  misc_feature (129)..(174): Homolog of NCBI NO: 28973719 NR Description: putative zinc finger protein [Arabidopsis
  misc_feature (54)..(174): Homolog of NCBI NO: 15223781 NR Description: hypothetical protein; protein id: At1g51220.1 thaliana] >gi|18376498|emb|CAC86167.1| WIP5 protein [Arabidopsis
NISSLSNNYSPHSMESPPLYEISSSSSSEKPRHHFQSLDLFPNLNQNSCINNTLIEPLPLIDRINLNSNLDLNPNPLYAEEGEQEEEEEEEEDREVDVDLHIGLPGFGKPSNDAKQLKKRNGKEIATYDAGKGIENELSGKAYWIPAPEQILIGFTHFSCHVCFKTFNRYNNLQERTGVTERHTATSHVRDPLLLLR

SEQ ID NO: 84533 - protein, 184 aa, Arabidopsis thaliana
  peptide (1)..(184): Ceres Seq. ID no. 12675666
  misc_feature (1)..(161): Homolog of NCBI NO: 30693123 NR Description: transparent testa 1 (TT1) protein [Arabidopsis >gi|27151706|sp|Q8VWG3|TT1_ARATH TRANSPARENT TESTA 1 protein finger protein TT1) (TTL1) >gi|18253279|gb|AAL66405.1|AF190297_1
  misc_feature (1)..(161): Homolog of NCBI NO: 18253283 NR Description: transparent testa 1 [Arabidopsis thaliana]
  misc_feature (1)..(184): Homolog of NCBI NO: 18026946 NR Description: mutant transparent testa 1 protein TT1 thaliana] >gi|18253285|gb|AAL66408.1|AF190300_1 mutant
  misc_feature (116)..(161): Homolog of NCBI NO: 15230370 NR Description: zinc finger - like protein; protein id: supported by cDNA: gi_18027011 [Arabidopsis thaliana]
  misc_feature (116)..(161): Homolog of NCBI NO: 28973719 NR Description: putative zinc finger protein [Arabidopsis
  misc_feature (41)..(161): Homolog of NCBI NO: 15223781 NR Description: hypothetical protein; protein id: At1g51220.1 thaliana] >gi|18376498|emb|CAC86167.1| WIP5 protein [Arabidopsis
MESPPLYEISSSSSSEKPRHHFQSLDLFPNLNQNSCINNTLIEPLPLIDRINLNSNLDLNPNPLYAEEGEQEEEEEEEEDREVDVDLHIGLPGFGKPSNDAKQLKKRNGKEIATYDAGKGIENELSGKAYWIPAPEQILIGFTHFSCHVCFKTFNRYNNLQERTGVTERHTATSHVRDPLLLLR

SEQ ID NO: 84534 - protein, 145 aa, Arabidopsis thaliana
  peptide (1)..(145): Ceres Seq. ID no. 12675667
  misc_feature (97)..(122): Pfam Name: Zinc finger, C2H2 type Pfam Description: Zinc finger, C2H2 type
  misc_feature (13)..(145): Homolog of NCBI NO: 30693123 NR Description: transparent testa 1 (TT1) protein [Arabidopsis >gi|27151706|sp|Q8VWG3|TT1_ARATH TRANSPARENT TESTA 1 protein finger protein TT1) (TTL1) >gi|18253279|gb|AAL66405.1|AF190297_1
  misc_feature (13)..(145): Homolog of NCBI NO: 18253283 NR Description: transparent testa 1 [Arabidopsis thaliana]
  misc_feature (13)..(143): Homolog of NCBI NO: 15230370 NR Description: zinc finger - like protein; protein id: supported by cDNA: gi_18027011 [Arabidopsis thaliana]
  misc_feature (13)..(143): Homolog of NCBI NO: 28973719 NR Description: putative zinc finger protein [Arabidopsis
  misc_feature (13)..(124): Homolog of NCBI NO: 15223781 NR Description: hypothetical protein; protein id: At1g51220.1 thaliana] >gi|18376498|emb|CAC86167.1| WIP5 protein [Arabidopsis
MYASRHSIATTIFRKGPESLKGTQPRAMLGIPCYCCVEGCRNHIDHPRSKPLKDFRTLQTHYKRKHGHKPFSCRLCGKLLAVKGDWRTHEKNCGKRWVCVCGSDFKHKRSLKDHVKAFGSGHGPYPTGLFEEQASNSSVSETLFF

SEQ ID NO: 84535 - DNA, 1324 bp, Arabidopsis thaliana
  misc_feature (1)..(1324): Ceres Seq. ID no. 12675668
  misc_feature: MA Experiment ID: 108434 Result: Down-regulated in Transcription
  misc_feature: MA Experiment 108434 PARAMETER Experiment Name: At_Root_Tips_cDNA_P Parameter: Tissue Value: Root Tips
  misc_feature: MA Experiment ID: 108464 Result: Up-regulated in Transcription
  misc_feature: MA Experiment 108464 PARAMETER Experiment Name: At_Germinating_Seeds_cDNA_P Parameter: Age (day) Value: 4 vs. 0
  misc_feature: MA Experiment 108464 PARAMETER Experiment Name: At_Germinating_Seeds_cDNA_P Parameter: Tissue Value: Germinating Seeds
  misc_feature: MA Experiment ID: 108488 Result: Down-regulated in Transcription
  misc_feature: MA Experiment ID: 20000185 Result: Up-regulated in Transcription
  misc_feature: MA Experiment 20000185 PARAMETER Experiment Name: At_Roots__P Parameter: Age (day) Value: 7 vs. 21
  misc_feature: MA Experiment 20000185 PARAMETER Experiment Name: At_Roots__P Parameter: Organism Value: A. thaliana
  misc_feature: MA Experiment 20000185 PARAMETER Experiment Name: At_Roots__P Parameter: Tissue Value: Roots vs. Whole Plant
  misc_feature: MA Experiment ID: 20000227 Result: Down-regulated in Transcription
  misc_feature: MA Experiment 20000227 PARAMETER Experiment Name: At_Root-Tips-vs-Tops_P Parameter: Tissue Value: Root Tips vs. Root Tops
  misc_feature: MA Experiment ID: 20000234 Result: Down-regulated in Transcription
  misc_feature: MA Experiment 20000234 PARAMETER Experiment Name: At_Siliques_P Parameter: Age (day) Value: 21
  misc_feature: MA Experiment 20000234 PARAMETER Experiment Name: At_Siliques_P Parameter: Organism Value: A. thaliana
  misc_feature: MA Experiment 20000234 PARAMETER Experiment Name: At_Siliques_P Parameter: Plant Line Value: WS
  misc_feature: MA Experiment 20000234 PARAMETER Experiment Name: At_Siliques_P Parameter: Tissue Value: Less Than 5mm Siliques vs. Whole Plant
  misc_feature: MA Experiment ID: 20000235 Result: Down-regulated in Transcription
  misc_feature: MA Experiment 20000235 PARAMETER Experiment Name: At_Siliques_P Parameter: Age (day) Value: 21
  misc_feature: MA Experiment 20000235 PARAMETER Experiment Name: At_Siliques_P Parameter: Organism Value: A. thaliana
  misc_feature: MA Experiment 20000235 PARAMETER Experiment Name: At_Siliques_P Parameter: Plant Line Value: WS
  misc_feature: MA Experiment 20000235 PARAMETER Experiment Name: At_Siliques_P Parameter: Tissue Value: 5-10mm Siliques vs. Whole Plant
  misc_feature: MA Experiment ID: 20000264 Result: Up-regulated in Transcription
  misc_feature: MA Experiment 20000264 PARAMETER Experiment Name: At_Open_Flower_P Parameter: Age (day) Value: 21
  misc_feature: MA Experiment 20000264 PARAMETER Experiment Name: At_Open_Flower_P Parameter: Plant Line Value: WS
  misc_feature: MA Experiment 20000264 PARAMETER Experiment Name: At_Open_Flower_P Parameter: Tissue Value: Open Flower vs. Whole Plant
  misc_feature: MA Experiment ID: 20000286 Result: Up-regulated in Transcription
  misc_feature: MA Experiment 20000286 PARAMETER Experiment Name: At_Open_Flower_P Parameter: Age (day) Value: 21
  misc_feature: MA Experiment 20000286 PARAMETER Experiment Name: At_Open_Flower_P Parameter: Plant Line Value: WS
  misc_feature: MA Experiment 20000286 PARAMETER Experiment Name: At_Open_Flower_P Parameter: Tissue Value: Half Open vs. Whole Plant
  misc_feature: MA Experiment ID: 20000437 Result: Up-regulated in Transcription
  misc_feature: MA Experiment 20000437 PARAMETER Experiment Name: At_Drought_P Parameter: Age (day) Value: 8
  misc_feature: MA Experiment 20000437 PARAMETER Experiment Name: At_Drought_P Parameter: Organism Value: A. thaliana
  misc_feature: MA Experiment 20000437 PARAMETER Experiment Name: At_Drought_P Parameter: Plant Line Value: WS
  misc_feature: MA Experiment 20000437 PARAMETER Experiment Name: At_Drought_P Parameter: Timepoint (hr) Value: 24
  misc_feature: MA Experiment 20000437 PARAMETER Experiment Name: At_Drought_P Parameter: Tissue Value: Whole Plant
  misc_feature: MA Experiment 20000437 PARAMETER Experiment Name: At_Drought_P Parameter: Treatment Value: Drought vs. No Drought
  misc_feature: MA Experiment ID: 20000439 Result: Up-regulated in Transcription
  misc_feature: MA Experiment 20000439 PARAMETER Experiment Name: At_Roots__P Parameter: Age (day) Value: 14 vs. 21
  misc_feature: MA Experiment 20000439 PARAMETER Experiment Name: At_Roots__P Parameter: Organism Value: A. thaliana
  misc_feature: MA Experiment 20000439 PARAMETER Experiment Name: At_Roots__P Parameter: Tissue Value: Roots vs. Whole Plant
  misc_feature: MA Experiment ID: 20000794 Result: Up-regulated in Transcription
  misc_feature: MA Experiment 20000794 PARAMETER Experiment Name: At_Petals_P Parameter: Age (day) Value: 23-25 days
  misc_feature: MA Experiment 20000794 PARAMETER Experiment Name: At_Petals_P Parameter: Plant Line Value: WS
  misc_feature: MA Experiment 20000794 PARAMETER Experiment Name: At_Petals_P Parameter: Tissue Value: Petals vs. Whole plant
  misc_feature: MA Experiment ID: 20001757 Result: Down-regulated in Transcription
  misc_feature: MA Experiment 20001757 PARAMETER Experiment Name: At_50mM_NH4NO3_L-to-H_P Parameter: Timepoint (hr) Value: 6
  misc_feature: MA Experiment 20001757 PARAMETER Experiment Name: At_50mM_NH4NO3_L-to-H_P Parameter: Tissue Value: Leaf
  misc_feature: MA Experiment 20001757 PARAMETER Experiment Name: At_50mM_NH4NO3_L-to-H_P Parameter: Treatment Value: 50mM NH4NO3 vs 100mM Mannitol
  misc_feature: MA Experiment ID: 20001906 Result: Up-regulated in Transcription
  misc_feature: MA Experiment 20001906 PARAMETER Experiment Name: At_Drought_Reproduction_P Parameter: Age (day) Value: 35
  misc_feature: MA Experiment 20001906 PARAMETER Experiment Name: At_Drought_Reproduction_P Parameter: Organism Value: A. thaliana
  misc_feature: MA Experiment 20001906 PARAMETER Experiment Name: At_Drought_Reproduction_P Parameter: Plant Line Value: WS
  misc_feature: MA Experiment 20001906 PARAMETER Experiment Name: At_Drought_Reproduction_P Parameter: Timepoint (day) Value: 5
  misc_feature: MA Experiment 20001906 PARAMETER Experiment Name: At_Drought_Reproduction_P Parameter: Tissue Value: Siliques
  misc_feature: MA Experiment 20001906 PARAMETER Experiment Name: At_Drought_Reproduction_P Parameter: Treatment Value: Drought vs. No Drought
acaagctagctgatatgtcgggacggctgcaattccttttttattagtggagaaaaaaacaaaaaaaatacccgaaagagaaaaaaaagatagagatggagaatcacacgaccatgaaagtttcatctcttaattgtatcgatctagccaacgacgatcttaatcattctgttgtttccctcaaacaggcatgtttggattgtggatttttctatgtgatcaatcatgggataagcgaagagttcatggacgatgttttcgagcagagcaagaagctttttgctcttcctttagaagaaaagatgaaagtgttgagaaacgaaaagcatcgaggctatacacctgttcttgatgaacttttagatcccaagaatcaaatcaatggggatcacaaagagggttattacattggaattgaagttcctaaagatgatcctcattgggataagccattctatggtcctaacccttggcctgatgctgatgttttacctggttggcgagaaacaatggagaaatatcatcaagaagcattgagggtttctatggctattgcaagacttttggcgttagcacttgacttggatgtgggatactttgataggacggagatgcttggaaaacctattgcaactatgcgactgttgcggtatcaagggatttctgatccttcgaaaggaatatatgcatgtggagcacattctgacttcggaatgatgactctgttagccactgatggtgtaatgggactccagatatgcaaagataagaacgcgatgccgcagaagtgggaatatgtaccgccgattaaaggagcatttatagtgaatcttggcgatatgctggaacgttggagcaatggcttttttaaatccacgttgcatcgggttcttggaaacggtcaggaacgatattctattccattctttgtggaaccaaatcatgactgtctcgtggagtgtctcccaacctgcaagtcggaaagcgagcttcctaaatatccaccgatcaaatgttcgacatacctcacccagcgttacgaggaaacacatgcgaatttaagcatctaccaccaacaaacatgaatgctctttgtgagatcgacactaggagggagtctacaaaagtaaattttatgtaagttcgttgttagctcaaagcaaagtaaaagatattgtaagaatgtaaggtaagtgaagtttacggccacaccctcccttacttattgggagggatacacatacttatgtcttgtttcaatctatgtatctgtacgaattgacagtctctttaacgtttagaatctacacgggctagacttgtt

SEQ ID NO: 84536 - protein, 329 aa, Arabidopsis thaliana
  peptide (1)..(329): Ceres Seq. ID no. 12675669
  misc_feature (177)..(281): Pfam Name: 2OG-Fe(II) oxygenase superfamily Pfam Description: 2OG-Fe(II) oxygenase superfamily
  misc_feature (1)..(329): Homolog of NCBI NO: 15219523 NR Description: hyoscyamine 6-dioxygenase hydroxylase, putative; id: At1g35190.1, supported by cDNA: 2551., supported by cDNA:
  misc_feature (1)..(301): Homolog of NCBI NO: 15231442 NR Description: putative protein; protein id: At3g46490.1
  misc_feature (131)..(327): Homolog of NCBI NO: 15231441 NR Description: putative protein; protein id: At3g46480.1
  misc_feature (2)..(96): Homolog of NCBI NO: 15231441 NR Description: putative protein; protein id: At3g46480.1
  misc_feature (130)..(325): Homolog of NCBI NO: 34906368 NR Description: unnamed protein product [Oryza sativa (japonica group)] >gi|9558506|dbj|BAB03425.1| unnamed protein product
  misc_feature (32)..(96): Homolog of NCBI NO: 34906368 NR Description: unnamed protein product [Oryza sativa (japonica group)] >gi|9558506|dbj|BAB03425.1| unnamed protein product
  misc_feature (1)..(146): Homolog of NCBI NO: 13926297 NR Description: At1g35190/T32G9_27 [Arabidopsis thaliana]
  misc_feature (12)..(320): Homolog of NCBI NO: 7594580 NR Description: hypothetical protein [Arabidopsis thaliana]
  misc_feature (1)..(323): Homolog of NCBI NO: 18414746 NR Description: gibberellin oxidase-like protein; protein id:
  misc_feature (12)..(319): Homolog of NCBI NO: 27311283 NR Description: putative gibberellin 20-oxidase [Oryza sativa
MENHTTMKVSSLNCIDLANDDLNHSVVSLKQACLDCGFFYVINHGISEEFMDDVFEQSKKLFALPLEEKMKVLRNEKHRGYTPVLDELLDPKNQINGDHKEGYYIGIEVPKDDPHWDKPFYGPNPWPDADVLPGWRETMEKYHQEALRVSMAIARLLALALDLDVGYFDRTEMLGKPIATMRLLRYQGISDPSKGIYACGAHSDFGMMTLLATDGVMGLQICKDKNAMPQKWEYVPPIKGAFIVNLGDMLERWSNGFFKSTLHRVLGNGQERYSIPFFVEPNHDCLVECLPTCKSESELPKYPPIKCSTYLTQRYEETHANLSIYHQQT

SEQ ID NO: 84537 - protein, 323 aa, Arabidopsis thaliana
  peptide (1)..(323): Ceres Seq. ID no. 12675670
  misc_feature (171)..(275): Pfam Name: 2OG-Fe(II) oxygenase superfamily Pfam Description: 2OG-Fe(II) oxygenase superfamily
  misc_feature (1)..(323): Homolog of NCBI NO: 15219523 NR Description: hyoscyamine 6-dioxygenase hydroxylase, putative; id: At1g35190.1, supported by cDNA: 2551., supported by cDNA:
  misc_feature (1)..(295): Homolog of NCBI NO: 15231442 NR Description: putative protein; protein id: At3g46490.1
  misc_feature (125)..(321): Homolog of NCBI NO: 15231441 NR Description: putative protein; protein id: At3g46480.1
  misc_feature (1)..(90): Homolog of NCBI NO: 15231441 NR Description: putative protein; protein id: At3g46480.1
  misc_feature (124)..(319): Homolog of NCBI NO: 34906368 NR Description: unnamed protein product [Oryza sativa (japonica group)] >gi|9558506|dbj|BAB03425.1| unnamed protein product
  misc_feature (26)..(90): Homolog of NCBI NO: 34906368 NR Description: unnamed protein product [Oryza sativa (japonica group)] >gi|9558506|dbj|BAB03425.1| unnamed protein product
  misc_feature (1)..(140): Homolog of NCBI NO: 13926297 NR Description: At1g35190/T32G9_27 [Arabidopsis thaliana]
  misc_feature (6)..(314): Homolog of NCBI NO: 7594580 NR Description: hypothetical protein [Arabidopsis thaliana]
  misc_feature (1)..(317): Homolog of NCBI NO: 18414746 NR Description: gibberellin oxidase-like protein; protein id:
  misc_feature (6)..(313): Homolog of NCBI NO: 27311283 NR Description: putative gibberellin 20-oxidase [Oryza sativa
MKVSSLNCIDLANDDLNHSVVSLKQACLDCGFFYVINHGISEEFMDDVFEQSKKLFALPLEEKMKVLRNEKHRGYTPVLDELLDPKNQINGDHKEGYYIGIEVPKDDPHWDKPFYGPNPWPDADVLPGWRETMEKYHQEALRVSMAIARLLALALDLDVGYFDRTEMLGKPIATMRLLRYQGISDPSKGIYACGAHSDFGMMTLLATDGVMGLQICKDKNAMPQKWEYVPPIKGAFIVNLGDMLERWSNGFFKSTLHRVLGNGQERYSIPFFVEPNHDCLVECLPTCKSESELPKYPPIKCSTYLTQRYEETHANLSIYHQQT

SEQ ID NO: 84538 - protein, 279 aa, Arabidopsis thaliana
  peptide (1)..(279): Ceres Seq. ID no. 12675671
  misc_feature (127)..(231): Pfam Name: 2OG-Fe(II) oxygenase superfamily Pfam Description: 2OG-Fe(II) oxygenase superfamily
  misc_feature (1)..(279): Homolog of NCBI NO: 15219523 NR Description: hyoscyamine 6-dioxygenase hydroxylase, putative; id: At1g35190.1, supported by cDNA: 2551., supported by cDNA:
  misc_feature (1)..(251): Homolog of NCBI NO: 15231442 NR Description: putative protein; protein id: At3g46490.1
  misc_feature (81)..(277): Homolog of NCBI NO: 15231441 NR Description: putative protein; protein id: At3g46480.1
  misc_feature (1)..(46): Homolog of NCBI NO: 15231441 NR Description: putative protein; protein id: At3g46480.1
  misc_feature (80)..(275): Homolog of NCBI NO: 34906368 NR Description: unnamed protein product [Oryza sativa (japonica group)] >gi|9558506|dbj|BAB03425.1| unnamed protein product
  misc_feature (1)..(46): Homolog of NCBI NO: 34906368 NR Description: unnamed protein product [Oryza sativa (japonica group)] >gi|9558506|dbj|BAB03425.1| unnamed protein product
  misc_feature (1)..(96): Homolog of NCBI NO: 13926297 NR Description: At1g35190/T32G9_27 [Arabidopsis thaliana]
  misc_feature (1)..(270): Homolog of NCBI NO: 7594580 NR Description: hypothetical protein [Arabidopsis thaliana]
  misc_feature (1)..(273): Homolog of NCBI NO: 18414746 NR Description: gibberellin oxidase-like protein; protein id:
  misc_feature (1)..(269): Homolog of NCBI NO: 27311283 NR Description: putative gibberellin 20-oxidase [Oryza sativa
MDDVFEQSKKLFALPLEEKMKVLRNEKHRGYTPVLDELLDPKNQINGDHKEGYYIGIEVPKDDPHWDKPFYGPNPWPDADVLPGWRETMEKYHQEALRVSMAIARLLALALDLDVGYFDRTEMLGKPIATMRLLRYQGISDPSKGIYACGAHSDFGMMTLLATDGVMGLQICKDKNAMPQKWEYVPPIKGAFIVNLGDMLERWSNGFFKSTLHRVLGNGQERYSIPFFVEPNHDCLVECLPTCKSESELPKYPPIKCSTYLTQRYEETHANLSIYHQQT

SEQ ID NO: 84539 - DNA, 1987 bp, Arabidopsis thaliana
  misc_feature (1)..(1987): Ceres Seq. ID no. 12675672
  misc_feature: MA Experiment ID: 20000306 Result: Up-regulated in Transcription
  misc_feature: MA Experiment 20000306 PARAMETER Experiment Name: At_Germinating_Seeds_Sub_P Parameter: Age (hr) Value: 6 vs. 0
  misc_feature: MA Experiment 20000306 PARAMETER Experiment Name: At_Germinating_Seeds_Sub_P Parameter: Organism Value: A. thaliana
  misc_feature: MA Experiment 20000306 PARAMETER Experiment Name: At_Germinating_Seeds_Sub_P Parameter: Plant Line Value: WS
  misc_feature: MA Experiment 20000306 PARAMETER Experiment Name: At_Germinating_Seeds_Sub_P Parameter: Tissue Value: Germinating Seeds
  misc_feature: MA Experiment ID: 20000307 Result: Up-regulated in Transcription
  misc_feature: MA Experiment 20000307 PARAMETER Experiment Name: At_Germinating_Seeds_Sub_P Parameter: Age (hr) Value: 24 vs. 0
  misc_feature: MA Experiment 20000307 PARAMETER Experiment Name: At_Germinating_Seeds_Sub_P Parameter: Organism Value: A. thaliana
  misc_feature: MA Experiment 20000307 PARAMETER Experiment Name: At_Germinating_Seeds_Sub_P Parameter: Plant Line Value: WS
  misc_feature: MA Experiment 20000307 PARAMETER Experiment Name: At_Germinating_Seeds_Sub_P Parameter: Tissue Value: Germinating Seeds
  misc_feature: MA Experiment ID: 20000329 Result: Down-regulated in Transcription
  misc_feature: MA Experiment 20000329 PARAMETER Experiment Name: At_4deg_Cold_Sub_P Parameter: Age (day) Value: 14
  misc_feature: MA Experiment 20000329 PARAMETER Experiment Name: At_4deg_Cold_Sub_P Parameter: Organism Value: A. thaliana
  misc_feature: MA Experiment 20000329 PARAMETER Experiment Name: At_4deg_Cold_Sub_P Parameter: Plant Line Value: WS
  misc_feature: MA Experiment 20000329 PARAMETER Experiment Name: At_4deg_Cold_Sub_P Parameter: Temperature (deg C) Value: 4 vs. 22
  misc_feature: MA Experiment 20000329 PARAMETER Experiment Name: At_4deg_Cold_Sub_P Parameter: Timepoint (hr) Value: 6
  misc_feature: MA Experiment 20000329 PARAMETER Experiment Name: At_4deg_Cold_Sub_P Parameter: Tissue Value: Aerial
  misc_feature: MA Experiment ID: 20000347 Result: Up-regulated in Transcription
  misc_feature: MA Experiment 20000347 PARAMETER Experiment Name: At_2mM_SA_Sub_P Parameter: Age (day) Value: 14
  misc_feature: MA Experiment 20000347 PARAMETER Experiment Name: At_2mM_SA_Sub_P Parameter: Organism Value: A. thaliana
  misc_feature: MA Experiment 20000347 PARAMETER Experiment Name: At_2mM_SA_Sub_P Parameter: Plant Line Value: WS
  misc_feature: MA Experiment 20000347 PARAMETER Experiment Name: At_2mM_SA_Sub_P Parameter: Timepoint (hr) Value: 6
  misc_feature: MA Experiment 20000347 PARAMETER Experiment Name: At_2mM_SA_Sub_P Parameter: Tissue Value: Aerial
  misc_feature: MA Experiment 20000347 PARAMETER Experiment Name: At_2mM_SA_Sub_P Parameter: Treatment Value: 2mM SA vs. No Treatment
tctcctataaatctctccgtcttctctcttctctcatttcacgtcggagatcattttctcctcctccgcctccgcctccaccgccaccgccaccgccgccgccgacgacttttctcacttactcaacaccagagatcttggtttagtgttataatggaaggtgttggactaagagctgtaggatcacactgttctttatctgagatggatgatcttgatttgactcgagctttggataaaccaagattgaagatcgaaaggaagagatcgtttgatgaaagatcgatgagtgagctatcgactggttacagtagacatgacggtatacacgattcgccgcgaggtagatcggtgcttgatacgcctctttcttctgctagaaactcctttgagcctcatcctatgatggctgaagcttgggaggctttaagaaggtcaatggtcttcttccgtggtcaacctgttggtactcttgccgcggttgataatactaccgatgaagtcttgaactatgatcaggtgtttgtgagggattttgtaccgagtgcgttggcgtttctgatgaatggagaaccggatatagtgaagcattttttgcttaagacacttcagctgcaaggttgggagaaacgtgtggatcggtttaagttaggagaaggtgtgatgcctgcaagtttcaaggtgcttcatgatcctatccgtgaaacggataacattgttgcggatttcggtgagagtgctattggacgtgtggctcctgtagattcagggttctggtggattattcttcttcgtgcttataccaaatctactggagatttgactctctctgagacaccagagtgtcaaaagggaatgaaactgatcttgtctttgtgcttagctgaagggtttgacacgtttcctacactgctttgtgctgatggatgttccatgattgatcgaagaatgggtgtttatgggtatcccattgagatccaagcgttgttcttcatggctttgagatctgctttgtcgatgttaaagcccgatggagatggcagagaggtcattgagaggatcgttaagcgacttcatgccttgagcttccatatgcgcaattacttctggcttgatcatcagaacctcaatgacatttacaggttcaagactgaggaatactctcacacggcggtgaacaagttcaatgtgatgcctgattctatacccgagtgggttttcgacttcatgcctctccgtggaggctactttgtgggaaacgtaggacctgcccatatggatttccggtggttcgcactcggtaattgtgtctccatactttcttcattggccactccagatcaatccatggccattatggacctccttgagcaccggtgggcagagcttgtaggtgagatgcctctcaagatttgttatccatgcctcgagggccatgagtggcgcatcgttactggctgtgaccccaagaacacacggtggagctaccacaatggtggatcttggccagttttgctgtggcagctaacagcagcgtgcattaagacagggagaccgcagatcgcaagacgcgcggttgacctcatagaatcgcgtcttcaccgagactgttggccagagtattacgacggtaagctcggaaggtacgttggaaaacaggcaaggaaataccagacttggtcaatcgcaggttacttagtggcgaaaatgttgctagaagatccttcacacattggtatgatctctcttgaagaagacaaactcatgaaaccagtcatcaagcgatctgcgtcttggccacaactctgaaaaaccgctttaggtttttgttccggttctaatatttgccacgatatgattttttgttgttgttgtttgtatgataatgttattgaaaacttgtgcggggacatagactttttattgattgctttctttcttgctttgcaagtaaggaaaaagaaaatgggaaaagctcgtttgccgt

SEQ ID NO: 84540 - protein, 602 aa, Arabidopsis thaliana
  peptide (1)..(602): Ceres Seq. ID no. 12675673
  misc_feature (127)..(594): Pfam Name: Plant neutral invertase Pfam Description: Plant neutral invertase
  misc_feature (52)..(602): Homolog of NCBI NO: 30693221 NR Description: invertase -related [Arabidopsis thaliana]
  misc_feature (53)..(599): Homolog of NCBI NO: 18413234 NR Description: neutral invertase like protein; protein id:
  misc_feature (53)..(599): Homolog of NCBI NO: 25354737 NR Description: neutral invertase like protein [imported] - thaliana >gi|7267646|emb|CAB78074.1| neutral invertase like
  misc_feature (57)..(599): Homolog of NCBI NO: 18395144 NR Description: putative invertase; protein id: At1g22650.1,
  misc_feature (57)..(599): Homolog of NCBI NO: 21594008 NR Description: putative invertase [Arabidopsis thaliana]
  misc_feature (57)..(599): Homolog of NCBI NO: 15236209 NR Description: invertase - like protein; protein id: supported by cDNA: gi_15215775 [Arabidopsis thaliana]
  misc_feature (108)..(599): Homolog of NCBI NO: 7487359 NR Description: hypothetical protein T22J18.18 - Arabidopsis >gi|3287693|gb|AAC25521.1|AAC25521 Similar to LIM17 gene product from the genome of Synechocystis sp. gb|D90916. [Arabidopsis
  misc_feature (104)..(599): Homolog of NCBI NO: 15218303 NR Description: neutral invertase, putative; protein id: [Arabidopsis thaliana] >gi|25354735|pir||A96743 probable neutral
  misc_feature (138)..(586): Homolog of NCBI NO: 15242261 NR Description: alkaline/neutral invertase; protein id: supported by cDNA: gi_15912342 [Arabidopsis thaliana] alkaline/neutral invertase [Arabidopsis thaliana]
  misc_feature (120)..(586): Homolog of NCBI NO: 34894878 NR Description: putative neutral invertase [Oryza sativa cultivar- group)] >gi|14164543|dbj|BAB55792.1| putative neutral
SPINLSVFSLLSFHVGDHFLLLRLRLHRHRHRRRRRLFSLTQHQRSWFSVIMEGVGLRAVGSHCSLSEMDDLDLTRALDKPRLKIERKRSFDERSMSELSTGYSRHDGIHDSPRGRSVLDTPLSSARNSFEPHPMMAEAWEALRRSMVFFRGQPVGTLAAVDNTTDEVLNYDQVFVRDFVPSALAFLMNGEPDIVKHFLLKTLQLQGWEKRVDRFKLGEGVMPASFKVLHDPIRETDNIVADFGESAIGRVAPVDSGFWWIILLRAYTKSTGDLTLSETPECQKGMKLILSLCLAEGFDTFPTLLCADGCSMIDRRMGVYGYPIEIQALFFMALRSALSMLKPDGDGREVIERIVKRLHALSFHMRNYFWLDHQNLNDIYRFKTEEYSHTAVNKFNVMPDSIPEWVFDFMPLRGGYFVGNVGPAHMDFRWFALGNCVSILSSLATPDQSMAIMDLLEHRWAELVGEMPLKICYPCLEGHEWRIVTGCDPKNTRWSYHNGGSWPVLLWQLTAACIKTGRPQIARRAVDLIESRLHRDCWPEYYDGKLGRYVGKQARKYQTWSIAGYLVAKMLLEDPSHIGMISLEEDKLMKPVIKRSASWPQL

SEQ ID NO: 84541 - protein, 551 aa, Arabidopsis thaliana
  peptide (1)..(551): Ceres Seq. ID no. 12675674
  misc_feature (76)..(543): Pfam Name: Plant neutral invertase Pfam Description: Plant neutral invertase
  misc_feature (1)..(551): Homolog of NCBI NO: 30693221 NR Description: invertase -related [Arabidopsis thaliana]
  misc_feature (2)..(548): Homolog of NCBI NO: 18413234 NR Description: neutral invertase like protein; protein id:
  misc_feature (2)..(548): Homolog of NCBI NO: 25354737 NR Description: neutral invertase like protein [imported] - thaliana >gi|7267646|emb|CAB78074.1| neutral invertase like
  misc_feature (6)..(548): Homolog of NCBI NO: 18395144 NR Description: putative invertase; protein id: At1g22650.1,
  misc_feature (6)..(548): Homolog of NCBI NO: 21594008 NR Description: putative invertase [Arabidopsis thaliana]
  misc_feature (6)..(548): Homolog of NCBI NO: 15236209 NR Description: invertase - like protein; protein id: supported by cDNA: gi_15215775 [Arabidopsis thaliana]
  misc_feature (57)..(548): Homolog of NCBI NO: 7487359 NR Description: hypothetical protein T22J18.18 - Arabidopsis >gi|3287693|gb|AAC25521.1|AAC25521 Similar to LIM17 gene product from the genome of Synechocystis sp. gb|D90916. [Arabidopsis
  misc_feature (53)..(548): Homolog of NCBI NO: 15218303 NR Description: neutral invertase, putative; protein id: [Arabidopsis thaliana] >gi|25354735|pir||A96743 probable neutral
  misc_feature (87)..(535): Homolog of NCBI NO: 15242261 NR Description: alkaline/neutral invertase; protein id: supported by cDNA: gi_15912342 [Arabidopsis thaliana] alkaline/neutral invertase [Arabidopsis thaliana]
  misc_feature (69)..(535): Homolog of NCBI NO: 34894878 NR Description: putative neutral invertase [Oryza sativa cultivar- group)] >gi|14164543|dbj|BAB55792.1| putative neutral
MEGVGLRAVGSHCSLSEMDDLDLTRALDKPRLKIERKRSFDERSMSELSTGYSRHDGIHDSPRGRSVLDTPLSSARNSFEPHPMMAEAWEALRRSMVFFRGQPVGTLAAVDNTTDEVLNYDQVFVRDFVPSALAFLMNGEPDIVKHFLLKTLQLQGWEKRVDRFKLGEGVMPASFKVLHDPIRETDNIVADFGESAIGRVAPVDSGFWWIILLRAYTKSTGDLTLSETPECQKGMKLILSLCLAEGFDTFPTLLCADGCSMIDRRMGVYGYPIEIQALFFMALRSALSMLKPDGDGREVIERIVKRLHALSFHMRNYFWLDHQNLNDIYRFKTEEYSHTAVNKFNVMPDSIPEWVFDFMPLRGGYFVGNVGPAHMDFRWFALGNCVSILSSLATPDQSMAIMDLLEHRWAELVGEMPLKICYPCLEGHEWRIVTGCDPKNTRWSYHNGGSWPVLLWQLTAACIKTGRPQIARRAVDLIESRLHRDCWPEYYDGKLGRYVGKQARKYQTWSIAGYLVAKMLLEDPSHIGMISLEEDKLMKPVIKRSASWPQL

SEQ ID NO: 84542 - protein, 534 aa, Arabidopsis thaliana
  peptide (1)..(534): Ceres Seq. ID no. 12675675
  misc_feature (59)..(526): Pfam Name: Plant neutral invertase Pfam Description: Plant neutral invertase
  misc_feature (1)..(534): Homolog of NCBI NO: 30693221 NR Description: invertase -related [Arabidopsis thaliana]
  misc_feature (1)..(531): Homolog of NCBI NO: 18413234 NR Description: neutral invertase like protein; protein id:
  misc_feature (1)..(531): Homolog of NCBI NO: 25354737 NR Description: neutral invertase like protein [imported] - thaliana >gi|7267646|emb|CAB78074.1| neutral invertase like
  misc_feature (1)..(531): Homolog of NCBI NO: 18395144 NR Description: putative invertase; protein id: At1g22650.1,
  misc_feature (1)..(531): Homolog of NCBI NO: 21594008 NR Description: putative invertase [Arabidopsis thaliana]
  misc_feature (1)..(531): Homolog of NCBI NO: 15236209 NR Description: invertase - like protein; protein id: supported by cDNA: gi_15215775 [Arabidopsis thaliana]
  misc_feature (40)..(531): Homolog of NCBI NO: 7487359 NR Description: hypothetical protein T22J18.18 - Arabidopsis >gi|3287693|gb|AAC25521.1|AAC25521 Similar to LIM17 gene product from the genome of Synechocystis sp. gb|D90916. [Arabidopsis
  misc_feature (36)..(531): Homolog of NCBI NO: 15218303 NR Description: neutral invertase, putative; protein id: [Arabidopsis thaliana] >gi|25354735|pir||A96743 probable neutral
  misc_feature (70)..(518): Homolog of NCBI NO: 15242261 NR Description: alkaline/neutral invertase; protein id: supported by cDNA: gi_15912342 [Arabidopsis thaliana] alkaline/neutral invertase [Arabidopsis thaliana]
  misc_feature (52)..(518): Homolog of NCBI NO: 34894878 NR Description: putative neutral invertase [Oryza sativa cultivar- group)] >gi|14164543|dbj|BAB55792.1| putative neutral
MDDLDLTRALDKPRLKIERKRSFDERSMSELSTGYSRHDGIHDSPRGRSVLDTPLSSARNSFEPHPMMAEAWEALRRSMVFFRGQPVGTLAAVDNTTDEVLNYDQVFVRDFVPSALAFLMNGEPDIVKHFLLKTLQLQGWEKRVDRFKLGEGVMPASFKVLHDPIRETDNIVADFGESAIGRVAPVDSGFWWIILLRAYTKSTGDLTLSETPECQKGMKLILSLCLAEGFDTFPTLLCADGCSMIDRRMGVYGYPIEIQALFFMALRSALSMLKPDGDGREVIERIVKRLHALSFHMRNYFWLDHQNLNDIYRFKTEEYSHTAVNKFNVMPDSIPEWVFDFMPLRGGYFVGNVGPAHMDFRWFALGNCVSILSSLATPDQSMAIMDLLEHRWAELVGEMPLKICYPCLEGHEWRIVTGCDPKNTRWSYHNGGSWPVLLWQLTAACIKTGRPQIARRAVDLIESRLHRDCWPEYYDGKLGRYVGKQARKYQTWSIAGYLVAKMLLEDPSHIGMISLEEDKLMKPVIKRSASWPQL

SEQ ID NO: 84543 - DNA, 1732 bp, Arabidopsis thaliana
  misc_feature (1)..(1732): Ceres Seq. ID no. 12675680
  misc_feature: MA Experiment ID: 20000185 Result: Up-regulated in Transcription
  misc_feature: MA Experiment 20000185 PARAMETER Experiment Name: At_Roots__P Parameter: Age (day) Value: 7 vs. 21
  misc_feature: MA Experiment 20000185 PARAMETER Experiment Name: At_Roots__P Parameter: Organism Value: A. thaliana
  misc_feature: MA Experiment 20000185 PARAMETER Experiment Name: At_Roots__P Parameter: Tissue Value: Roots vs. Whole Plant
  misc_feature: MA Experiment ID: 20001248 Result: Up-regulated in Transcription
  misc_feature: MA Experiment 20001248 PARAMETER Experiment Name: At_Far-red-induction_P Parameter: Age (day) Value: 7
  misc_feature: MA Experiment 20001248 PARAMETER Experiment Name: At_Far-red-induction_P Parameter: Light Value: Far-red vs. White
  misc_feature: MA Experiment 20001248 PARAMETER Experiment Name: At_Far-red-induction_P Parameter: Organism Value: A. thaliana
  misc_feature: MA Experiment 20001248 PARAMETER Experiment Name: At_Far-red-induction_P Parameter: Plant Line Value: Columbia
  misc_feature: MA Experiment 20001248 PARAMETER Experiment Name: At_Far-red-induction_P Parameter: Timepoint (hr) Value: 4
  misc_feature: MA Experiment 20001248 PARAMETER Experiment Name: At_Far-red-induction_P Parameter: Tissue Value: Whole Plant
  misc_feature: MA Experiment ID: 20001450 Result: Up-regulated in Transcription
  misc_feature: MA Experiment 20001450 PARAMETER Experiment Name: At_Far-red-induction_P Parameter: Age (day) Value: 7
  misc_feature: MA Experiment 20001450 PARAMETER Experiment Name: At_Far-red-induction_P Parameter: Light Value: Far-red vs. White
  misc_feature: MA Experiment 20001450 PARAMETER Experiment Name: At_Far-red-induction_P Parameter: Organism Value: A. thaliana
  misc_feature: MA Experiment 20001450 PARAMETER Experiment Name: At_Far-red-induction_P Parameter: Plant Line Value: Columbia
  misc_feature: MA Experiment 20001450 PARAMETER Experiment Name: At_Far-red-induction_P Parameter: Timepoint (hr) Value: 8
  misc_feature: MA Experiment 20001450 PARAMETER Experiment Name: At_Far-red-induction_P Parameter: Tissue Value: Whole Plant
  misc_feature: MA Experiment ID: 20001451 Result: Up-regulated in Transcription
  misc_feature: MA Experiment 20001451 PARAMETER Experiment Name: At_Far-red-induction_P Parameter: Age (day) Value: 7
  misc_feature: MA Experiment 20001451 PARAMETER Experiment Name: At_Far-red-induction_P Parameter: Light Value: Far-red vs. White
  misc_feature: MA Experiment 20001451 PARAMETER Experiment Name: At_Far-red-induction_P Parameter: Organism Value: A. thaliana
  misc_feature: MA Experiment 20001451 PARAMETER Experiment Name: At_Far-red-induction_P Parameter: Plant Line Value: Columbia
  misc_feature: MA Experiment 20001451 PARAMETER Experiment Name: At_Far-red-induction_P Parameter: Timepoint (hr) Value: 24
  misc_feature: MA Experiment 20001451 PARAMETER Experiment Name: At_Far-red-induction_P Parameter: Tissue Value: Whole Plant
tcttcttcttcttcaaatcgagatcgaagaagaaccaacaaaaaaccaaaaatggagacgaagccaaaccctagacgtccttcaaacacagttctaccatatcaaacaccacgattaagagatcattaccttctgggaaaaaagctaggccaaggccaatttggaacaacctatctctgcacagagaaatcaacctccgctaattacgcctgcaaatcgatcccgaagcgaaagctcgtgtgtcgcgaggattacgaagatgtatggcgtgagattcagatcatgcatcatctctctgagcatccaaatgttgttaggatcaaagggacttatgaagattcggtgtttgttcatattgttatggaggtttgtgaaggtggtgagctttttgatcggattgtttctaaaggtcattttagtgagcgtgaagctgtcaagcttattaagacgattcttggtgttgttgaggcttgtcattctcttggtgttatgcatagagatctcaaacctgagaatttcttgtttgatagtcctaaagatgatgctaagcttaaggctaccgattttggtttgtctgtcttctataagccaggacaatatttatatgacgtagttggaagtccgtactatgttgcaccagaggtgctaaagaaatgttatggacctgaaatagatgtgtggagtgctggtgttatcctctacattttactcagcggtgttcctcccttctgggcagagactgagtctggaatctttagacagatattgcaagggaagttagatttcaaatctgacccgtggcctactatctcagaagctgctaaagatttgatctataaaatgctcgaaaggagccccaagaaacgcatttctgctcatgaagccttgtgtcacccatggattgtcgatgaacaagcagcaccagacaagcctcttgatccagcagtcttatctcgtctaaagcagttttctcaaatgaataagattaagaaaatggcattacgggtaattgctgagagactttcagaggaagaaattggaggtctgaaggaattgttcaagatgatagacacagacaacagcggaacgattacttttgaagagctcaaagcgggtttgaagagagtcggatctgaactgatggaatcagaaatcaagtctctcatggatgcggctgatatcgacaacagtggtacaatagactacggagaattcctagcagcaaccttacacatgaacaagatggagagagaggagaatctggtggctgcattttcgtactttgacaaagacggaagcggttatatcaccatcgatgagcttcagtcagcttgcacagagtttggtctatgtgatacacctctggacgacatgatcaaggagattgatcttgacaatgacgggaagatcgatttctcggagtttacagcaatgatgaggaaaggagatggagttgggagaagcagaaccatgatgaagaacttgaacttcaacattgctgatgcttttggagttgatggtgaaaaatctgatgactgactcatcattcttccacaatttctgttttttttctctttaatttcgtttatattttgaattctaatttctaaggatacaaaaatatattctggcttgttttttgctttcctttttatttttgtacatgagcaactttctaaatttttatcctcatatggataatttttgcttcatataaaagtttttgaattcc

SEQ ID NO: 84544 - protein, 512 aa, Arabidopsis thaliana
  peptide (1)..(512): Ceres Seq. ID no. 12675681
  misc_feature (43)..(301): Pfam Name: Protein kinase domain Pfam Description: Protein kinase domain
  misc_feature (18)..(512): Homolog of NCBI NO: 15219693 NR Description: calcium-dependent protein kinase; protein id: supported by cDNA: gi_1235717, supported by cDNA: gi_15293094, by cDNA: gi_21281140 [Arabidopsis thaliana]
  misc_feature (198)..(512): Homolog of NCBI NO: 8778378 NR Description: F15O4.8 [Arabidopsis thaliana]
  misc_feature (18)..(207): Homolog of NCBI NO: 8778378 NR Description: F15O4.8 [Arabidopsis thaliana]
  misc_feature (18)..(512): Homolog of NCBI NO: 1084335 NR Description: calcium-dependent protein kinase (EC 2.7.1.-) 2 -
  misc_feature (18)..(512): Homolog of NCBI NO: 15233947 NR Description: calmodulin-domain protein kinase CDPK isoform 4 protein id: At4g09570.1 [Arabidopsis thaliana]
SSSSSNRDRRRTNKKPKMETKPNPRRPSNTVLPYQTPRLRDHYLLGKKLGQGQFGTTYLCTEKSTSANYACKSIPKRKLVCREDYEDVWREIQIMHHLSEHPNVVRIKGTYEDSVFVHIVMEVCEGGELFDRIVSKGHFSEREAVKLIKTILGVVEACHSLGVMHRDLKPENFLFDSPKDDAKLKATDFGLSVFYKPGQYLYDVVGSPYYVAPEVLKKCYGPEIDVWSAGVILYILLSGVPPFWAETESGIFRQILQGKLDFKSDPWPTISEAAKDLIYKMLERSPKKRISAHEALCHPWIVDEQAAPDKPLDPAVLSRLKQFSQMNKIKKMALRVIAERLSEEEIGGLKELFKMIDTDNSGTITFEELKAGLKRVGSELMESEIKSLMDAADIDNSGTIDYGEFLAATLHMNKMEREENLVAAFSYFDKDGSGYITIDELQSACTEFGLCDTPLDDMIKEIDLDNDGKIDFSEFTAMMRKGDGVGRSRTMMKNLNFNIADAFGVDGEKSDD

SEQ ID NO: 84545 - protein, 495 aa, Arabidopsis thaliana; identical to SEQ ID NO: 83026
  peptide (1)..(495): Ceres Seq. ID no. 12675682
  misc_feature (26)..(284): Pfam Name: Protein kinase domain Pfam Description: Protein kinase domain
  misc_feature (1)..(495): Homolog of NCBI NO: 15219693 NR Description: calcium-dependent protein kinase; protein id: supported by cDNA: gi_1235717, supported by cDNA: gi_15293094, by cDNA: gi_21281140 [Arabidopsis thaliana]
  misc_feature (181)..(495): Homolog of NCBI NO: 8778378 NR Description: F15O4.8 [Arabidopsis thaliana]
  misc_feature (1)..(190): Homolog of NCBI NO: 8778378 NR Description: F15O4.8 [Arabidopsis thaliana]
  misc_feature (1)..(495): Homolog of NCBI NO: 1084335 NR Description: calcium-dependent protein kinase (EC 2.7.1.-) 2 -
  misc_feature (1)..(495): Homolog of NCBI NO: 15233947 NR Description: calmodulin-domain protein kinase CDPK isoform 4 protein id: At4g09570.1 [Arabidopsis thaliana]

SEQ ID NO: 84546 - protein, 418 aa, Arabidopsis thaliana; identical to SEQ ID NO: 83027
  peptide (1)..(418): Ceres Seq. ID no. 12675683
  misc_feature (1)..(207): Pfam Name: Protein kinase domain Pfam Description: Protein kinase domain
  misc_feature (1)..(418): Homolog of NCBI NO: 15219693 NR Description: calcium-dependent protein kinase; protein id: supported by cDNA: gi_1235717, supported by cDNA: gi_15293094, by cDNA: gi_21281140 [Arabidopsis thaliana]
  misc_feature (104)..(418): Homolog of NCBI NO: 8778378 NR Description: F15O4.8 [Arabidopsis thaliana]
  misc_feature (1)..(113): Homolog of NCBI NO: 8778378 NR Description: F15O4.8 [Arabidopsis thaliana]
  misc_feature (1)..(418): Homolog of NCBI NO: 1084335 NR Description: calcium-dependent protein kinase (EC 2.7.1.-) 2 -
  misc_feature (1)..(418): Homolog of NCBI NO: 15233947 NR Description: calmodulin-domain protein kinase CDPK isoform 4 protein id: At4g09570.1 [Arabidopsis thaliana]

SEQ ID NO: 84547 - DNA, 2430 bp, Arabidopsis thaliana
  misc_feature (1)..(2430): Ceres Seq. ID no. 12675688
  misc_feature: MA Experiment ID: 20000184 Result: Down-regulated in Transcription
  misc_feature: MA Experiment 20000184 PARAMETER Experiment Name: At_Shoots__P Parameter: Age (day) Value: 7
  misc_feature: MA Experiment 20000184 PARAMETER Experiment Name: At_Shoots__P Parameter: Tissue Value: Shoots vs. Whole Plant
  misc_feature: MA Experiment ID: 20000227 Result: Down-regulated in Transcription
  misc_feature: MA Experiment 20000227 PARAMETER Experiment Name: At_Root-Tips-vs-Tops_P Parameter: Tissue Value: Root Tips vs. Root Tops
  misc_feature: MA Experiment ID: 20000495 Result: Up-regulated in Transcription
  misc_feature: MA Experiment 20000495 PARAMETER Experiment Name: At_Guard_Cells_P Parameter: Harvest Date Value: 8/2/2002
  misc_feature: MA Experiment 20000495 PARAMETER Experiment Name: At_Guard_Cells_P Parameter: Organism Value: A. thaliana
  misc_feature: MA Experiment 20000495 PARAMETER Experiment Name: At_Guard_Cells_P Parameter: Tissue Value: Guard Cells vs. Leaves
  misc_feature: MA Experiment ID: 20001248 Result: Up-regulated in Transcription
  misc_feature: MA Experiment 20001248 PARAMETER Experiment Name: At_Far-red-induction_P Parameter: Age (day) Value: 7
  misc_feature: MA Experiment 20001248 PARAMETER Experiment Name: At_Far-red-induction_P Parameter: Light Value: Far-red vs. White
  misc_feature: MA Experiment 20001248 PARAMETER Experiment Name: At_Far-red-induction_P Parameter: Organism Value: A. thaliana
  misc_feature: MA Experiment 20001248 PARAMETER Experiment Name: At_Far-red-induction_P Parameter: Plant Line Value: Columbia
  misc_feature: MA Experiment 20001248 PARAMETER Experiment Name: At_Far-red-induction_P Parameter: Timepoint (hr) Value: 4
  misc_feature: MA Experiment 20001248 PARAMETER Experiment Name: At_Far-red-induction_P Parameter: Tissue Value: Whole Plant
  misc_feature: MA Experiment ID: 20001450 Result: Up-regulated in Transcription
  misc_feature: MA Experiment 20001450 PARAMETER Experiment Name: At_Far-red-induction_P Parameter: Age (day) Value: 7
  misc_feature: MA Experiment 20001450 PARAMETER Experiment Name: At_Far-red-induction_P Parameter: Light Value: Far-red vs. White
  misc_feature: MA Experiment 20001450 PARAMETER Experiment Name: At_Far-red-induction_P Parameter: Organism Value: A. thaliana
  misc_feature: MA Experiment 20001450 PARAMETER Experiment Name: At_Far-red-induction_P Parameter: Plant Line Value: Columbia
  misc_feature: MA Experiment 20001450 PARAMETER Experiment Name: At_Far-red-induction_P Parameter: Timepoint (hr) Value: 8
  misc_feature: MA Experiment 20001450 PARAMETER Experiment Name: At_Far-red-induction_P Parameter: Tissue Value: Whole Plant
cagcttccgaagtcttcatctttctcgacaatatctaaaccttgtctgagaatcatttgaagaagatctttcatcatcaccgatccactttctgatttaggtcaatggaacagacaaaggatgattctgattttgaggatgattgtgaaacgaagaagatggagactgatacatcagctcaagaggcaaggaatggtaaagacatacaagggattcagtgggaagggtttaagtataatagagacgagtttcgtgagactaggttgaaacaatatgataactttgttaatatcttaaggcctagctctcgagaaaagcttgataaggaacatgggcaagtagttgagaaaggaaagaacttttatgacttccaattcaatacaaggcttgtcacttccactattgtgcattttcaggtagagattttgtgtctgctgattcattaccaaccactatgtaaaagatgaatctttcttcaaatttaagagtttataggcagatcatttgcatcattattggattaagttaatattttgttcaatattggtttagttggtagataattaaagcataggttaaattgcatctcatttgaaaaatctatgaatttcaaaatggtttcgatgaggtataacaaatatatgagcaggtagcttttgtctaagaaagtgcttcaggttgactaaattgttctctgagtacagttcatgactaccagcatccatggtgatactatcctctttccattttctttttgaatttattaactttatgctttcagaaatcgaaggcctgcgctcgggttttctattcgctgtaatcctttttctgcagaggtctcggcggatgcttgtatagttgtatttatattttgcttttctaaaatgtttcttaaatgttaagttcatcatatcagactgcatcaagtgactttatcagccaatatcgaacaaaatcacagacttaagtatgaaactagagtcgggctttaaagttgttatgcacgttgtatgaataaagtgagggttggaacaatcatatactacatcgtttttgcactgtactttgcatatatcctcttctgcagatctgcggtgtgtttattctaatttgaacatggcttatcaacatattactcaataatttgtggcacttagggatattttcctctaatttcaacctctgatgcagttgggagtactgtctgagcagccagcagcataacgatatggcttcggaatttggtatgggcgacatctaagcatgatgtatatctaatgcaaaattattcactcatgcactggtcatctctactccagagagggaaagaagtacttaatgtcgccagatcagttacccccactcagaaactacctggattgttttctgagccactctctagggtgcaagttagcagcatggcagtcaaagaaaatctgatccttttaggagggttcgacggggagcttctctgcaagtgtgtaaatcagcctggggttgctttttgcacaagattatcaacggaagataatgccatcacaaacacagttgatatataccgagacccaagtggctcccttaggcttataaccgcaaataacgactgtaaaattcgtgtattcgatgctcagagctttacacgtgtcagtgaatttgctttagattggtctgtcaataatacctcagttagcccggatgggaagctactcgctgtagtcggggacagtacagaatgcttgatctctgattcccattctggaaaagttatttcaagcctcagaggccacaaagactactcatttgcatctgcttggcacccgaatggtctaatcttagcaacgggaaaccaagacacggcatgccgtctctgggacattcgtaacccgtcagaatcattcgctgtcctgaaaggaaacatgggagccatcagaggactgaagttcacaccagaagggcggtttcttgcaatggctgagcctgcagactttgttcacatcttcgacacgcagtccgggtttctacagtcccaagagattgatctgtttggagaaatagccgggatctcgttcagccccgatacagaggcactatatgtaggggtcgcagaccgcacttatggaagtttgctggagtataagaggagaaaggataatcactatatggactccttttactgagaaaaggtaaatgaaaagtaaaaagcatctaatatgttgtcacaagatgggtttaaccctattagtgtgtatatgtagacagaattggtagtttctttggtaatatctgttatgtacccataatatatcttaccaaactttaagtatgttttgttaattgtgattgtttttactatttaggggtccgagacttgtagattaaacaggccatatacggcattgtgcttgggtttgagactccacatttgtcaac

SEQ ID NO: 84548 - protein, 299 aa, Arabidopsis thaliana; identical to SEQ ID NO: 74702
  peptide (1)..(299): Ceres Seq. ID no. 12675689
  misc_feature (1)..(299): Homolog of NCBI NO: 18400003 NR Description: expressed protein; protein id: At1g36070.1,
  misc_feature (1)..(299): Homolog of NCBI NO: 12324715 NR Description: unknown protein; 4584-7806 [Arabidopsis thaliana]
  misc_feature (1)..(299): Homolog of NCBI NO: 21553502 NR Description: unknown [Arabidopsis thaliana]
  misc_feature (1)..(299): Homolog of NCBI NO: 13937195 NR Description: At1g78070/F28K19_28 [Arabidopsis thaliana]
  misc_feature (132)..(299): Homolog of NCBI NO: 6598592 NR Description: F5J5.6 [Arabidopsis thaliana]
  misc_feature (82)..(299): Homolog of NCBI NO: 25405023 NR Description: protein F28K19.28 [imported] - Arabidopsis >gi|6573770|gb|AAF17690.1|AC009243_17 F28K19.28 [Arabidopsis
  misc_feature (1)..(97): Homolog of NCBI NO: 25405023 NR Description: protein F28K19.28 [imported] - Arabidopsis >gi|6573770|gb|AAF17690.1|AC009243_17 F28K19.28 [Arabidopsis
  misc_feature (1)..(297): Homolog of NCBI NO: 18423837 NR Description: WD-repeat protein-like; protein id: At5g56190.1,
  misc_feature (1)..(297): Homolog of NCBI NO: 30696707 NR Description: WD-40 repeat protein family [Arabidopsis thaliana]
  misc_feature (1)..(297): Homolog of NCBI NO: 21536732 NR Description: WD-repeat protein-like [Arabidopsis thaliana]

SEQ ID NO: 84549 - protein, 293 aa, Arabidopsis thaliana; identical to SEQ ID NO: 74703
  peptide (1)..(293): Ceres Seq. ID no. 12675690
  misc_feature (1)..(293): Homolog of NCBI NO: 18400003 NR Description: expressed protein; protein id: At1g36070.1,
  misc_feature (1)..(293): Homolog of NCBI NO: 12324715 NR Description: unknown protein; 4584-7806 [Arabidopsis thaliana]
  misc_feature (1)..(293): Homolog of NCBI NO: 21553502 NR Description: unknown [Arabidopsis thaliana]
  misc_feature (1)..(293): Homolog of NCBI NO: 13937195 NR Description: At1g78070/F28K19_28 [Arabidopsis thaliana]
  misc_feature (126)..(293): Homolog of NCBI NO: 6598592 NR Description: F5J5.6 [Arabidopsis thaliana]
  misc_feature (76)..(293): Homolog of NCBI NO: 25405023 NR Description: protein F28K19.28 [imported] - Arabidopsis >gi|6573770|gb|AAF17690.1|AC009243_17 F28K19.28 [Arabidopsis
  misc_feature (1)..(91): Homolog of NCBI NO: 25405023 NR Description: protein F28K19.28 [imported] - Arabidopsis >gi|6573770|gb|AAF17690.1|AC009243_17 F28K19.28 [Arabidopsis
  misc_feature (1)..(291): Homolog of NCBI NO: 18423837 NR Description: WD-repeat protein-like; protein id: At5g56190.1,
  misc_feature (1)..(291): Homolog of NCBI NO: 30696707 NR Description: WD-40 repeat protein family [Arabidopsis thaliana]
  misc_feature (1)..(291): Homolog of NCBI NO: 21536732 NR Description: WD-repeat protein-like [Arabidopsis thaliana]

SEQ ID NO: 84550 - protein, 252 aa, Arabidopsis thaliana; identical to SEQ ID NO: 74704
  peptide (1)..(252): Ceres Seq. ID no. 12675691
  misc_feature (1)..(252): Homolog of NCBI NO: 18400003 NR Description: expressed protein; protein id: At1g36070.1,
  misc_feature (1)..(252): Homolog of NCBI NO: 12324715 NR Description: unknown protein; 4584-7806 [Arabidopsis thaliana]
  misc_feature (1)..(252): Homolog of NCBI NO: 21553502 NR Description: unknown [Arabidopsis thaliana]
  misc_feature (1)..(252): Homolog of NCBI NO: 13937195 NR Description: At1g78070/F28K19_28 [Arabidopsis thaliana]
  misc_feature (85)..(252): Homolog of NCBI NO: 6598592 NR Description: F5J5.6 [Arabidopsis thaliana]
  misc_feature (35)..(252): Homolog of NCBI NO: 25405023 NR Description: protein F28K19.28 [imported] - Arabidopsis >gi|6573770|gb|AAF17690.1|AC009243_17 F28K19.28 [Arabidopsis
  misc_feature (1)..(50): Homolog of NCBI NO: 25405023 NR Description: protein F28K19.28 [imported] - Arabidopsis >gi|6573770|gb|AAF17690.1|AC009243_17 F28K19.28 [Arabidopsis
  misc_feature (1)..(250): Homolog of NCBI NO: 18423837 NR Description: WD-repeat protein-like; protein id: At5g56190.1,
  misc_feature (1)..(250): Homolog of NCBI NO: 30696707 NR Description: WD-40 repeat protein family [Arabidopsis thaliana]
  misc_feature (1)..(250): Homolog of NCBI NO: 21536732 NR Description: WD-repeat protein-like [Arabidopsis thaliana]

SEQ ID NO: 84551 - DNA, 2448 bp, Arabidopsis thaliana
  misc_feature (1)..(2448): Ceres Seq. ID no. 12675692
  misc_feature: MA Experiment ID: 20000182 Result: Down-regulated in Transcription
  misc_feature: MA Experiment 20000182 PARAMETER Experiment Name: At_2mM_SA_P Parameter: Age (day) Value: 14
  misc_feature: MA Experiment 20000182 PARAMETER Experiment Name: At_2mM_SA_P Parameter: Organism Value: A. thaliana
  misc_feature: MA Experiment 20000182 PARAMETER Experiment Name: At_2mM_SA_P Parameter: Plant Line Value: WS
  misc_feature: MA Experiment 20000182 PARAMETER Experiment Name: At_2mM_SA_P Parameter: Timepoint (hr) Value: 6
  misc_feature: MA Experiment 20000182 PARAMETER Experiment Name: At_2mM_SA_P Parameter: Tissue Value: Aerial
  misc_feature: MA Experiment 20000182 PARAMETER Experiment Name: At_2mM_SA_P Parameter: Treatment Value: 2mM SA vs. No Treatment
  misc_feature: MA Experiment ID: 20000227 Result: Down-regulated in Transcription
  misc_feature: MA Experiment 20000227 PARAMETER Experiment Name: At_Root-Tips-vs-Tops_P Parameter: Tissue Value: Root Tips vs. Root Tops
  misc_feature: MA Experiment ID: 20000495 Result: Down-regulated in Transcription
  misc_feature: MA Experiment 20000495 PARAMETER Experiment Name: At_Guard_Cells_P Parameter: Harvest Date Value: 8/2/2002
  misc_feature: MA Experiment 20000495 PARAMETER Experiment Name: At_Guard_Cells_P Parameter: Organism Value: A. thaliana
  misc_feature: MA Experiment 20000495 PARAMETER Experiment Name: At_Guard_Cells_P Parameter: Tissue Value: Guard Cells vs. Leaves
  misc_feature: MA Experiment ID: 20000527 Result: Down-regulated in Transcription
  misc_feature: MA Experiment 20000527 PARAMETER Experiment Name: At_10percent_PEG_P Parameter: Age (day) Value: 20
  misc_feature: MA Experiment 20000527 PARAMETER Experiment Name: At_10percent_PEG_P Parameter: Organism Value: A. thaliana
  misc_feature: MA Experiment 20000527 PARAMETER Experiment Name: At_10percent_PEG_P Parameter: Plant Line Value: WS
  misc_feature: MA Experiment 20000527 PARAMETER Experiment Name: At_10percent_PEG_P Parameter: Timepoint (day) Value: 20
  misc_feature: MA Experiment 20000527 PARAMETER Experiment Name: At_10percent_PEG_P Parameter: Tissue Value: Whole Plant
  misc_feature: MA Experiment 20000527 PARAMETER Experiment Name: At_10percent_PEG_P Parameter: Treatment Value: 10percent PEG vs. No Treatment
  misc_feature: MA Experiment ID: 20001459 Result: Up-regulated in Transcription
  misc_feature: MA Experiment 20001459 PARAMETER Experiment Name: At_50mM_NH4NO3_L-to-H_P Parameter: Age (day) Value: Undefined
  misc_feature: MA Experiment 20001459 PARAMETER Experiment Name: At_50mM_NH4NO3_L-to-H_P Parameter: Organism Value: Undefined
  misc_feature: MA Experiment 20001459 PARAMETER Experiment Name: At_50mM_NH4NO3_L-to-H_P Parameter: Plant Line Value: Undefined
  misc_feature: MA Experiment 20001459 PARAMETER Experiment Name: At_50mM_NH4NO3_L-to-H_P Parameter: Timepoint (hr) Value: 4
  misc_feature: MA Experiment 20001459 PARAMETER Experiment Name: At_50mM_NH4NO3_L-to-H_P Parameter: Tissue Value: Siliques
  misc_feature: MA Experiment 20001459 PARAMETER Experiment Name: At_50mM_NH4NO3_L-to-H_P Parameter: Treatment Value: 50mM NH4NO3 vs. 100mM Manitol
  misc_feature: MA Experiment ID: 20001558 Result: Down-regulated in Transcription
  misc_feature: MA Experiment 20001558 PARAMETER Experiment Name: At_Drought_Soil_Dry_P Parameter: Age (day) Value: 27
  misc_feature: MA Experiment 20001558 PARAMETER Experiment Name: At_Drought_Soil_Dry_P Parameter: Organism Value: A. thaliana
  misc_feature: MA Experiment 20001558 PARAMETER Experiment Name: At_Drought_Soil_Dry_P Parameter: Plant Line Value: WS
  misc_feature: MA Experiment 20001558 PARAMETER Experiment Name: At_Drought_Soil_Dry_P Parameter: Post Timepoint (hr) Value: 6
  misc_feature: MA Experiment 20001558 PARAMETER Experiment Name: At_Drought_Soil_Dry_P Parameter: Post-Treatment Value: Re-Water vs. No Drought
  misc_feature: MA Experiment 20001558 PARAMETER Experiment Name: At_Drought_Soil_Dry_P Parameter: Timepoint (day) Value: 13
  misc_feature: MA Experiment 20001558 PARAMETER Experiment Name: At_Drought_Soil_Dry_P Parameter: Treatment Value: Drought vs. No Drought
acagaaccaaaaaagcgaattaggtcaaaaaaacaaatcccaaatcttcatcatcttcaacgtttatggatttgagtcgttctcaaacaaattttcaattagggtttggttgttcacacgcatcaatgactccaacaccaacaccaagagctccaatcgcagacgattcgattaatctacaagtcgatcaaagtttccgatcattaccaacaactttctctccgattccgttacaattactcgaacaaaaagccgagaagaccaccaccgttgatgagccaaagaaagatggaggaggaggaggagatcaaaaggaagacgagcatttcagaatcttaggtcaccatatgtgtctcaaaaggcaaagagattgtccacttttgttaacgcaatcaaagcatccgaagagaagttccatcggtgattcagatctggaatcgcgacgtgctgctgtacgagcttggggtgatcaaccgattcatttggcggatcctgatattcatgagcttatggagaaagagaagcaacgacaagtaagaggaattgaattgattgcttctgagaatttcgtgtgtagagctgtaatggaagctttaggtagtcatttaacgaataaatactctgaaggtatgcctggagctagatactatactgggaatcaatatattgatcagattgagaatctctgtattgagcgtgctcttactgcgtttggtcttgaatctgataaatggggtgttaatgttcagccttattcttgtacttctgctaacttcgcggtgtataccggacttttattgcccggtgaacggattatggggcttgattcgccttctggtggtcatatgagtcatggttattgtactcctggtgggaagaagatttcggctgcttccatcttctttgagagttttccttataaagtgaatcctcaaactgggtatattgattatgataagcttgaagataaggcgcttgattaccgtcctaagattcttatttgtggtgggagttcttatcctagggattgggattttgcaagggttagacagattgcagataagtgtggagctgttttgatgtgtgatatggctcatattagcggtcttgttgcaactaaggttcgaatcttctactactatacttttattgatatgttgattagttctgagatttttaatggtttaggttgcatgtctagttattgaatgtcagaggtagcagtattagatagtttcaatttggttaggccatgtattgatataatgtgtttgtgttatgattgttctatgttctattgaaaccttagattgtttgattactttctatgcaaagtctttttctgtggtgactttgaaataatatgatgaatgagtttttggtgtgtcagtcaatattgtttgaaactattcgtatatgtagacttttgttatgattctgttccaggaaatattgtttctgaatttggtttggtatttttgttatctacaggaatgttcaaatccatttgatcactgtgacatagtaacctccactactcacaaaggtctacgtggtcctagaggaggtatcatcttctacaggagaggcccaaagataagaaagcagggccatcactctagccattgtgacacttccacgcattacgatctagaggaaaagatcaactttgctgtttttccatctctacaaggaggtccacacaacaaccatatcgctgctcttgccattgcattgaaacaagtggccactccagagtacaaagcttacatacaacagatgaagaaaaacgcccaagctttagcagcagctcttcttagaagaaaatgcagactggttactggtggtacagacaaccatttgttgctgtgggatctcactcctatgggcttaacagggaaagtctacgagaaagtgtgtgagatgtgccatatcactttaaacaagacggctatattcggggacaatggtacaatatctcctggaggtgtaagaataggtaagcacagatagattggtttgcatattgtttttgagttagcgacatgtcacattcgtattcacatcgatccttttatcaatagggacacccgcaatgacaacccgaggctgtatagagtctgatttcgagacaatggcggattttctgataaaggcggctcagataacaagtgcgttgcagagagagcatggaaagtcacacaaggagtttgtgaaaagtttatgcaccaacaaagacatagctgagcttagaaaccgagtcgaagcatttgctttgcagtatgagatgcctgcttctcttattcgaattgaatgaaagaaaactccacacaacagctttatttacagttgaattttatcttatctctgggtcaatttttttttttttttttggagttctatcttgtaaattagagtaaatatatatttatattgggattgatttgc

SEQ ID NO: 84552 - protein, 380 aa, Arabidopsis thaliana
  peptide (1)..(380): Ceres Seq. ID no. 12675693
  misc_feature (138)..(352): Pfam Name: Serine hydroxymethyltransferase Pfam Description: Serine hydroxymethyltransferase
  misc_feature (21)..(352): Homolog of NCBI NO: 21537165 NR Description: putative hydroxymethyltransferase [Arabidopsis
  misc_feature (21)..(352): Homolog of NCBI NO: 25286207 NR Description: probable hydroxymethyltransferase, 49598-47322 - Arabidopsis thaliana >gi|12324475|gb|AAG52195.1|AC021199_1
  misc_feature (6)..(352): Homolog of NCBI NO: 15219182 NR Description: glycine hydroxymethyltransferase, putative; id: At1g22020.1 [Arabidopsis thaliana] F2E2.7 [Arabidopsis thaliana] >gi|21928157|gb|AAM78106.1|
  misc_feature (108)..(352): Homolog of NCBI NO: 34907298 NR Description: putative hydroxymethyltransferase [Oryza sativa
  misc_feature (130)..(352): Homolog of NCBI NO: 15236375 NR Description: hydroxymethyltransferase; protein id: supported by cDNA: 29662., supported by cDNA: gi_13358183, by cDNA: gi_13605526, supported by cDNA: gi_20334773 [Arabidopsis
  misc_feature (130)..(352): Homolog of NCBI NO: 21592544 NR Description: hydroxymethyltransferase [Arabidopsis thaliana]
  misc_feature (130)..(352): Homolog of NCBI NO: 11762130 NR Description: AT4g13930 [Arabidopsis thaliana]
  misc_feature (130)..(352): Homolog of NCBI NO: 15236371 NR Description: glycine hydroxymethyltransferase - like protein; id: At4g13890.1 [Arabidopsis thaliana] >gi|7433549|pir||T05258
  misc_feature (142)..(350): Homolog of NCBI NO: 17066746 NR Description: serine hydroxymethyltransferase [Chlamydomonas
  misc_feature (142)..(350): Homolog of NCBI NO: 39581013 NR Description: Hypothetical protein CBG19673 [Caenorhabditis
MDLSRSQTNFQLGFGCSHASMTPTPTPRAPIADDSINLQVDQSFRSLPTTFSPIPLQLLEQKAEKTTTVDEPKKDGGGGGDQKEDEHFRILGHHMCLKRQRDCPLLLTQSKHPKRSSIGDSDLESRRAAVRAWGDQPIHLADPDIHELMEKEKQRQVRGIELIASENFVCRAVMEALGSHLTNKYSEGMPGARYYTGNQYIDQIENLCIERALTAFGLESDKWGVNVQPYSCTSANFAVYTGLLLPGERIMGLDSPSGGHMSHGYCTPGGKKISAASIFFESFPYKVNPQTGYIDYDKLEDKALDYRPKILICGGSSYPRDWDFARVRQIADKCGAVLMCDMAHISGLVATKVRIFYYYTFIDMLISSEIFNGLGCMSSY

SEQ ID NO: 84553 - protein, 360 aa, Arabidopsis thaliana
  peptide (1)..(360): Ceres Seq. ID no. 12675694
  misc_feature (118)..(332): Pfam Name: Serine hydroxymethyltransferase Pfam Description: Serine hydroxymethyltransferase
  misc_feature (1)..(332): Homolog of NCBI NO: 21537165 NR Description: putative hydroxymethyltransferase [Arabidopsis
  misc_feature (1)..(332): Homolog of NCBI NO: 25286207 NR Description: probable hydroxymethyltransferase, 49598-47322 - Arabidopsis thaliana >gi|12324475|gb|AAG52195.1|AC021199_1
  misc_feature (1)..(332): Homolog of NCBI NO: 15219182 NR Description: glycine hydroxymethyltransferase, putative; id: At1g22020.1 [Arabidopsis thaliana] F2E2.7 [Arabidopsis thaliana] >gi|21928157|gb|AAM78106.1|
  misc_feature (88)..(332): Homolog of NCBI NO: 34907298 NR Description: putative hydroxymethyltransferase [Oryza sativa
  misc_feature (110)..(332): Homolog of NCBI NO: 15236375 NR Description: hydroxymethyltransferase; protein id: supported by cDNA: 29662., supported by cDNA: gi_13358183, by cDNA: gi_13605526, supported by cDNA: gi_20334773 [Arabidopsis
  misc_feature (110)..(332): Homolog of NCBI NO: 21592544 NR Description: hydroxymethyltransferase [Arabidopsis thaliana]
  misc_feature (110)..(332): Homolog of NCBI NO: 11762130 NR Description: AT4g13930 [Arabidopsis thaliana]
  misc_feature (110)..(332): Homolog of NCBI NO: 15236371 NR Description: glycine hydroxymethyltransferase - like protein; id: At4g13890.1 [Arabidopsis thaliana] >gi|7433549|pir||T05258
  misc_feature (122)..(330): Homolog of NCBI NO: 17066746 NR Description: serine hydroxymethyltransferase [Chlamydomonas
  misc_feature (122)..(330): Homolog of NCBI NO: 39581013 NR Description: Hypothetical protein CBG19673 [Caenorhabditis
MTPTPTPRAPIADDSINLQVDQSFRSLPTTFSPIPLQLLEQKAEKTTTVDEPKKDGGGGGDQKEDEHFRILGHHMCLKRQRDCPLLLTQSKHPKRSSIGDSDLESRRAAVRAWGDQPIHLADPDIHELMEKEKQRQVRGIELIASENFVCRAVMEALGSHLTNKYSEGMPGARYYTGNQYIDQIENLCIERALTAFGLESDKWGVNVQPYSCTSANFAVYTGLLLPGERIMGLDSPSGGHMSHGYCTPGGKKISAASIFFESFPYKVNPQTGYIDYDKLEDKALDYRPKILICGGSSYPRDWDFARVRQIADKCGAVLMCDMAHISGLVATKVRIFYYYTFIDMLISSEIFNGLGCMSSY

SEQ ID NO: 84554 - protein, 286 aa, Arabidopsis thaliana
  peptide (1)..(286): Ceres Seq. ID no. 12675695
  misc_feature (44)..(258): Pfam Name: Serine hydroxymethyltransferase Pfam Description: Serine hydroxymethyltransferase
  misc_feature (1)..(258): Homolog of NCBI NO: 21537165 NR Description: putative hydroxymethyltransferase [Arabidopsis
  misc_feature (1)..(258): Homolog of NCBI NO: 25286207 NR Description: probable hydroxymethyltransferase, 49598-47322 - Arabidopsis thaliana >gi|12324475|gb|AAG52195.1|AC021199_1
  misc_feature (1)..(258): Homolog of NCBI NO: 15219182 NR Description: glycine hydroxymethyltransferase, putative; id: At1g22020.1 [Arabidopsis thaliana] F2E2.7 [Arabidopsis thaliana] >gi|21928157|gb|AAM78106.1|
  misc_feature (14)..(258): Homolog of NCBI NO: 34907298 NR Description: putative hydroxymethyltransferase [Oryza sativa
  misc_feature (36)..(258): Homolog of NCBI NO: 15236375 NR Description: hydroxymethyltransferase; protein id: supported by cDNA: 29662., supported by cDNA: gi_13358183, by cDNA: gi_13605526, supported by cDNA: gi_20334773 [Arabidopsis
  misc_feature (36)..(258): Homolog of NCBI NO: 21592544 NR Description: hydroxymethyltransferase [Arabidopsis thaliana]
  misc_feature (36)..(258): Homolog of NCBI NO: 11762130 NR Description: AT4g13930 [Arabidopsis thaliana]
  misc_feature (36)..(258): Homolog of NCBI NO: 15236371 NR Description: glycine hydroxymethyltransferase - like protein; id: At4g13890.1 [Arabidopsis thaliana] >gi|7433549|pir||T05258
  misc_feature (48)..(256): Homolog of NCBI NO: 17066746 NR Description: serine hydroxymethyltransferase [Chlamydomonas
  misc_feature (48)..(256): Homolog of NCBI NO: 39581013 NR Description: Hypothetical protein CBG19673 [Caenorhabditis
MCLKRQRDCPLLLTQSKHPKRSSIGDSDLESRRAAVRAWGDQPIHLADPDIHELMEKEKQRQVRGIELIASENFVCRAVMEALGSHLTNKYSEGMPGARYYTGNQYIDQIENLCIERALTAFGLESDKWGVNVQPYSCTSANFAVYTGLLLPGERIMGLDSPSGGHMSHGYCTPGGKKISAASIFFESFPYKVNPQTGYIDYDKLEDKALDYRPKILICGGSSYPRDWDFARVRQIADKCGAVLMCDMAHISGLVATKVRIFYYYTFIDMLISSEIFNGLGCMSSY

SEQ ID NO: 84555 - DNA, 1107 bp, Arabidopsis thaliana
  misc_feature (1)..(1107): Ceres Seq. ID no. 12675733
  misc_feature: MA Experiment ID: 108434 Result: Up-regulated in Transcription
  misc_feature: MA Experiment 108434 PARAMETER Experiment Name: At_Root_Tips_cDNA_P Parameter: Tissue Value: Root Tips
  misc_feature: MA Experiment ID: 108461 Result: Up-regulated in Transcription
  misc_feature: MA Experiment 108461 PARAMETER Experiment Name: At_Germinating_Seeds_cDNA_P Parameter: Age (day) Value: 1 vs. 0
  misc_feature: MA Experiment 108461 PARAMETER Experiment Name: At_Germinating_Seeds_cDNA_P Parameter: Tissue Value: Germinating Seeds
  misc_feature: MA Experiment ID: 108462 Result: Up-regulated in Transcription
  misc_feature: MA Experiment 108462 PARAMETER Experiment Name: At_Germinating_Seeds_cDNA_P Parameter: Age (day) Value: 2 vs. 0
  misc_feature: MA Experiment 108462 PARAMETER Experiment Name: At_Germinating_Seeds_cDNA_P Parameter: Tissue Value: Germinating Seeds
  misc_feature: MA Experiment ID: 108463 Result: Up-regulated in Transcription
  misc_feature: MA Experiment 108463 PARAMETER Experiment Name: At_Germinating_Seeds_cDNA_P Parameter: Age (day) Value: 3 vs. 0
  misc_feature: MA Experiment 108463 PARAMETER Experiment Name: At_Germinating_Seeds_cDNA_P Parameter: Tissue Value: Germinating Seeds
  misc_feature: MA Experiment ID: 108464 Result: Up-regulated in Transcription
  misc_feature: MA Experiment 108464 PARAMETER Experiment Name: At_Germinating_Seeds_cDNA_P Parameter: Age (day) Value: 4 vs. 0
  misc_feature: MA Experiment 108464 PARAMETER Experiment Name: At_Germinating_Seeds_cDNA_P Parameter: Tissue Value: Germinating Seeds
  misc_feature: MA Experiment ID: 108595 Result: Down-regulated in Transcription
  misc_feature: MA Experiment 108595 PARAMETER Experiment Name: At_Ler-pi_Ovule_cDNA_P Parameter: Plant Line Value: null
  misc_feature: MA Experiment ID: 20000069 Result: Down-regulated in Transcription
  misc_feature: MA Experiment 20000069 PARAMETER Experiment Name: At_100uM_ABA_Mutants_cDNA_P Parameter: Plant Line Value: CS23
  misc_feature: MA Experiment 20000069 PARAMETER Experiment Name: At_100uM_ABA_Mutants_cDNA_P Parameter: Timepoint (hr) Value: 6
  misc_feature: MA Experiment 20000069 PARAMETER Experiment Name: At_100uM_ABA_Mutants_cDNA_P Parameter: Tissue Value: Aerial
  misc_feature: MA Experiment 20000069 PARAMETER Experiment Name: At_100uM_ABA_Mutants_cDNA_P Parameter: Treatment Value: 100uM ABA vs. No Treatment
  misc_feature: MA Experiment ID: 20000070 Result: Down-regulated in Transcription
  misc_feature: MA Experiment 20000070 PARAMETER Experiment Name: At_100uM_ABA_Mutants_cDNA_P Parameter: Plant Line Value: CS24
  misc_feature: MA Experiment 20000070 PARAMETER Experiment Name: At_100uM_ABA_Mutants_cDNA_P Parameter: Timepoint (hr) Value: 6
  misc_feature: MA Experiment 20000070 PARAMETER Experiment Name: At_100uM_ABA_Mutants_cDNA_P Parameter: Tissue Value: Aerial
  misc_feature: MA Experiment 20000070 PARAMETER Experiment Name: At_100uM_ABA_Mutants_cDNA_P Parameter: Treatment Value: 100uM ABA vs. No Treatment
  misc_feature: MA Experiment ID: 20000071 Result: Down-regulated in Transcription
  misc_feature: MA Experiment 20000071 PARAMETER Experiment Name: At_100uM_ABA_Mutants_cDNA_P Parameter: Plant Line Value: CS8104
  misc_feature: MA Experiment 20000071 PARAMETER Experiment Name: At_100uM_ABA_Mutants_cDNA_P Parameter: Timepoint (hr) Value: 6
  misc_feature: MA Experiment 20000071 PARAMETER Experiment Name: At_100uM_ABA_Mutants_cDNA_P Parameter: Tissue Value: Aerial
  misc_feature: MA Experiment 20000071 PARAMETER Experiment Name: At_100uM_ABA_Mutants_cDNA_P Parameter: Treatment Value: 100uM ABA vs. No Treatment
  misc_feature: MA Experiment ID: 20000072 Result: Down-regulated in Transcription
  misc_feature: MA Experiment 20000072 PARAMETER Experiment Name: At_100uM_ABA_Mutants_cDNA_P Parameter: Plant Line Value: CS8105
  misc_feature: MA Experiment 20000072 PARAMETER Experiment Name: At_100uM_ABA_Mutants_cDNA_P Parameter: Timepoint (hr) Value: 6
  misc_feature: MA Experiment 20000072 PARAMETER Experiment Name: At_100uM_ABA_Mutants_cDNA_P Parameter: Tissue Value: Aerial
  misc_feature: MA Experiment 20000072 PARAMETER Experiment Name: At_100uM_ABA_Mutants_cDNA_P Parameter: Treatment Value: 100uM ABA vs. No Treatment
  misc_feature: MA Experiment ID: 20000086 Result: Down-regulated in Transcription
  misc_feature: MA Experiment 20000086 PARAMETER Experiment Name: At_100uM_ABA_Mutants_cDNA_P Parameter: Plant Line Value: CS22
  misc_feature: MA Experiment 20000086 PARAMETER Experiment Name: At_100uM_ABA_Mutants_cDNA_P Parameter: Timepoint (hr) Value: 6
  misc_feature: MA Experiment 20000086 PARAMETER Experiment Name: At_100uM_ABA_Mutants_cDNA_P Parameter: Tissue Value: Aerial
  misc_feature: MA Experiment 20000086 PARAMETER Experiment Name: At_100uM_ABA_Mutants_cDNA_P Parameter: Treatment Value: 100uM ABA vs. No Treatment
  misc_feature: MA Experiment ID: 20000087 Result: Down-regulated in Transcription
  misc_feature: MA Experiment 20000087 PARAMETER Experiment Name: At_100uM_ABA_Mutants_cDNA_P Parameter: Plant Line Value: WS
  misc_feature: MA Experiment 20000087 PARAMETER Experiment Name: At_100uM_ABA_Mutants_cDNA_P Parameter: Timepoint (hr) Value: 6
  misc_feature: MA Experiment 20000087 PARAMETER Experiment Name: At_100uM_ABA_Mutants_cDNA_P Parameter: Tissue Value: Aerial
  misc_feature: MA Experiment 20000087 PARAMETER Experiment Name: At_100uM_ABA_Mutants_cDNA_P Parameter: Treatment Value: 100uM ABA vs. No Treatment
  misc_feature: MA Experiment ID: 20000088 Result: Down-regulated in Transcription
  misc_feature: MA Experiment 20000088 PARAMETER Experiment Name: At_100uM_ABA_Mutants_cDNA_P Parameter: Plant Line Value: Landsberg
  misc_feature: MA Experiment 20000088 PARAMETER Experiment Name: At_100uM_ABA_Mutants_cDNA_P Parameter: Timepoint (hr) Value: 6
  misc_feature: MA Experiment 20000088 PARAMETER Experiment Name: At_100uM_ABA_Mutants_cDNA_P Parameter: Tissue Value: Aerial
  misc_feature: MA Experiment 20000088 PARAMETER Experiment Name: At_100uM_ABA_Mutants_cDNA_P Parameter: Treatment Value: 100uM ABA vs. No Treatment
  misc_feature: MA Experiment ID: 20000089 Result: Down-regulated in Transcription
  misc_feature: MA Experiment ID: 20000090 Result: Down-regulated in Transcription
  misc_feature: MA Experiment ID: 20000117 Result: Down-regulated in Transcription
  misc_feature: MA Experiment 20000117 PARAMETER Experiment Name: At_100uM_ABA_Mutants_cDNA_P Parameter: Plant Line Value: Columbia
  misc_feature: MA Experiment 20000117 PARAMETER Experiment Name: At_100uM_ABA_Mutants_cDNA_P Parameter: Timepoint (hr) Value: 6
  misc_feature: MA Experiment 20000117 PARAMETER Experiment Name: At_100uM_ABA_Mutants_cDNA_P Parameter: Tissue Value: Aerial
  misc_feature: MA Experiment 20000117 PARAMETER Experiment Name: At_100uM_ABA_Mutants_cDNA_P Parameter: Treatment Value: 100uM ABA vs. No Treatment
  misc_feature: MA Experiment ID: 20000180 Result: Up-regulated in Transcription
  misc_feature: MA Experiment 20000180 PARAMETER Experiment Name: At_Germinating_Seeds_P Parameter: Age (hr) Value: 24 vs. 0
  misc_feature: MA Experiment 20000180 PARAMETER Experiment Name: At_Germinating_Seeds_P Parameter: Tissue Value: Germinating Seeds
  misc_feature: MA Experiment ID: 20000184 Result: Up-regulated in Transcription
  misc_feature: MA Experiment 20000184 PARAMETER Experiment Name: At_Shoots__P Parameter: Age (day) Value: 7
  misc_feature: MA Experiment 20000184 PARAMETER Experiment Name: At_Shoots__P Parameter: Tissue Value: Shoots vs. Whole Plant
  misc_feature: MA Experiment ID: 20000185 Result: Down-regulated in Transcription
  misc_feature: MA Experiment 20000185 PARAMETER Experiment Name: At_Roots__P Parameter: Age (day) Value: 7 vs. 21
  misc_feature: MA Experiment 20000185 PARAMETER Experiment Name: At_Roots__P Parameter: Organism Value: A. thaliana
  misc_feature: MA Experiment 20000185 PARAMETER Experiment Name: At_Roots__P Parameter: Tissue Value: Roots vs. Whole Plant
  misc_feature: MA Experiment ID: 20000436 Result: Down-regulated in Transcription
  misc_feature: MA Experiment 20000436 PARAMETER Experiment Name: At_Drought_P Parameter: Age (day) Value: 7
  misc_feature: MA Experiment 20000436 PARAMETER Experiment Name: At_Drought_P Parameter: Organism Value: A. thaliana
  misc_feature: MA Experiment 20000436 PARAMETER Experiment Name: At_Drought_P Parameter: Plant Line Value: WS
  misc_feature: MA Experiment 20000436 PARAMETER Experiment Name: At_Drought_P Parameter: Timepoint (hr) Value: 12
  misc_feature: MA Experiment 20000436 PARAMETER Experiment Name: At_Drought_P Parameter: Tissue Value: Whole Plant
  misc_feature: MA Experiment 20000436 PARAMETER Experiment Name: At_Drought_P Parameter: Treatment Value: Drought vs. No Drought
  misc_feature: MA Experiment ID: 20000437 Result: Down-regulated in Transcription
  misc_feature: MA Experiment 20000437 PARAMETER Experiment Name: At_Drought_P Parameter: Age (day) Value: 8
  misc_feature: MA Experiment 20000437 PARAMETER Experiment Name: At_Drought_P Parameter: Organism Value: A. thaliana
  misc_feature: MA Experiment 20000437 PARAMETER Experiment Name: At_Drought_P Parameter: Plant Line Value: WS
  misc_feature: MA Experiment 20000437 PARAMETER Experiment Name: At_Drought_P Parameter: Timepoint (hr) Value: 24
  misc_feature: MA Experiment 20000437 PARAMETER Experiment Name: At_Drought_P Parameter: Tissue Value: Whole Plant
  misc_feature: MA Experiment 20000437 PARAMETER Experiment Name: At_Drought_P Parameter: Treatment Value: Drought vs. No Drought
  misc_feature: MA Experiment ID: 20000438 Result: Up-regulated in Transcription
  misc_feature: MA Experiment 20000438 PARAMETER Experiment Name: At_Shoots__P Parameter: Age (day) Value: 14
  misc_feature: MA Experiment 20000438 PARAMETER Experiment Name: At_Shoots__P Parameter: Tissue Value: Shoots vs. Whole Plant
  misc_feature: MA Experiment ID: 20000439 Result: Down-regulated in Transcription
  misc_feature: MA Experiment 20000439 PARAMETER Experiment Name: At_Roots__P Parameter: Age (day) Value: 14 vs. 21
  misc_feature: MA Experiment 20000439 PARAMETER Experiment Name: At_Roots__P Parameter: Organism Value: A. thaliana
  misc_feature: MA Experiment 20000439 PARAMETER Experiment Name: At_Roots__P Parameter: Tissue Value: Roots vs. Whole Plant
  misc_feature: MA Experiment ID: 20000573 Result: Down-regulated in Transcription
  misc_feature: MA Experiment 20000573 PARAMETER Experiment Name: At_100uM_ABA_Mutants__P Parameter: Organism Value: A. thaliana
  misc_feature: MA Experiment 20000573 PARAMETER Experiment Name: At_100uM_ABA_Mutants__P Parameter: Plant Line Value: CS22 vs. Ler wt
  misc_feature: MA Experiment 20000573 PARAMETER Experiment Name: At_100uM_ABA_Mutants__P Parameter: Timepoint (hr) Value: N/A
  misc_feature: MA Experiment 20000573 PARAMETER Experiment Name: At_100uM_ABA_Mutants__P Parameter: Tissue Value: Whole Plant
  misc_feature: MA Experiment 20000573 PARAMETER Experiment Name: At_100uM_ABA_Mutants__P Parameter: Treatment Value: None
  misc_feature: MA Experiment ID: 20000574 Result: Down-regulated in Transcription
  misc_feature: MA Experiment 20000574 PARAMETER Experiment Name: At_100uM_ABA_Mutants__P Parameter: Organism Value: A. thaliana
  misc_feature: MA Experiment 20000574 PARAMETER Experiment Name: At_100uM_ABA_Mutants__P Parameter: Plant Line Value: CS23 vs. Ler wt
  misc_feature: MA Experiment 20000574 PARAMETER Experiment Name: At_100uM_ABA_Mutants__P Parameter: Timepoint (hr) Value: N/A
  misc_feature: MA Experiment 20000574 PARAMETER Experiment Name: At_100uM_ABA_Mutants__P Parameter: Tissue Value: Whole Plant
  misc_feature: MA Experiment 20000574 PARAMETER Experiment Name: At_100uM_ABA_Mutants__P Parameter: Treatment Value: None
  misc_feature: MA Experiment ID: 20001248 Result: Down-regulated in Transcription
  misc_feature: MA Experiment 20001248 PARAMETER Experiment Name: At_Far-red-induction_P Parameter: Age (day) Value: 7
  misc_feature: MA Experiment 20001248 PARAMETER Experiment Name: At_Far-red-induction_P Parameter: Light Value: Far-red vs. White
  misc_feature: MA Experiment 20001248 PARAMETER Experiment Name: At_Far-red-induction_P Parameter: Organism Value: A. thaliana
  misc_feature: MA Experiment 20001248 PARAMETER Experiment Name: At_Far-red-induction_P Parameter: Plant Line Value: Columbia
  misc_feature: MA Experiment 20001248 PARAMETER Experiment Name: At_Far-red-induction_P Parameter: Timepoint (hr) Value: 4
  misc_feature: MA Experiment 20001248 PARAMETER Experiment Name: At_Far-red-induction_P Parameter: Tissue Value: Whole Plant
  misc_feature: MA Experiment ID: 20001450 Result: Down-regulated in Transcription
  misc_feature: MA Experiment 20001450 PARAMETER Experiment Name: At_Far-red-induction_P Parameter: Age (day) Value: 7
  misc_feature: MA Experiment 20001450 PARAMETER Experiment Name: At_Far-red-induction_P Parameter: Light Value: Far-red vs. White
  misc_feature: MA Experiment 20001450 PARAMETER Experiment Name: At_Far-red-induction_P Parameter: Organism Value: A. thaliana
  misc_feature: MA Experiment 20001450 PARAMETER Experiment Name: At_Far-red-induction_P Parameter: Plant Line Value: Columbia
  misc_feature: MA Experiment 20001450 PARAMETER Experiment Name: At_Far-red-induction_P Parameter: Timepoint (hr) Value: 8
  misc_feature: MA Experiment 20001450 PARAMETER Experiment Name: At_Far-red-induction_P Parameter: Tissue Value: Whole Plant
  misc_feature: MA Experiment ID: 20001559 Result: Down-regulated in Transcription
  misc_feature: MA Experiment 20001559 PARAMETER Experiment Name: At_Drought_Soil_Dry_P Parameter: Age (day) Value: 28
  misc_feature: MA Experiment 20001559 PARAMETER Experiment Name: At_Drought_Soil_Dry_P Parameter: Organism Value: A. thaliana
  misc_feature: MA Experiment 20001559 PARAMETER Experiment Name: At_Drought_Soil_Dry_P Parameter: Plant Line Value: WS
  misc_feature: MA Experiment 20001559 PARAMETER Experiment Name: At_Drought_Soil_Dry_P Parameter: Post Timepoint (hr) Value: 29
  misc_feature: MA Experiment 20001559 PARAMETER Experiment Name: At_Drought_Soil_Dry_P Parameter: Post-Treatment Value: Re-Water vs. No Drought
  misc_feature: MA Experiment 20001559 PARAMETER Experiment Name: At_Drought_Soil_Dry_P Parameter: Timepoint (day) Value: 14
  misc_feature: MA Experiment 20001559 PARAMETER Experiment Name: At_Drought_Soil_Dry_P Parameter: Treatment Value: Drought vs. No Drought
  misc_feature: MA Experiment ID: 20001905 Result: Down-regulated in Transcription
  misc_feature: MA Experiment 20001905 PARAMETER Experiment Name: At_Drought_Reproduction_P Parameter: Age (day) Value: 40
  misc_feature: MA Experiment 20001905 PARAMETER Experiment Name: At_Drought_Reproduction_P Parameter: Organism Value: A. thaliana
  misc_feature: MA Experiment 20001905 PARAMETER Experiment Name: At_Drought_Reproduction_P Parameter: Plant Line Value: WS
  misc_feature: MA Experiment 20001905 PARAMETER Experiment Name: At_Drought_Reproduction_P Parameter: Timepoint (day) Value: 10
  misc_feature: MA Experiment 20001905 PARAMETER Experiment Name: At_Drought_Reproduction_P Parameter: Tissue Value: Rosettes
  misc_feature: MA Experiment 20001905 PARAMETER Experiment Name: At_Drought_Reproduction_P Parameter: Treatment Value: Drought vs. No Drought
aatttgcaaaatcgaatttgtgtggagaaagaagctcgtcaccaagactgaatttgtggctacgtctaaaacacattcttccacatctcttctctgtttctcaagacaaaaaaagaaaaaatggtggaagatgaacaatgacgaagaatcattgttattgttcatgcattaaccttgttgttatgttcctccatggcctgttacatcgttccttattaccaccatcctgttttgtctcatcccaatagagaaatcttcagtcaccgtcaccaccaccaccaccgtttctgcaacaatctcttgaatagaagaattagtgttcctcgaagctccgctattagtgacggtggtgtctcctacaatactctagtctccgaggcggtgaggcttttggttccacaagcaaactttgattcttcaaagcttaaagttgagttcttaggagagttattggagaacaagagtaacggaggaattattacgccgcggacttatattctttcgcattgtgacttcactgctaacttaacgttaacaatctcaaacgttatcaatctggatcaactagaaggctggtacaagaaagatgatgtggttgctgagtggaagaaggtgaatgatgagctgcgtttacatattcattgttgtgtgagtggtatgagtttattgcaggatgttgctgctgagcttaggtatcatattttctccaaggaattgcctttggtacttaaagctgtggtgcatggagattcagttatgtttagagagaatcctgagctaatggatgcttatgtatgggtttatttccattcaagcacacctaagtacaatcggatcgagtgttggggacctcttaaggatgctgcgaagggaaagcagcagggcaatcatcaaggcttcttgagttcgacgacttcgaggaaattgattcgacataagtctatcttccataccttatttacgtttcttctgtgagacaaagttgtacattctcctgtgtttttttttgcaaatgatgtagatttcttaatgagcatctgacacaagtgcaatttgccaacattcaaatgttcatacttgggaaatttatgagagcctagttttctt

SEQ ID NO: 84556 - protein, 260 aa, Arabidopsis thaliana; identical to SEQ ID NO: 28193
  peptide (1)..(260): Ceres Seq. ID no. 12675734
  misc_feature (1)..(249): Homolog of NCBI NO: 8778672 NR Description: F9C16.20 [Arabidopsis thaliana]
  misc_feature (1)..(260): Homolog of NCBI NO: 18401163 NR Description: expressed protein; protein id: At1g44000.1, by cDNA: gi_15028026, supported by cDNA: gi_20259312 [Arabidopsis >gi|15028027|gb|AAK76544.1| unknown protein [Arabidopsis
  misc_feature (64)..(224): Homolog of NCBI NO: 15234348 NR Description: putative protein; protein id: At4g11910.1
  misc_feature (57)..(235): Homolog of NCBI NO: 15234348 NR Description: putative protein; protein id: At4g11910.1
  misc_feature (57)..(224): Homolog of NCBI NO: 18416035 NR Description: expressed protein; protein id: At4g22920.1, by cDNA: 29391., supported by cDNA: gi_17380887, supported by
  misc_feature (57)..(224): Homolog of NCBI NO: 21592527 NR Description: unknown [Arabidopsis thaliana]
  misc_feature (36)..(215): Homolog of NCBI NO: 38567838 NR Description: OSJNBb0020J19.16 [Oryza sativa (japonica
  misc_feature (73)..(230): Homolog of NCBI NO: 18311568 NR Description: hypothetical protein [Clostridium perfringens]
  misc_feature (96)..(223): Homolog of NCBI NO: 15896657 NR Description: Uncharacterized protein, homolog of YYBI fused to uncharacterized domain similar to A.thaliana (gi:3292817

SEQ ID NO: 84557 - DNA, 429 bp, Arabidopsis thaliana
  misc_feature (1)..(429): Ceres Seq. ID no. 12675771
  misc_feature: MA Experiment ID: 108434 Result: Up-regulated in Transcription
  misc_feature: MA Experiment 108434 PARAMETER Experiment Name: At_Root_Tips_cDNA_P Parameter: Tissue Value: Root Tips
  misc_feature: MA Experiment ID: 108461 Result: Up-regulated in Transcription
  misc_feature: MA Experiment 108461 PARAMETER Experiment Name: At_Germinating_Seeds_cDNA_P Parameter: Age (day) Value: 1 vs. 0
  misc_feature: MA Experiment 108461 PARAMETER Experiment Name: At_Germinating_Seeds_cDNA_P Parameter: Tissue Value: Germinating Seeds
  misc_feature: MA Experiment ID: 108595 Result: Up-regulated in Transcription
  misc_feature: MA Experiment 108595 PARAMETER Experiment Name: At_Ler-pi_Ovule_cDNA_P Parameter: Plant Line Value: null
  misc_feature: MA Experiment ID: 108607 Result: Down-regulated in Transcription
  misc_feature: MA Experiment 108607 PARAMETER Experiment Name: At_100uM_ABA_cDNA_P Parameter: Timepoint (hr) Value: 4
  misc_feature: MA Experiment 108607 PARAMETER Experiment Name: At_100uM_ABA_cDNA_P Parameter: Tissue Value: Aerial
  misc_feature: MA Experiment 108607 PARAMETER Experiment Name: At_100uM_ABA_cDNA_P Parameter: Treatment Value: 100uM ABA vs. No Treatment
  misc_feature: MA Experiment ID: 108668 Result: Down-regulated in Transcription
  misc_feature: MA Experiment 108668 PARAMETER Experiment Name: At_2mM_SA_cDNA_P Parameter: Plant Line Value: WS
  misc_feature: MA Experiment 108668 PARAMETER Experiment Name: At_2mM_SA_cDNA_P Parameter: Timepoint (hr) Value: 6
  misc_feature: MA Experiment 108668 PARAMETER Experiment Name: At_2mM_SA_cDNA_P Parameter: Treatment Value: 2mM SA vs. No Treatment
atatcactaacccaaaaacaaaacaaaaaatgggtttcattggtaagagtgtattagtgagtctcgtagcactttggtgcttcacttcctctgtcttcactgaagaagtgaaccataagactcaaaccccttctctagctcctgctcctgctccttaccaccacggccaccaccacccacaccctcctcatcaccaccaccctcaccctcaccctcacccccacccaccggccaaatctcctgttaaacccccggttaaggcaccagtgtctccaccagccaaacctccggttaagcccccggtttacccacccaccaaagccccggtgaaacccccaactaaacccccggtcaagccacctgtttccccaccagccaaacctccggttaagccaccagtttaccctccaaccaaagctccagttaagc

SEQ ID NO: 84558 - protein, 142 aa, Arabidopsis thaliana
  peptide (1)..(142): Ceres Seq. ID no. 12675772
  misc_feature (42)..(140): Pfam Name: Formin Homology 2 Domain Pfam Description: Formin Homology 2 Domain
  misc_feature (10)..(141): Homolog of NCBI NO: 15217879 NR Description: prolin-rich protein, putative; protein id:
  misc_feature (36)..(141): Homolog of NCBI NO: 15217879 NR Description: prolin-rich protein, putative; protein id:
  misc_feature (43)..(141): Homolog of NCBI NO: 15217879 NR Description: prolin-rich protein, putative; protein id:
  misc_feature (43)..(136): Homolog of NCBI NO: 15217879 NR Description: prolin-rich protein, putative; protein id:
  misc_feature (37)..(141): Homolog of NCBI NO: 478673 NR Description: proline-rich protein precursor - kidney bean
  misc_feature (37)..(136): Homolog of NCBI NO: 478673 NR Description: proline-rich protein precursor - kidney bean
  misc_feature (40)..(141): Homolog of NCBI NO: 480109 NR Description: EPPT protein - hydromedusa (Podocoryne carnea)
  misc_feature (40)..(141): Homolog of NCBI NO: 480109 NR Description: EPPT protein - hydromedusa (Podocoryne carnea)
  misc_feature (40)..(141): Homolog of NCBI NO: 480109 NR Description: EPPT protein - hydromedusa (Podocoryne carnea)
  misc_feature (40)..(141): Homolog of NCBI NO: 480109 NR Description: EPPT protein - hydromedusa (Podocoryne carnea)
ITNPKTKQKMGFIGKSVLVSLVALWCFTSSVFTEEVNHKTQTPSLAPAPAPYHHGHHHPHPPHHHHPHPHPHPHPPAKSPVKPPVKAPVSPPAKPPVKPPVYPPTKAPVKPPTKPPVKPPVSPPAKPPVKPPVYPPTKAPVK

SEQ ID NO: 84559 - protein, 133 aa, Arabidopsis thaliana
  peptide (1)..(133): Ceres Seq. ID no. 12675773
  misc_feature (33)..(131): Pfam Name: Formin Homology 2 Domain Pfam Description: Formin Homology 2 Domain
  misc_feature (1)..(132): Homolog of NCBI NO: 15217879 NR Description: prolin-rich protein, putative; protein id:
  misc_feature (27)..(132): Homolog of NCBI NO: 15217879 NR Description: prolin-rich protein, putative; protein id:
  misc_feature (34)..(132): Homolog of NCBI NO: 15217879 NR Description: prolin-rich protein, putative; protein id:
  misc_feature (34)..(127): Homolog of NCBI NO: 15217879 NR Description: prolin-rich protein, putative; protein id:
  misc_feature (28)..(132): Homolog of NCBI NO: 478673 NR Description: proline-rich protein precursor - kidney bean
  misc_feature (28)..(127): Homolog of NCBI NO: 478673 NR Description: proline-rich protein precursor - kidney bean
  misc_feature (31)..(132): Homolog of NCBI NO: 480109 NR Description: EPPT protein - hydromedusa (Podocoryne carnea)
  misc_feature (31)..(132): Homolog of NCBI NO: 480109 NR Description: EPPT protein - hydromedusa (Podocoryne carnea)
  misc_feature (31)..(132): Homolog of NCBI NO: 480109 NR Description: EPPT protein - hydromedusa (Podocoryne carnea)
  misc_feature (31)..(132): Homolog of NCBI NO: 480109 NR Description: EPPT protein - hydromedusa (Podocoryne carnea)
MGFIGKSVLVSLVALWCFTSSVFTEEVNHKTQTPSLAPAPAPYHHGHHHPHPPHHHHPHPHPHPHPPAKSPVKPPVKAPVSPPAKPPVKPPVYPPTKAPVKPPTKPPVKPPVSPPAKPPVKPPVYPPTKAPVK

SEQ ID NO: 84560 - DNA, 2001 bp, Arabidopsis thaliana
  misc_feature (1)..(2001): Ceres Seq. ID no. 12675775
  misc_feature: MA Experiment ID: 108434 Result: Down-regulated in Transcription
  misc_feature: MA Experiment 108434 PARAMETER Experiment Name: At_Root_Tips_cDNA_P Parameter: Tissue Value: Root Tips
  misc_feature: MA Experiment ID: 108573 Result: Up-regulated in Transcription
  misc_feature: MA Experiment 108573 PARAMETER Experiment Name: At_Drought_cDNA_P Parameter: Timepoint (hr) Value: 6
  misc_feature: MA Experiment 108573 PARAMETER Experiment Name: At_Drought_cDNA_P Parameter: Tissue Value: Aerial
  misc_feature: MA Experiment 108573 PARAMETER Experiment Name: At_Drought_cDNA_P Parameter: Treatment Value: Drought vs. No Drought
  misc_feature: MA Experiment ID: 108585 Result: Up-regulated in Transcription
  misc_feature: MA Experiment 108585 PARAMETER Experiment Name: At_5mM_NaNP_cDNA_P Parameter: Timepoint (hr) Value: 6
  misc_feature: MA Experiment 108585 PARAMETER Experiment Name: At_5mM_NaNP_cDNA_P Parameter: Tissue Value: Aerial
  misc_feature: MA Experiment 108585 PARAMETER Experiment Name: At_5mM_NaNP_cDNA_P Parameter: Treatment Value: null
  misc_feature: MA Experiment ID: 20000113 Result: Down-regulated in Transcription
  misc_feature: MA Experiment 20000113 PARAMETER Experiment Name: At_42deg_Heat_cDNA_P Parameter: Temperature (deg C) Value: 42 vs. 22
  misc_feature: MA Experiment 20000113 PARAMETER Experiment Name: At_42deg_Heat_cDNA_P Parameter: Timepoint (hr) Value: 8
  misc_feature: MA Experiment 20000113 PARAMETER Experiment Name: At_42deg_Heat_cDNA_P Parameter: Tissue Value: Aerial
  misc_feature: MA Experiment ID: 20000171 Result: Down-regulated in Transcription
  misc_feature: MA Experiment 20000171 PARAMETER Experiment Name: At_42deg_Heat_P Parameter: Age (day) Value: 14
  misc_feature: MA Experiment 20000171 PARAMETER Experiment Name: At_42deg_Heat_P Parameter: Organism Value: A. thaliana
  misc_feature: MA Experiment 20000171 PARAMETER Experiment Name: At_42deg_Heat_P Parameter: Plant Line Value: WS
  misc_feature: MA Experiment 20000171 PARAMETER Experiment Name: At_42deg_Heat_P Parameter: Temperature (deg C) Value: 42 vs. 22
  misc_feature: MA Experiment 20000171 PARAMETER Experiment Name: At_42deg_Heat_P Parameter: Timepoint (hr) Value: 1
  misc_feature: MA Experiment 20000171 PARAMETER Experiment Name: At_42deg_Heat_P Parameter: Tissue Value: Aerial
  misc_feature: MA Experiment ID: 20000173 Result: Down-regulated in Transcription
  misc_feature: MA Experiment 20000173 PARAMETER Experiment Name: At_42deg_Heat_P Parameter: Age (day) Value: 14
  misc_feature: MA Experiment 20000173 PARAMETER Experiment Name: At_42deg_Heat_P Parameter: Organism Value: A. thaliana
  misc_feature: MA Experiment 20000173 PARAMETER Experiment Name: At_42deg_Heat_P Parameter: Plant Line Value: WS
  misc_feature: MA Experiment 20000173 PARAMETER Experiment Name: At_42deg_Heat_P Parameter: Temperature (deg C) Value: 42 vs. 22
  misc_feature: MA Experiment 20000173 PARAMETER Experiment Name: At_42deg_Heat_P Parameter: Timepoint (hr) Value: 6
  misc_feature: MA Experiment 20000173 PARAMETER Experiment Name: At_42deg_Heat_P Parameter: Tissue Value: Aerial
  misc_feature: MA Experiment ID: 20000437 Result: Up-regulated in Transcription
  misc_feature: MA Experiment 20000437 PARAMETER Experiment Name: At_Drought_P Parameter: Age (day) Value: 8
  misc_feature: MA Experiment 20000437 PARAMETER Experiment Name: At_Drought_P Parameter: Organism Value: A. thaliana
  misc_feature: MA Experiment 20000437 PARAMETER Experiment Name: At_Drought_P Parameter: Plant Line Value: WS
  misc_feature: MA Experiment 20000437 PARAMETER Experiment Name: At_Drought_P Parameter: Timepoint (hr) Value: 24
  misc_feature: MA Experiment 20000437 PARAMETER Experiment Name: At_Drought_P Parameter: Tissue Value: Whole Plant
  misc_feature: MA Experiment 20000437 PARAMETER Experiment Name: At_Drought_P Parameter: Treatment Value: Drought vs. No Drought
  misc_feature: MA Experiment ID: 20000794 Result: Up-regulated in Transcription
  misc_feature: MA Experiment 20000794 PARAMETER Experiment Name: At_Petals_P Parameter: Age (day) Value: 23-25 days
  misc_feature: MA Experiment 20000794 PARAMETER Experiment Name: At_Petals_P Parameter: Plant Line Value: WS
  misc_feature: MA Experiment 20000794 PARAMETER Experiment Name: At_Petals_P Parameter: Tissue Value: Petals vs. Whole plant
  misc_feature: MA Experiment ID: 20001248 Result: Up-regulated in Transcription
  misc_feature: MA Experiment 20001248 PARAMETER Experiment Name: At_Far-red-induction_P Parameter: Age (day) Value: 7
  misc_feature: MA Experiment 20001248 PARAMETER Experiment Name: At_Far-red-induction_P Parameter: Light Value: Far-red vs. White
  misc_feature: MA Experiment 20001248 PARAMETER Experiment Name: At_Far-red-induction_P Parameter: Organism Value: A. thaliana
  misc_feature: MA Experiment 20001248 PARAMETER Experiment Name: At_Far-red-induction_P Parameter: Plant Line Value: Columbia
  misc_feature: MA Experiment 20001248 PARAMETER Experiment Name: At_Far-red-induction_P Parameter: Timepoint (hr) Value: 4
  misc_feature: MA Experiment 20001248 PARAMETER Experiment Name: At_Far-red-induction_P Parameter: Tissue Value: Whole Plant
  misc_feature: MA Experiment ID: 20001911 Result: Up-regulated in Transcription
  misc_feature: MA Experiment 20001911 PARAMETER Experiment Name: At_Drought_Reproduction_P Parameter: Age (day) Value: 40
  misc_feature: MA Experiment 20001911 PARAMETER Experiment Name: At_Drought_Reproduction_P Parameter: Organism Value: A. thaliana
  misc_feature: MA Experiment 20001911 PARAMETER Experiment Name: At_Drought_Reproduction_P Parameter: Plant Line Value: WS
  misc_feature: MA Experiment 20001911 PARAMETER Experiment Name: At_Drought_Reproduction_P Parameter: Timepoint (day) Value: 10
  misc_feature: MA Experiment 20001911 PARAMETER Experiment Name: At_Drought_Reproduction_P Parameter: Tissue Value: Flowers
  misc_feature: MA Experiment 20001911 PARAMETER Experiment Name: At_Drought_Reproduction_P Parameter: Treatment Value: Drought vs. No Drought
tttcttcattactcttctttttattttccggagatttttctctttgcctttgttatttgctgcttttgctgcatttgctgcttctacttcagaatcttgtgtttttgtggtggggaggtgagatttcttatgacggggaagcgatcaaagactaattgcagatctgcttctcacaagctcttcaaggataaggctaagaaccgtgttgatgatttgcaaggcatgcttttggatcttcagtttgcgaggaaagagagtaggcctactgatgttactcttcttgaggagcaagtgaatcagatgcttcgtgagtggaaatctgagctcaatgagccttctccagcttcatccttgcaacaaggtggtactctggggtctttctcatcagatatttgtcggctgctgcagctctgtgatgaggaagatgatgctaccagcaaattagctgcccccaagcccgagcctgctgatcagaatctcgaagctggcaaagctgctgtcttccaaaggggatacaatttggttcaggggaagtcagaacatggattaccattggttgataattgcaaagatttgtccttagcagctggtaacaatttcgatggaacggctcctttggagtatcatcagcagtatgatctgcaacaagagtttgaaccaaacttcaatggtggtttcaacaattgtcccagttatggtgtagtagagggtcctatacatatctctaattttatcccgactatttgtcctccaccctctgcattcttgggtccaaaatgtgctctttgggattgccctaggccagctcagggatttgattggttccaggattactgcagcagcttccacgctgcactggctttcaatgaagggccaccaggtatgaatccggtggtgcgtcctggaggtatcggcctaaaagacggtctgctttttgctgctcttagtgcaaaggctggagggaaagatgttggtattcccgaatgtgaaggagctgcaactgctaaatctccatggaatgctccagagctctttgatctcacggttctggagagtgagacactaagggagtggctattctttgacaagccaaggagggcctttgagagcgggaacagaaagcaaagatctttaccagactacaatggtcgtggttggcacgagtcacgtaaacagatcatggtcgagtttggagggctgaagagatcttactacatggatccacagcctctgcaccatttcgaatggcatctttacgaatatgagatcaacaagtgtgatgcttgtgccttgtacaggctcgagctcaagcttgttgacgggaagaagacttcaaaaggcaaagtctcaaacgactcagtggctgatctgcagaagcagatgggaagactcacagctgagttccctccagaaaacaataccactaacaccaccaacaacaacaaacgctgcatcaaaggaagaccaaaagtgagcacaaaagtcgccaccgggaatgttcagaacacagtagagcaggcaaatgactatggagtaggtgaagagtttaactatctggtcggaaatctaagcgactattatatcccctgagacgaatgtggaaaaactcaggtttaaaaagctgtttgcttaccatttaattaggcagcagcagaagaagcttctacatatcgtagggcaaagtaatggattttcatgactcgtatcttttttttctcttatataatagttctctgtctatctatggagattatgtatatataacaagaagtggatgctgaagactgtcctggagttaggaatagtaaatgtgacgaaggagactgctttttaagattcagtctatggaggtgaagacatatttactgacattccggtttatatattttgatgcattttcgactctcttctgcgatataatgcagatgacaaattatgtaaccgatggggaaatacggttttgagtatcagtgttgttcttatagaatcaggaccttgttc

SEQ ID NO: 84561 - protein, 529 aa, Arabidopsis thaliana
  peptide (1)..(529): Ceres Seq. ID no. 12675776
  misc_feature (44)..(529): Homolog of NCBI NO: 15218694 NR Description: unknown protein; protein id: At1g28520.1
  misc_feature (198)..(523): Homolog of NCBI NO: 34909602 NR Description: P0435B05.21 [Oryza sativa (japonica
  misc_feature (47)..(163): Homolog of NCBI NO: 34909602 NR Description: P0435B05.21 [Oryza sativa (japonica
  misc_feature (203)..(463): Homolog of NCBI NO: 18405962 NR Description: expressed protein; protein id: At2g42400.1, by cDNA: gi_13605699, supported by cDNA: gi_18700277 [Arabidopsis >gi|13605700|gb|AAK32843.1|AF361831_1 At2g42400/MHK10.12
  misc_feature (66)..(155): Homolog of NCBI NO: 18405962 NR Description: expressed protein; protein id: At2g42400.1, by cDNA: gi_13605699, supported by cDNA: gi_18700277 [Arabidopsis >gi|13605700|gb|AAK32843.1|AF361831_1 At2g42400/MHK10.12
  misc_feature (343)..(529): Homolog of NCBI NO: 6691215 NR Description: F1K23.24 [Arabidopsis thaliana]
  misc_feature (203)..(463): Homolog of NCBI NO: 25370817 NR Description: hypothetical protein At2g42400 [imported] -
  misc_feature (66)..(118): Homolog of NCBI NO: 25370817 NR Description: hypothetical protein At2g42400 [imported] -
FLHYSSFYFPEIFLFAFVICCFCCICCFYFRILCFCGGEVRFLMTGKRSKTNCRSASHKLFKDKAKNRVDDLQGMLLDLQFARKESRPTDVTLLEEQVNQMLREWKSELNEPSPASSLQQGGTLGSFSSDICRLLQLCDEEDDATSKLAAPKPEPADQNLEAGKAAVFQRGYNLVQGKSEHGLPLVDNCKDLSLAAGNNFDGTAPLEYHQQYDLQQEFEPNFNGGFNNCPSYGVVEGPIHISNFIPTICPPPSAFLGPKCALWDCPRPAQGFDWFQDYCSSFHAALAFNEGPPGMNPVVRPGGIGLKDGLLFAALSAKAGGKDVGIPECEGAATAKSPWNAPELFDLTVLESETLREWLFFDKPRRAFESGNRKQRSLPDYNGRGWHESRKQIMVEFGGLKRSYYMDPQPLHHFEWHLYEYEINKCDACALYRLELKLVDGKKTSKGKVSNDSVADLQKQMGRLTAEFPPENNTTNTTNNNKRCIKGRPKVSTKVATGNVQNTVEQANDYGVGEEFNYLVGNLSDYYIP

SEQ ID NO: 84562 - protein, 486 aa, Arabidopsis thaliana; identical to SEQ ID NO: 22584
  peptide (1)..(486): Ceres Seq. ID no. 12675777
  misc_feature (1)..(486): Homolog of NCBI NO: 15218694 NR Description: unknown protein; protein id: At1g28520.1
  misc_feature (155)..(480): Homolog of NCBI NO: 34909602 NR Description: P0435B05.21 [Oryza sativa (japonica
  misc_feature (4)..(120): Homolog of NCBI NO: 34909602 NR Description: P0435B05.21 [Oryza sativa (japonica
  misc_feature (160)..(420): Homolog of NCBI NO: 18405962 NR Description: expressed protein; protein id: At2g42400.1, by cDNA: gi_13605699, supported by cDNA: gi_18700277 [Arabidopsis >gi|13605700|gb|AAK32843.1|AF361831_1 At2g42400/MHK10.12
  misc_feature (23)..(112): Homolog of NCBI NO: 18405962 NR Description: expressed protein; protein id: At2g42400.1, by cDNA: gi_13605699, supported by cDNA: gi_18700277 [Arabidopsis >gi|13605700|gb|AAK32843.1|AF361831_1 At2g42400/MHK10.12
  misc_feature (300)..(486): Homolog of NCBI NO: 6691215 NR Description: F1K23.24 [Arabidopsis thaliana]
  misc_feature (160)..(420): Homolog of NCBI NO: 25370817 NR Description: hypothetical protein At2g42400 [imported] -
  misc_feature (23)..(75): Homolog of NCBI NO: 25370817 NR Description: hypothetical protein At2g42400 [imported] -

SEQ ID NO: 84563 - protein, 455 aa, Arabidopsis thaliana; identical to SEQ ID NO: 22585
  peptide (1)..(455): Ceres Seq. ID no. 12675778
  misc_feature (1)..(455): Homolog of NCBI NO: 15218694 NR Description: unknown protein; protein id: At1g28520.1
  misc_feature (124)..(449): Homolog of NCBI NO: 34909602 NR Description: P0435B05.21 [Oryza sativa (japonica
  misc_feature (1)..(89): Homolog of NCBI NO: 34909602 NR Description: P0435B05.21 [Oryza sativa (japonica
  misc_feature (129)..(389): Homolog of NCBI NO: 18405962 NR Description: expressed protein; protein id: At2g42400.1, by cDNA: gi_13605699, supported by cDNA: gi_18700277 [Arabidopsis >gi|13605700|gb|AAK32843.1|AF361831_1 At2g42400/MHK10.12
  misc_feature (1)..(81): Homolog of NCBI NO: 18405962 NR Description: expressed protein; protein id: At2g42400.1, by cDNA: gi_13605699, supported by cDNA: gi_18700277 [Arabidopsis >gi|13605700|gb|AAK32843.1|AF361831_1 At2g42400/MHK10.12
  misc_feature (269)..(455): Homolog of NCBI NO: 6691215 NR Description: F1K23.24 [Arabidopsis thaliana]
  misc_feature (129)..(389): Homolog of NCBI NO: 25370817 NR Description: hypothetical protein At2g42400 [imported] -
  misc_feature (1)..(44): Homolog of NCBI NO: 25370817 NR Description: hypothetical protein At2g42400 [imported] -

SEQ ID NO: 84564 - DNA, 831 bp, Arabidopsis thaliana
  misc_feature (1)..(831): Ceres Seq. ID no. 12675783
  misc_feature: MA Experiment ID: 108434 Result: Down-regulated in Transcription
  misc_feature: MA Experiment 108434 PARAMETER Experiment Name: At_Root_Tips_cDNA_P Parameter: Tissue Value: Root Tips
  misc_feature: MA Experiment ID: 108462 Result: Up-regulated in Transcription
  misc_feature: MA Experiment 108462 PARAMETER Experiment Name: At_Germinating_Seeds_cDNA_P Parameter: Age (day) Value: 2 vs. 0
  misc_feature: MA Experiment 108462 PARAMETER Experiment Name: At_Germinating_Seeds_cDNA_P Parameter: Tissue Value: Germinating Seeds
  misc_feature: MA Experiment ID: 108463 Result: Up-regulated in Transcription
  misc_feature: MA Experiment 108463 PARAMETER Experiment Name: At_Germinating_Seeds_cDNA_P Parameter: Age (day) Value: 3 vs. 0
  misc_feature: MA Experiment 108463 PARAMETER Experiment Name: At_Germinating_Seeds_cDNA_P Parameter: Tissue Value: Germinating Seeds
  misc_feature: MA Experiment ID: 108464 Result: Up-regulated in Transcription
  misc_feature: MA Experiment 108464 PARAMETER Experiment Name: At_Germinating_Seeds_cDNA_P Parameter: Age (day) Value: 4 vs. 0
  misc_feature: MA Experiment 108464 PARAMETER Experiment Name: At_Germinating_Seeds_cDNA_P Parameter: Tissue Value: Germinating Seeds
  misc_feature: MA Experiment ID: 108469 Result: Up-regulated in Transcription
  misc_feature: MA Experiment ID: 108488 Result: Down-regulated in Transcription
  misc_feature: MA Experiment ID: 108489 Result: Down-regulated in Transcription
  misc_feature: MA Experiment ID: 108573 Result: Up-regulated in Transcription
  misc_feature: MA Experiment 108573 PARAMETER Experiment Name: At_Drought_cDNA_P Parameter: Timepoint (hr) Value: 6
  misc_feature: MA Experiment 108573 PARAMETER Experiment Name: At_Drought_cDNA_P Parameter: Tissue Value: Aerial
  misc_feature: MA Experiment 108573 PARAMETER Experiment Name: At_Drought_cDNA_P Parameter: Treatment Value: Drought vs. No Drought
  misc_feature: MA Experiment ID: 108595 Result: Up-regulated in Transcription
  misc_feature: MA Experiment 108595 PARAMETER Experiment Name: At_Ler-pi_Ovule_cDNA_P Parameter: Plant Line Value: null
  misc_feature: MA Experiment ID: 108668 Result: Up-regulated in Transcription
  misc_feature: MA Experiment 108668 PARAMETER Experiment Name: At_2mM_SA_cDNA_P Parameter: Plant Line Value: WS
  misc_feature: MA Experiment 108668 PARAMETER Experiment Name: At_2mM_SA_cDNA_P Parameter: Timepoint (hr) Value: 6
  misc_feature: MA Experiment 108668 PARAMETER Experiment Name: At_2mM_SA_cDNA_P Parameter: Treatment Value: 2mM SA vs. No Treatment
  misc_feature: MA Experiment ID: 20000069 Result: Up-regulated in Transcription
  misc_feature: MA Experiment 20000069 PARAMETER Experiment Name: At_100uM_ABA_Mutants_cDNA_P Parameter: Plant Line Value: CS23
  misc_feature: MA Experiment 20000069 PARAMETER Experiment Name: At_100uM_ABA_Mutants_cDNA_P Parameter: Timepoint (hr) Value: 6
  misc_feature: MA Experiment 20000069 PARAMETER Experiment Name: At_100uM_ABA_Mutants_cDNA_P Parameter: Tissue Value: Aerial
  misc_feature: MA Experiment 20000069 PARAMETER Experiment Name: At_100uM_ABA_Mutants_cDNA_P Parameter: Treatment Value: 100uM ABA vs. No Treatment
  misc_feature: MA Experiment ID: 20000071 Result: Up-regulated in Transcription
  misc_feature: MA Experiment 20000071 PARAMETER Experiment Name: At_100uM_ABA_Mutants_cDNA_P Parameter: Plant Line Value: CS8104
  misc_feature: MA Experiment 20000071 PARAMETER Experiment Name: At_100uM_ABA_Mutants_cDNA_P Parameter: Timepoint (hr) Value: 6
  misc_feature: MA Experiment 20000071 PARAMETER Experiment Name: At_100uM_ABA_Mutants_cDNA_P Parameter: Tissue Value: Aerial
  misc_feature: MA Experiment 20000071 PARAMETER Experiment Name: At_100uM_ABA_Mutants_cDNA_P Parameter: Treatment Value: 100uM ABA vs. No Treatment
  misc_feature: MA Experiment ID: 20000087 Result: Up-regulated in Transcription
  misc_feature: MA Experiment 20000087 PARAMETER Experiment Name: At_100uM_ABA_Mutants_cDNA_P Parameter: Plant Line Value: WS
  misc_feature: MA Experiment 20000087 PARAMETER Experiment Name: At_100uM_ABA_Mutants_cDNA_P Parameter: Timepoint (hr) Value: 6
  misc_feature: MA Experiment 20000087 PARAMETER Experiment Name: At_100uM_ABA_Mutants_cDNA_P Parameter: Tissue Value: Aerial
  misc_feature: MA Experiment 20000087 PARAMETER Experiment Name: At_100uM_ABA_Mutants_cDNA_P Parameter: Treatment Value: 100uM ABA vs. No Treatment
  misc_feature: MA Experiment ID: 20000089 Result: Down-regulated in Transcription
  misc_feature: MA Experiment ID: 20000144 Result: Down-regulated in Transcription
  misc_feature: MA Experiment 20000144 PARAMETER Experiment Name: At_42deg_Heat_cDNA_P Parameter: Temperature (deg C) Value: 42 vs. 22
  misc_feature: MA Experiment 20000144 PARAMETER Experiment Name: At_42deg_Heat_cDNA_P Parameter: Timepoint (hr) Value: 1
  misc_feature: MA Experiment 20000144 PARAMETER Experiment Name: At_42deg_Heat_cDNA_P Parameter: Tissue Value: Aerial
  misc_feature: MA Experiment ID: 20000182 Result: Up-regulated in Transcription
  misc_feature: MA Experiment 20000182 PARAMETER Experiment Name: At_2mM_SA_P Parameter: Age (day) Value: 14
  misc_feature: MA Experiment 20000182 PARAMETER Experiment Name: At_2mM_SA_P Parameter: Organism Value: A. thaliana
  misc_feature: MA Experiment 20000182 PARAMETER Experiment Name: At_2mM_SA_P Parameter: Plant Line Value: WS
  misc_feature: MA Experiment 20000182 PARAMETER Experiment Name: At_2mM_SA_P Parameter: Timepoint (hr) Value: 6
  misc_feature: MA Experiment 20000182 PARAMETER Experiment Name: At_2mM_SA_P Parameter: Tissue Value: Aerial
  misc_feature: MA Experiment 20000182 PARAMETER Experiment Name: At_2mM_SA_P Parameter: Treatment Value: 2mM SA vs. No Treatment
  misc_feature: MA Experiment ID: 20000184 Result: Down-regulated in Transcription
  misc_feature: MA Experiment 20000184 PARAMETER Experiment Name: At_Shoots__P Parameter: Age (day) Value: 7
  misc_feature: MA Experiment 20000184 PARAMETER Experiment Name: At_Shoots__P Parameter: Tissue Value: Shoots vs. Whole Plant
  misc_feature: MA Experiment ID: 20000185 Result: Down-regulated in Transcription
  misc_feature: MA Experiment 20000185 PARAMETER Experiment Name: At_Roots__P Parameter: Age (day) Value: 7 vs. 21
  misc_feature: MA Experiment 20000185 PARAMETER Experiment Name: At_Roots__P Parameter: Organism Value: A. thaliana
  misc_feature: MA Experiment 20000185 PARAMETER Experiment Name: At_Roots__P Parameter: Tissue Value: Roots vs. Whole Plant
  misc_feature: MA Experiment ID: 20000234 Result: Down-regulated in Transcription
  misc_feature: MA Experiment 20000234 PARAMETER Experiment Name: At_Siliques_P Parameter: Age (day) Value: 21
  misc_feature: MA Experiment 20000234 PARAMETER Experiment Name: At_Siliques_P Parameter: Organism Value: A. thaliana
  misc_feature: MA Experiment 20000234 PARAMETER Experiment Name: At_Siliques_P Parameter: Plant Line Value: WS
  misc_feature: MA Experiment 20000234 PARAMETER Experiment Name: At_Siliques_P Parameter: Tissue Value: Less Than 5mm Siliques vs. Whole Plant
  misc_feature: MA Experiment ID: 20000235 Result: Down-regulated in Transcription
  misc_feature: MA Experiment 20000235 PARAMETER Experiment Name: At_Siliques_P Parameter: Age (day) Value: 21
  misc_feature: MA Experiment 20000235 PARAMETER Experiment Name: At_Siliques_P Parameter: Organism Value: A. thaliana
  misc_feature: MA Experiment 20000235 PARAMETER Experiment Name: At_Siliques_P Parameter: Plant Line Value: WS
  misc_feature: MA Experiment 20000235 PARAMETER Experiment Name: At_Siliques_P Parameter: Tissue Value: 5-10mm Siliques vs. Whole Plant
  misc_feature: MA Experiment ID: 20000264 Result: Down-regulated in Transcription
  misc_feature: MA Experiment 20000264 PARAMETER Experiment Name: At_Open_Flower_P Parameter: Age (day) Value: 21
  misc_feature: MA Experiment 20000264 PARAMETER Experiment Name: At_Open_Flower_P Parameter: Plant Line Value: WS
  misc_feature: MA Experiment 20000264 PARAMETER Experiment Name: At_Open_Flower_P Parameter: Tissue Value: Open Flower vs. Whole Plant
  misc_feature: MA Experiment ID: 20000265 Result: Down-regulated in Transcription
  misc_feature: MA Experiment 20000265 PARAMETER Experiment Name: At_Open_Flower_P Parameter: Age (day) Value: 21
  misc_feature: MA Experiment 20000265 PARAMETER Experiment Name: At_Open_Flower_P Parameter: Plant Line Value: WS
  misc_feature: MA Experiment 20000265 PARAMETER Experiment Name: At_Open_Flower_P Parameter: Tissue Value: Closed Flower vs. Whole Plant
  misc_feature: MA Experiment ID: 20000267 Result: Up-regulated in Transcription
  misc_feature: MA Experiment 20000267 PARAMETER Experiment Name: At_Drought_P Parameter: Age (day) Value: 7
  misc_feature: MA Experiment 20000267 PARAMETER Experiment Name: At_Drought_P Parameter: Organism Value: A. thaliana
  misc_feature: MA Experiment 20000267 PARAMETER Experiment Name: At_Drought_P Parameter: Plant Line Value: WS
  misc_feature: MA Experiment 20000267 PARAMETER Experiment Name: At_Drought_P Parameter: Timepoint (hr) Value: 6
  misc_feature: MA Experiment 20000267 PARAMETER Experiment Name: At_Drought_P Parameter: Tissue Value: Whole Plant
  misc_feature: MA Experiment 20000267 PARAMETER Experiment Name: At_Drought_P Parameter: Treatment Value: Drought vs. No Drought
  misc_feature: MA Experiment ID: 20000286 Result: Down-regulated in Transcription
  misc_feature: MA Experiment 20000286 PARAMETER Experiment Name: At_Open_Flower_P Parameter: Age (day) Value: 21
  misc_feature: MA Experiment 20000286 PARAMETER Experiment Name: At_Open_Flower_P Parameter: Plant Line Value: WS
  misc_feature: MA Experiment 20000286 PARAMETER Experiment Name: At_Open_Flower_P Parameter: Tissue Value: Half Open vs. Whole Plant
  misc_feature: MA Experiment ID: 20000437 Result: Up-regulated in Transcription
  misc_feature: MA Experiment 20000437 PARAMETER Experiment Name: At_Drought_P Parameter: Age (day) Value: 8
  misc_feature: MA Experiment 20000437 PARAMETER Experiment Name: At_Drought_P Parameter: Organism Value: A. thaliana
  misc_feature: MA Experiment 20000437 PARAMETER Experiment Name: At_Drought_P Parameter: Plant Line Value: WS
  misc_feature: MA Experiment 20000437 PARAMETER Experiment Name: At_Drought_P Parameter: Timepoint (hr) Value: 24
  misc_feature: MA Experiment 20000437 PARAMETER Experiment Name: At_Drought_P Parameter: Tissue Value: Whole Plant
  misc_feature: MA Experiment 20000437 PARAMETER Experiment Name: At_Drought_P Parameter: Treatment Value: Drought vs. No Drought
  misc_feature: MA Experiment ID: 20000438 Result: Down-regulated in Transcription
  misc_feature: MA Experiment 20000438 PARAMETER Experiment Name: At_Shoots__P Parameter: Age (day) Value: 14
  misc_feature: MA Experiment 20000438 PARAMETER Experiment Name: At_Shoots__P Parameter: Tissue Value: Shoots vs. Whole Plant
  misc_feature: MA Experiment ID: 20000439 Result: Down-regulated in Transcription
  misc_feature: MA Experiment 20000439 PARAMETER Experiment Name: At_Roots__P Parameter: Age (day) Value: 14 vs. 21
  misc_feature: MA Experiment 20000439 PARAMETER Experiment Name: At_Roots__P Parameter: Organism Value: A. thaliana
  misc_feature: MA Experiment 20000439 PARAMETER Experiment Name: At_Roots__P Parameter: Tissue Value: Roots vs. Whole Plant
  misc_feature: MA Experiment ID: 20000441 Result: Up-regulated in Transcription
  misc_feature: MA Experiment 20000441 PARAMETER Experiment Name: At_1uM_BR-BRZ__P Parameter: Tissue Value: Shoot Apices
  misc_feature: MA Experiment 20000441 PARAMETER Experiment Name: At_1uM_BR-BRZ__P Parameter: Treatment Value: 1uM BR vs. No Treatment
  misc_feature: MA Experiment ID: 20000460 Result: Up-regulated in Transcription
  misc_feature: MA Experiment 20000460 PARAMETER Experiment Name: At_10percent_PEG_P Parameter: Age (day) Value: 12
  misc_feature: MA Experiment 20000460 PARAMETER Experiment Name: At_10percent_PEG_P Parameter: Organism Value: A. thaliana
  misc_feature: MA Experiment 20000460 PARAMETER Experiment Name: At_10percent_PEG_P Parameter: Plant Line Value: WS
  misc_feature: MA Experiment 20000460 PARAMETER Experiment Name: At_10percent_PEG_P Parameter: Timepoint (day) Value: 12
  misc_feature: MA Experiment 20000460 PARAMETER Experiment Name: At_10percent_PEG_P Parameter: Tissue Value: Whole Plant
  misc_feature: MA Experiment 20000460 PARAMETER Experiment Name: At_10percent_PEG_P Parameter: Treatment Value: 10percent PEG vs. No Treatment
  misc_feature: MA Experiment ID: 20000495 Result: Down-regulated in Transcription
  misc_feature: MA Experiment 20000495 PARAMETER Experiment Name: At_Guard_Cells_P Parameter: Harvest Date Value: 8/2/2002
  misc_feature: MA Experiment 20000495 PARAMETER Experiment Name: At_Guard_Cells_P Parameter: Organism Value: A. thaliana
  misc_feature: MA Experiment 20000495 PARAMETER Experiment Name: At_Guard_Cells_P Parameter: Tissue Value: Guard Cells vs. Leaves
  misc_feature: MA Experiment ID: 20000527 Result: Up-regulated in Transcription
  misc_feature: MA Experiment 20000527 PARAMETER Experiment Name: At_10percent_PEG_P Parameter: Age (day) Value: 20
  misc_feature: MA Experiment 20000527 PARAMETER Experiment Name: At_10percent_PEG_P Parameter: Organism Value: A. thaliana
  misc_feature: MA Experiment 20000527 PARAMETER Experiment Name: At_10percent_PEG_P Parameter: Plant Line Value: WS
  misc_feature: MA Experiment 20000527 PARAMETER Experiment Name: At_10percent_PEG_P Parameter: Timepoint (day) Value: 20
  misc_feature: MA Experiment 20000527 PARAMETER Experiment Name: At_10percent_PEG_P Parameter: Tissue Value: Whole Plant
  misc_feature: MA Experiment 20000527 PARAMETER Experiment Name: At_10percent_PEG_P Parameter: Treatment Value: 10percent PEG vs. No Treatment
  misc_feature: MA Experiment ID: 20000573 Result: Down-regulated in Transcription
  misc_feature: MA Experiment 20000573 PARAMETER Experiment Name: At_100uM_ABA_Mutants__P Parameter: Organism Value: A. thaliana
  misc_feature: MA Experiment 20000573 PARAMETER Experiment Name: At_100uM_ABA_Mutants__P Parameter: Plant Line Value: CS22 vs. Ler wt
  misc_feature: MA Experiment 20000573 PARAMETER Experiment Name: At_100uM_ABA_Mutants__P Parameter: Timepoint (hr) Value: N/A
  misc_feature: MA Experiment 20000573 PARAMETER Experiment Name: At_100uM_ABA_Mutants__P Parameter: Tissue Value: Whole Plant
  misc_feature: MA Experiment 20000573 PARAMETER Experiment Name: At_100uM_ABA_Mutants__P Parameter: Treatment Value: None
  misc_feature: MA Experiment ID: 20000574 Result: Down-regulated in Transcription
  misc_feature: MA Experiment 20000574 PARAMETER Experiment Name: At_100uM_ABA_Mutants__P Parameter: Organism Value: A. thaliana
  misc_feature: MA Experiment 20000574 PARAMETER Experiment Name: At_100uM_ABA_Mutants__P Parameter: Plant Line Value: CS23 vs. Ler wt
  misc_feature: MA Experiment 20000574 PARAMETER Experiment Name: At_100uM_ABA_Mutants__P Parameter: Timepoint (hr) Value: N/A
  misc_feature: MA Experiment 20000574 PARAMETER Experiment Name: At_100uM_ABA_Mutants__P Parameter: Tissue Value: Whole Plant
  misc_feature: MA Experiment 20000574 PARAMETER Experiment Name: At_100uM_ABA_Mutants__P Parameter: Treatment Value: None
  misc_feature: MA Experiment ID: 20000794 Result: Down-regulated in Transcription
  misc_feature: MA Experiment 20000794 PARAMETER Experiment Name: At_Petals_P Parameter: Age (day) Value: 23-25 days
  misc_feature: MA Experiment 20000794 PARAMETER Experiment Name: At_Petals_P Parameter: Plant Line Value: WS
  misc_feature: MA Experiment 20000794 PARAMETER Experiment Name: At_Petals_P Parameter: Tissue Value: Petals vs. Whole plant
  misc_feature: MA Experiment ID: 20001757 Result: Down-regulated in Transcription
  misc_feature: MA Experiment 20001757 PARAMETER Experiment Name: At_50mM_NH4NO3_L-to-H_P Parameter: Timepoint (hr) Value: 6
  misc_feature: MA Experiment 20001757 PARAMETER Experiment Name: At_50mM_NH4NO3_L-to-H_P Parameter: Tissue Value: Leaf
  misc_feature: MA Experiment 20001757 PARAMETER Experiment Name: At_50mM_NH4NO3_L-to-H_P Parameter: Treatment Value: 50mM NH4NO3 vs 100mM Mannitol
  misc_feature: MA Experiment ID: 20001905 Result: Up-regulated in Transcription
  misc_feature: MA Experiment 20001905 PARAMETER Experiment Name: At_Drought_Reproduction_P Parameter: Age (day) Value: 40
  misc_feature: MA Experiment 20001905 PARAMETER Experiment Name: At_Drought_Reproduction_P Parameter: Organism Value: A. thaliana
  misc_feature: MA Experiment 20001905 PARAMETER Experiment Name: At_Drought_Reproduction_P Parameter: Plant Line Value: WS
  misc_feature: MA Experiment 20001905 PARAMETER Experiment Name: At_Drought_Reproduction_P Parameter: Timepoint (day) Value: 10
  misc_feature: MA Experiment 20001905 PARAMETER Experiment Name: At_Drought_Reproduction_P Parameter: Tissue Value: Rosettes
  misc_feature: MA Experiment 20001905 PARAMETER Experiment Name: At_Drought_Reproduction_P Parameter: Treatment Value: Drought vs. No Drought
  misc_feature: MA Experiment ID: 20001911 Result: Up-regulated in Transcription
  misc_feature: MA Experiment 20001911 PARAMETER Experiment Name: At_Drought_Reproduction_P Parameter: Age (day) Value: 40
  misc_feature: MA Experiment 20001911 PARAMETER Experiment Name: At_Drought_Reproduction_P Parameter: Organism Value: A. thaliana
  misc_feature: MA Experiment 20001911 PARAMETER Experiment Name: At_Drought_Reproduction_P Parameter: Plant Line Value: WS
  misc_feature: MA Experiment 20001911 PARAMETER Experiment Name: At_Drought_Reproduction_P Parameter: Timepoint (day) Value: 10
  misc_feature: MA Experiment 20001911 PARAMETER Experiment Name: At_Drought_Reproduction_P Parameter: Tissue Value: Flowers
  misc_feature: MA Experiment 20001911 PARAMETER Experiment Name: At_Drought_Reproduction_P Parameter: Treatment Value: Drought vs. No Drought
ataacaaactcatcaaacttcctcagcgtttctttttcttacataaacaatttttcttacataaacaaatcttgttgtttgttgttgtcatggcaccgacagttaaaacggcggccgtcaaaaccaacgaaggtaacggagtccgttacagaggagtgaggaagagaccatggggacgttacgcagccgagatcagagatcctttcaagaagtcacgtgtctggctcggtactttcgacactcctgaagaagccgctcgtgcctacgacaaacgtgctattgagtttcgtggagctaaagccaaaaccaacttcccttgttacaacatcaacgcccactgcttgagtttgacacagagcctgagccagagcagcaccgtggaatcatcgtttcctaatctcaacctcggatctgactctgttagttcgagattcccttttcctaagattcaggttaaggctgggatgatggtgttcgatgaaaggagtgaatcggattcttcgtcggtggtgatggatgtcgttagatatgaaggacgacgtgtggttttggacttggatcttaatttccctcctccacctgagaactgattaagatttaattatgattattagatataattaaatgtttctgaattgagtattatttgatcatcatctaagtagaagctttaagtttaagtggtgccaataatttttttttttttttttggtcatcagcagatagttttaaagaattttttagtgttgagatcgtgtttcgttcagatctgctgatgttcttttaaatatcattaatgataatcctgatcaactaaaatgatactttgtt

SEQ ID NO: 84565 - protein, 195 aa, Arabidopsis thaliana
  peptide (1)..(195): Ceres Seq. ID no. 12675784
  misc_feature (46)..(110): Pfam Name: AP2 domain Pfam Description: AP2 domain
  misc_feature (1)..(195): Homolog of NCBI NO: 25403338 NR Description: protein F3M18.20 [imported] - Arabidopsis >gi|6560756|gb|AAF16756.1|AC010155_9 F3M18.20 [Arabidopsis
  misc_feature (30)..(195): Homolog of NCBI NO: 15218649 NR Description: ethylene-responsive element binding factor protein id: At1g28370.1, supported by cDNA: 27635., supported by gi_13430639 [Arabidopsis thaliana]
  misc_feature (30)..(154): Homolog of NCBI NO: 15232526 NR Description: ethylene responsive element binding factor 4 protein id: At3g15210.1, supported by cDNA: 22775., supported by gi_2281634, supported by cDNA: gi_3434972 [Arabidopsis thaliana]
  misc_feature (140)..(194): Homolog of NCBI NO: 15232526 NR Description: ethylene responsive element binding factor 4 protein id: At3g15210.1, supported by cDNA: 22775., supported by gi_2281634, supported by cDNA: gi_3434972 [Arabidopsis thaliana]
  misc_feature (30)..(129): Homolog of NCBI NO: 4099921 NR Description: EREBP-3 homolog [Stylosanthes hamata]
  misc_feature (30)..(129): Homolog of NCBI NO: 4099914 NR Description: ethylene-responsive element binding protein
  misc_feature (42)..(131): Homolog of NCBI NO: 20340233 NR Description: ethylene responsive element binding factor 4-like
  misc_feature (30)..(154): Homolog of NCBI NO: 2281635 NR Description: AP2 domain containing protein RAP2.5 [Arabidopsis
  misc_feature (34)..(129): Homolog of NCBI NO: 8809573 NR Description: ethylene-responsive element binding factor
  misc_feature (30)..(194): Homolog of NCBI NO: 15219215 NR Description: ethylene responsive element binding factor 8; id: At1g53170.1, supported by cDNA: gi_10567107 [Arabidopsis
NKLIKLPQRFFFLHKQFFLHKQILLFVVVMAPTVKTAAVKTNEGNGVRYRGVRKRPWGRYAAEIRDPFKKSRVWLGTFDTPEEAARAYDKRAIEFRGAKAKTNFPCYNINAHCLSLTQSLSQSSTVESSFPNLNLGSDSVSSRFPFPKIQVKAGMMVFDERSESDSSSVVMDVVRYEGRRVVLDLDLNFPPPPEN

SEQ ID NO: 84566 - protein, 166 aa, Arabidopsis thaliana; identical to SEQ ID NO: 20881
  peptide (1)..(166): Ceres Seq. ID no. 12675785
  misc_feature (17)..(81): Pfam Name: AP2 domain Pfam Description: AP2 domain
  misc_feature (1)..(166): Homolog of NCBI NO: 25403338 NR Description: protein F3M18.20 [imported] - Arabidopsis >gi|6560756|gb|AAF16756.1|AC010155_9 F3M18.20 [Arabidopsis
  misc_feature (1)..(166): Homolog of NCBI NO: 15218649 NR Description: ethylene-responsive element binding factor protein id: At1g28370.1, supported by cDNA: 27635., supported by gi_13430639 [Arabidopsis thaliana]
  misc_feature (1)..(125): Homolog of NCBI NO: 15232526 NR Description: ethylene responsive element binding factor 4 protein id: At3g15210.1, supported by cDNA: 22775., supported by gi_2281634, supported by cDNA: gi_3434972 [Arabidopsis thaliana]
  misc_feature (111)..(165): Homolog of NCBI NO: 15232526 NR Description: ethylene responsive element binding factor 4 protein id: At3g15210.1, supported by cDNA: 22775., supported by gi_2281634, supported by cDNA: gi_3434972 [Arabidopsis thaliana]
  misc_feature (1)..(100): Homolog of NCBI NO: 4099921 NR Description: EREBP-3 homolog [Stylosanthes hamata]
  misc_feature (1)..(100): Homolog of NCBI NO: 4099914 NR Description: ethylene-responsive element binding protein
  misc_feature (13)..(102): Homolog of NCBI NO: 20340233 NR Description: ethylene responsive element binding factor 4-like
  misc_feature (1)..(125): Homolog of NCBI NO: 2281635 NR Description: AP2 domain containing protein RAP2.5 [Arabidopsis
  misc_feature (5)..(100): Homolog of NCBI NO: 8809573 NR Description: ethylene-responsive element binding factor
  misc_feature (1)..(165): Homolog of NCBI NO: 15219215 NR Description: ethylene responsive element binding factor 8; id: At1g53170.1, supported by cDNA: gi_10567107 [Arabidopsis

SEQ ID NO: 84567 - DNA, 1530 bp, Arabidopsis thaliana
  misc_feature (1)..(1530): Ceres Seq. ID no. 12675796
  misc_feature: MA Experiment ID: 20000173 Result: Up-regulated in Transcription
  misc_feature: MA Experiment 20000173 PARAMETER Experiment Name: At_42deg_Heat_P Parameter: Age (day) Value: 14
  misc_feature: MA Experiment 20000173 PARAMETER Experiment Name: At_42deg_Heat_P Parameter: Organism Value: A. thaliana
  misc_feature: MA Experiment 20000173 PARAMETER Experiment Name: At_42deg_Heat_P Parameter: Plant Line Value: WS
  misc_feature: MA Experiment 20000173 PARAMETER Experiment Name: At_42deg_Heat_P Parameter: Temperature (deg C) Value: 42 vs. 22
  misc_feature: MA Experiment 20000173 PARAMETER Experiment Name: At_42deg_Heat_P Parameter: Timepoint (hr) Value: 6
  misc_feature: MA Experiment 20000173 PARAMETER Experiment Name: At_42deg_Heat_P Parameter: Tissue Value: Aerial
  misc_feature: MA Experiment ID: 20000179 Result: Down-regulated in Transcription
  misc_feature: MA Experiment 20000179 PARAMETER Experiment Name: At_Germinating_Seeds_P Parameter: Age (hr) Value: 6 vs. 0
  misc_feature: MA Experiment 20000179 PARAMETER Experiment Name: At_Germinating_Seeds_P Parameter: Tissue Value: Germinating Seeds
  misc_feature: MA Experiment ID: 20000180 Result: Down-regulated in Transcription
  misc_feature: MA Experiment 20000180 PARAMETER Experiment Name: At_Germinating_Seeds_P Parameter: Age (hr) Value: 24 vs. 0
  misc_feature: MA Experiment 20000180 PARAMETER Experiment Name: At_Germinating_Seeds_P Parameter: Tissue Value: Germinating Seeds
ttcttcttcttatttcttctataccgtcgtcgaaaagctttaccaaaatctcacgcccccgacgattcatcgtttcatagggatttgagtttgcactaaacccacaatggtttcctatcgtgctaccacagagacgatttccctggctttagaagccaacagctcggaggctattacgatactgtaccaggttttggaagacccttcttcatctcctgaggctatacggatcaaggagcaagcgattacaaacctttgtgatcgattgactgaagagaagagaggtgaggatctccggaaactgttgaccaagttgaggcctttcttttccttaatccccaaggcgaaaactgcgaaaatcgtcagaggaatcattgatgctgtggcaaagattcctggaacaactgatctccagatcactctctgcaaagagatggtcgaatggacccgcgctgagaagcgtactttcctcaggcagcgagtagaggctaggcttgcagctcttttgatggagaacaaggagtatgttgaagctttggcgttgttgagtactttggtaaaagaggttaggagattagatgataagctccttctggtcgacatagacttgctggagagcaaacttcacttctcattgagaaacttacccaaggcaaaagctgcactcactgcagctaggacagctgctaacgctatatatgtcccaccagctcaacaaggcacgatagatctgcagagtgggattcttcatgctgaagagaaagactacaaaaccggatacagttacttctttgaagcctttgagtccttcaacgctctcggagatccgagagcggttttcagtttgaagtacatgttactgtgcaagatcatggttagccaagctgatgatgttgcaggaataatctcctcaaaggctggactacagtacgttggccctgacctggatgccatgaaagcagtcgctgatgctcactcgaagaggtccttgaagttgtttgagaacgcactccgtgactacaaagcacagcttgaagatgacccaattgtccacaggcatctctcttctctctatgacacgcttctggagcaaaatctgtgtcgtttgatcgagcccttctcaagagttgagatagctcacattgctgagctcattggattgccgctcgaccatgtggaaaagaagctatctcagatgatactcgacaagaaatttgcaggtaccttggatcaaggagctggatgcctcatcatcttcgaagacccaaaggcagatgctatctactcggctaccctcgaaaccattgcaaacatggggaaggtcgtcgacagcctttatgtccggtctgccaaaatcatgtcctgagagagtgagtgagttggtcgtatgaatctcattctatcgttctttctttctggttttagatatcgtttggactcaaagaaactgatgtttctcaatggagaaagtaaacttgtctgaattgttcacattactcgttttgcttatgatcttattatgtcatggtt

SEQ ID NO: 84568 - protein, 419 aa, Arabidopsis thaliana
  peptide (1)..(419): Ceres Seq. ID no. 12675797
  misc_feature (281)..(385): Pfam Name: PCI domain Pfam Description: PCI domain
  misc_feature (1)..(419): Homolog of NCBI NO: 15218845 NR Description: 26S proteasome regulatory subunit (RPN6), protein id: At1g29150.1, supported by cDNA: 39755., supported by gi_15810544, supported by cDNA: gi_3450888 [Arabidopsis thaliana]
  misc_feature (1)..(412): Homolog of NCBI NO: 25332510 NR Description: 19S proteosome subunit 9 [imported] - Arabidopsis >gi|3450889|gb|AAC34120.1| 19S proteosome subunit 9 [Arabidopsis
  misc_feature (6)..(419): Homolog of NCBI NO: 38344536 NR Description: OSJNBa0027P08.4 [Oryza sativa (japonica
  misc_feature (110)..(419): Homolog of NCBI NO: 38093742 NR Description: putative proteosome subunit [Oryza sativa
  misc_feature (12)..(417): Homolog of NCBI NO: 17137740 NR Description: Proteasome p44.5 subunit CG10149-PB [Drosophila
  misc_feature (15)..(417): Homolog of NCBI NO: 26342168 NR Description: unnamed protein product [Mus musculus]
  misc_feature (15)..(417): Homolog of NCBI NO: 33585718 NR Description: Unknown (protein for IMAGE:3964625) [Mus musculus]
  misc_feature (15)..(417): Homolog of NCBI NO: 2150046 NR Description: 26S proteasome subunit 9 [Homo sapiens]
  misc_feature (15)..(417): Homolog of NCBI NO: 28872725 NR Description: proteasome 26S non-ATPase subunit 11; 26S regulatory subunit 9 [Homo sapiens]
  misc_feature (15)..(417): Homolog of NCBI NO: 34872897 NR Description: similar to 26S proteasome non-ATPase regulatory
MVSYRATTETISLALEANSSEAITILYQVLEDPSSSPEAIRIKEQAITNLCDRLTEEKRGEDLRKLLTKLRPFFSLIPKAKTAKIVRGIIDAVAKIPGTTDLQITLCKEMVEWTRAEKRTFLRQRVEARLAALLMENKEYVEALALLSTLVKEVRRLDDKLLLVDIDLLESKLHFSLRNLPKAKAALTAARTAANAIYVPPAQQGTIDLQSGILHAEEKDYKTGYSYFFEAFESFNALGDPRAVFSLKYMLLCKIMVSQADDVAGIISSKAGLQYVGPDLDAMKAVADAHSKRSLKLFENALRDYKAQLEDDPIVHRHLSSLYDTLLEQNLCRLIEPFSRVEIAHIAELIGLPLDHVEKKLSQMILDKKFAGTLDQGAGCLIIFEDPKADAIYSATLETIANMGKVVDSLYVRSAKIMS

SEQ ID NO: 84569 - protein, 310 aa, Arabidopsis thaliana
  peptide (1)..(310): Ceres Seq. ID no. 12675798
  misc_feature (172)..(276): Pfam Name: PCI domain Pfam Description: PCI domain
  misc_feature (1)..(310): Homolog of NCBI NO: 15218845 NR Description: 26S proteasome regulatory subunit (RPN6), protein id: At1g29150.1, supported by cDNA: 39755., supported by gi_15810544, supported by cDNA: gi_3450888 [Arabidopsis thaliana]
  misc_feature (1)..(303): Homolog of NCBI NO: 25332510 NR Description: 19S proteosome subunit 9 [imported] - Arabidopsis >gi|3450889|gb|AAC34120.1| 19S proteosome subunit 9 [Arabidopsis
  misc_feature (1)..(310): Homolog of NCBI NO: 38344536 NR Description: OSJNBa0027P08.4 [Oryza sativa (japonica
  misc_feature (1)..(310): Homolog of NCBI NO: 38093742 NR Description: putative proteosome subunit [Oryza sativa
  misc_feature (1)..(308): Homolog of NCBI NO: 17137740 NR Description: Proteasome p44.5 subunit CG10149-PB [Drosophila
  misc_feature (1)..(308): Homolog of NCBI NO: 26342168 NR Description: unnamed protein product [Mus musculus]
  misc_feature (1)..(308): Homolog of NCBI NO: 33585718 NR Description: Unknown (protein for IMAGE:3964625) [Mus musculus]
  misc_feature (1)..(308): Homolog of NCBI NO: 2150046 NR Description: 26S proteasome subunit 9 [Homo sapiens]
  misc_feature (1)..(308): Homolog of NCBI NO: 28872725 NR Description: proteasome 26S non-ATPase subunit 11; 26S regulatory subunit 9 [Homo sapiens]
  misc_feature (1)..(308): Homolog of NCBI NO: 34872897 NR Description: similar to 26S proteasome non-ATPase regulatory
MVEWTRAEKRTFLRQRVEARLAALLMENKEYVEALALLSTLVKEVRRLDDKLLLVDIDLLESKLHFSLRNLPKAKAALTAARTAANAIYVPPAQQGTIDLQSGILHAEEKDYKTGYSYFFEAFESFNALGDPRAVFSLKYMLLCKIMVSQADDVAGIISSKAGLQYVGPDLDAMKAVADAHSKRSLKLFENALRDYKAQLEDDPIVHRHLSSLYDTLLEQNLCRLIEPFSRVEIAHIAELIGLPLDHVEKKLSQMILDKKFAGTLDQGAGCLIIFEDPKADAIYSATLETIANMGKVVDSLYVRSAKIMS

SEQ ID NO: 84570 - protein, 285 aa, Arabidopsis thaliana
  peptide (1)..(285): Ceres Seq. ID no. 12675799
  misc_feature (147)..(251): Pfam Name: PCI domain Pfam Description: PCI domain
  misc_feature (1)..(285): Homolog of NCBI NO: 15218845 NR Description: 26S proteasome regulatory subunit (RPN6), protein id: At1g29150.1, supported by cDNA: 39755., supported by gi_15810544, supported by cDNA: gi_3450888 [Arabidopsis thaliana]
  misc_feature (1)..(278): Homolog of NCBI NO: 25332510 NR Description: 19S proteosome subunit 9 [imported] - Arabidopsis >gi|3450889|gb|AAC34120.1| 19S proteosome subunit 9 [Arabidopsis
  misc_feature (1)..(285): Homolog of NCBI NO: 38344536 NR Description: OSJNBa0027P08.4 [Oryza sativa (japonica
  misc_feature (1)..(285): Homolog of NCBI NO: 38093742 NR Description: putative proteosome subunit [Oryza sativa
  misc_feature (1)..(283): Homolog of NCBI NO: 17137740 NR Description: Proteasome p44.5 subunit CG10149-PB [Drosophila
  misc_feature (1)..(283): Homolog of NCBI NO: 26342168 NR Description: unnamed protein product [Mus musculus]
  misc_feature (1)..(283): Homolog of NCBI NO: 33585718 NR Description: Unknown (protein for IMAGE:3964625) [Mus musculus]
  misc_feature (1)..(283): Homolog of NCBI NO: 2150046 NR Description: 26S proteasome subunit 9 [Homo sapiens]
  misc_feature (1)..(283): Homolog of NCBI NO: 28872725 NR Description: proteasome 26S non-ATPase subunit 11; 26S regulatory subunit 9 [Homo sapiens]
  misc_feature (1)..(283): Homolog of NCBI NO: 34872897 NR Description: similar to 26S proteasome non-ATPase regulatory
MENKEYVEALALLSTLVKEVRRLDDKLLLVDIDLLESKLHFSLRNLPKAKAALTAARTAANAIYVPPAQQGTIDLQSGILHAEEKDYKTGYSYFFEAFESFNALGDPRAVFSLKYMLLCKIMVSQADDVAGIISSKAGLQYVGPDLDAMKAVADAHSKRSLKLFENALRDYKAQLEDDPIVHRHLSSLYDTLLEQNLCRLIEPFSRVEIAHIAELIGLPLDHVEKKLSQMILDKKFAGTLDQGAGCLIIFEDPKADAIYSATLETIANMGKVVDSLYVRSAKIMS

SEQ ID NO: 84571 - DNA, 1483 bp, Arabidopsis thaliana
  misc_feature (1)..(1483): Ceres Seq. ID no. 12675804
  misc_feature: MA Experiment ID: 108577 Result: Up-regulated in Transcription
  misc_feature: MA Experiment 108577 PARAMETER Experiment Name: At_42deg_Heat_cDNA_P Parameter: Temperature (deg C) Value: 42 vs. 22
  misc_feature: MA Experiment 108577 PARAMETER Experiment Name: At_42deg_Heat_cDNA_P Parameter: Timepoint (hr) Value: 6
  misc_feature: MA Experiment 108577 PARAMETER Experiment Name: At_42deg_Heat_cDNA_P Parameter: Tissue Value: Aerial
  misc_feature: MA Experiment ID: 20000144 Result: Up-regulated in Transcription
  misc_feature: MA Experiment 20000144 PARAMETER Experiment Name: At_42deg_Heat_cDNA_P Parameter: Temperature (deg C) Value: 42 vs. 22
  misc_feature: MA Experiment 20000144 PARAMETER Experiment Name: At_42deg_Heat_cDNA_P Parameter: Timepoint (hr) Value: 1
  misc_feature: MA Experiment 20000144 PARAMETER Experiment Name: At_42deg_Heat_cDNA_P Parameter: Tissue Value: Aerial
acttgagtttcgtcttccattcctgttttttttcagagaccggcaaaataaaaaaaaagaagatcgtacaactaaaaatacctcaaagaaggaagatacaaaagtagtaacctttgttggtgattgatactatatctgttgtgggttttagacaaagaccacgtctttgcagttgtagattggaattttccggatctttctctaaatcgctttttctccgagcaacttttgtttggggttaagctcaaagaatccgttcttttcagtctttactccatctagggtaccacgattggatcggtttttatctgatgatttagtaacagagattttgaagaaaaagaaaaatgggagatactagtccaagaacatcagtctcaacagatggagacactgatcataataacctaatgttcgatgaagggcatttgggtatcggtgcttctgattctagtgaccgttcaaagagtaaaatggatcaaaagacgcttcgtaggctcgctcaaaaccgtgaggctgcaaggaaaagcagattgaggaagaaagcatatgttcagcagctagagaacagtcgattgaagctaacacaacttgagcaggagctacaaagagcacggcaacagggtgtctttatctcaagctctggagaccaagcccattctaccgctggagatggggcaatggcatttgatgtagaatacagacgatggcaggaagataaaaacagacagatgaaggagctgagttctgctatagattctcacgcgactgattctgagcttcggataattgtagatggagtaatagctcactatgaggagctttacaggataaaaggcaacgcagctaagagtgatgtcttccatttattatcagggatgtggaaaaccccagctgagagatgtttcttgtggctcggcggtttccgttcatcagaacttctcaagcgagtcagttggagcccttgacagaacaacaatcgctagacataaataacttgcaacagtcttctcagcaagcagaagatgctttgtctcaagggatggacaacttacagcaatcactcgctgatactttatcgagtgggactctcggttcaagttcatcagggaatgtagctagctacatgggtcagatggccatggcgatggggaagttaggtacccttgaaggatttatccgccaggctgataacttaaggctacaaacatatcaacagatggtgagactattaacaacccgacaatcggctcgtgctctccttgcagtacacaattatacattgcggttacgtgctcttagctctctatggcttgccagaccaagagagtgaaccatgactctattatacttcaacgaaggtccagaaaatttgagattcttagcataagatttgacgactttagacacgtagctcgtatacaagattatgattatactgttttgtgttgtaatgtttgtgtgtaatgaatgtatcttgaaa

SEQ ID NO: 84572 - protein, 206 aa, Arabidopsis thaliana; identical to SEQ ID NO: 42265
  peptide (1)..(206): Ceres Seq. ID no. 12675805
  misc_feature (42)..(105): Pfam Name: bZIP transcription factor Pfam Description: bZIP transcription factor
  misc_feature (1)..(203): Homolog of NCBI NO: 15240217 NR Description: bZIP transcription factor, OBF5; protein id:
  misc_feature (7)..(203): Homolog of NCBI NO: 1076423 NR Description: transcription factor OBF5 - Arabidopsis thaliana
  misc_feature (1)..(200): Homolog of NCBI NO: 30682117 NR Description: bZIP transcription factor, TGA6 [Arabidopsis
  misc_feature (1)..(200): Homolog of NCBI NO: 15240216 NR Description: bZIP transcription factor, HBP-1b homolog; id: At5g06950.1, supported by cDNA: gi_217826 [Arabidopsis
  misc_feature (15)..(200): Homolog of NCBI NO: 15795146 NR Description: leucine zipper transcription factor HBP-1b
  misc_feature (15)..(200): Homolog of NCBI NO: 903688 NR Description: leucine zipper
  misc_feature (1)..(200): Homolog of NCBI NO: 15148924 NR Description: TGA-type basic leucine zipper protein TGA2.1
  misc_feature (1)..(200): Homolog of NCBI NO: 17025924 NR Description: bZIP transcription factor [Oryza sativa]
  misc_feature (1)..(200): Homolog of NCBI NO: 34909110 NR Description: putative transcription factor HBP-1b [Oryza
  misc_feature (1)..(200): Homolog of NCBI NO: 422029 NR Description: transcription factor OBF3.2 - maize

SEQ ID NO: 84573 - protein, 185 aa, Arabidopsis thaliana; identical to SEQ ID NO: 42266
  peptide (1)..(185): Ceres Seq. ID no. 12675806
  misc_feature (21)..(84): Pfam Name: bZIP transcription factor Pfam Description: bZIP transcription factor
  misc_feature (1)..(182): Homolog of NCBI NO: 15240217 NR Description: bZIP transcription factor, OBF5; protein id:
  misc_feature (1)..(182): Homolog of NCBI NO: 1076423 NR Description: transcription factor OBF5 - Arabidopsis thaliana
  misc_feature (1)..(179): Homolog of NCBI NO: 30682117 NR Description: bZIP transcription factor, TGA6 [Arabidopsis
  misc_feature (1)..(179): Homolog of NCBI NO: 15240216 NR Description: bZIP transcription factor, HBP-1b homolog; id: At5g06950.1, supported by cDNA: gi_217826 [Arabidopsis
  misc_feature (1)..(179): Homolog of NCBI NO: 15795146 NR Description: leucine zipper transcription factor HBP-1b
  misc_feature (1)..(179): Homolog of NCBI NO: 903688 NR Description: leucine zipper
  misc_feature (1)..(179): Homolog of NCBI NO: 15148924 NR Description: TGA-type basic leucine zipper protein TGA2.1
  misc_feature (1)..(179): Homolog of NCBI NO: 17025924 NR Description: bZIP transcription factor [Oryza sativa]
  misc_feature (1)..(179): Homolog of NCBI NO: 34909110 NR Description: putative transcription factor HBP-1b [Oryza
  misc_feature (1)..(179): Homolog of NCBI NO: 422029 NR Description: transcription factor OBF3.2 - maize

SEQ ID NO: 84574 - protein, 164 aa, Arabidopsis thaliana; identical to SEQ ID NO: 42267
  peptide (1)..(164): Ceres Seq. ID no. 12675807
  misc_feature (1)..(63): Pfam Name: bZIP transcription factor Pfam Description: bZIP transcription factor
  misc_feature (1)..(161): Homolog of NCBI NO: 15240217 NR Description: bZIP transcription factor, OBF5; protein id:
  misc_feature (1)..(161): Homolog of NCBI NO: 1076423 NR Description: transcription factor OBF5 - Arabidopsis thaliana
  misc_feature (1)..(158): Homolog of NCBI NO: 30682117 NR Description: bZIP transcription factor, TGA6 [Arabidopsis
  misc_feature (1)..(158): Homolog of NCBI NO: 15240216 NR Description: bZIP transcription factor, HBP-1b homolog; id: At5g06950.1, supported by cDNA: gi_217826 [Arabidopsis
  misc_feature (1)..(158): Homolog of NCBI NO: 15795146 NR Description: leucine zipper transcription factor HBP-1b
  misc_feature (1)..(158): Homolog of NCBI NO: 903688 NR Description: leucine zipper
  misc_feature (1)..(158): Homolog of NCBI NO: 15148924 NR Description: TGA-type basic leucine zipper protein TGA2.1
  misc_feature (1)..(158): Homolog of NCBI NO: 17025924 NR Description: bZIP transcription factor [Oryza sativa]
  misc_feature (1)..(158): Homolog of NCBI NO: 34909110 NR Description: putative transcription factor HBP-1b [Oryza
  misc_feature (1)..(158): Homolog of NCBI NO: 422029 NR Description: transcription factor OBF3.2 - maize

SEQ ID NO: 84575 - DNA, 1684 bp, Arabidopsis thaliana
  misc_feature (1)..(1684): Ceres Seq. ID no. 12675808
  misc_feature: MA Experiment ID: 20000173 Result: Down-regulated in Transcription
  misc_feature: MA Experiment 20000173 PARAMETER Experiment Name: At_42deg_Heat_P Parameter: Age (day) Value: 14
  misc_feature: MA Experiment 20000173 PARAMETER Experiment Name: At_42deg_Heat_P Parameter: Organism Value: A. thaliana
  misc_feature: MA Experiment 20000173 PARAMETER Experiment Name: At_42deg_Heat_P Parameter: Plant Line Value: WS
  misc_feature: MA Experiment 20000173 PARAMETER Experiment Name: At_42deg_Heat_P Parameter: Temperature (deg C) Value: 42 vs. 22
  misc_feature: MA Experiment 20000173 PARAMETER Experiment Name: At_42deg_Heat_P Parameter: Timepoint (hr) Value: 6
  misc_feature: MA Experiment 20000173 PARAMETER Experiment Name: At_42deg_Heat_P Parameter: Tissue Value: Aerial
  misc_feature: MA Experiment ID: 20000182 Result: Up-regulated in Transcription
  misc_feature: MA Experiment 20000182 PARAMETER Experiment Name: At_2mM_SA_P Parameter: Age (day) Value: 14
  misc_feature: MA Experiment 20000182 PARAMETER Experiment Name: At_2mM_SA_P Parameter: Organism Value: A. thaliana
  misc_feature: MA Experiment 20000182 PARAMETER Experiment Name: At_2mM_SA_P Parameter: Plant Line Value: WS
  misc_feature: MA Experiment 20000182 PARAMETER Experiment Name: At_2mM_SA_P Parameter: Timepoint (hr) Value: 6
  misc_feature: MA Experiment 20000182 PARAMETER Experiment Name: At_2mM_SA_P Parameter: Tissue Value: Aerial
  misc_feature: MA Experiment 20000182 PARAMETER Experiment Name: At_2mM_SA_P Parameter: Treatment Value: 2mM SA vs. No Treatment
  misc_feature: MA Experiment ID: 20000185 Result: Up-regulated in Transcription
  misc_feature: MA Experiment 20000185 PARAMETER Experiment Name: At_Roots__P Parameter: Age (day) Value: 7 vs. 21
  misc_feature: MA Experiment 20000185 PARAMETER Experiment Name: At_Roots__P Parameter: Organism Value: A. thaliana
  misc_feature: MA Experiment 20000185 PARAMETER Experiment Name: At_Roots__P Parameter: Tissue Value: Roots vs. Whole Plant
  misc_feature: MA Experiment ID: 20000234 Result: Down-regulated in Transcription
  misc_feature: MA Experiment 20000234 PARAMETER Experiment Name: At_Siliques_P Parameter: Age (day) Value: 21
  misc_feature: MA Experiment 20000234 PARAMETER Experiment Name: At_Siliques_P Parameter: Organism Value: A. thaliana
  misc_feature: MA Experiment 20000234 PARAMETER Experiment Name: At_Siliques_P Parameter: Plant Line Value: WS
  misc_feature: MA Experiment 20000234 PARAMETER Experiment Name: At_Siliques_P Parameter: Tissue Value: Less Than 5mm Siliques vs. Whole Plant
  misc_feature: MA Experiment ID: 20000264 Result: Down-regulated in Transcription
  misc_feature: MA Experiment 20000264 PARAMETER Experiment Name: At_Open_Flower_P Parameter: Age (day) Value: 21
  misc_feature: MA Experiment 20000264 PARAMETER Experiment Name: At_Open_Flower_P Parameter: Plant Line Value: WS
  misc_feature: MA Experiment 20000264 PARAMETER Experiment Name: At_Open_Flower_P Parameter: Tissue Value: Open Flower vs. Whole Plant
  misc_feature: MA Experiment ID: 20000265 Result: Down-regulated in Transcription
  misc_feature: MA Experiment 20000265 PARAMETER Experiment Name: At_Open_Flower_P Parameter: Age (day) Value: 21
  misc_feature: MA Experiment 20000265 PARAMETER Experiment Name: At_Open_Flower_P Parameter: Plant Line Value: WS
  misc_feature: MA Experiment 20000265 PARAMETER Experiment Name: At_Open_Flower_P Parameter: Tissue Value: Closed Flower vs. Whole Plant
  misc_feature: MA Experiment ID: 20000439 Result: Up-regulated in Transcription
  misc_feature: MA Experiment 20000439 PARAMETER Experiment Name: At_Roots__P Parameter: Age (day) Value: 14 vs. 21
  misc_feature: MA Experiment 20000439 PARAMETER Experiment Name: At_Roots__P Parameter: Organism Value: A. thaliana
  misc_feature: MA Experiment 20000439 PARAMETER Experiment Name: At_Roots__P Parameter: Tissue Value: Roots vs. Whole Plant
  misc_feature: MA Experiment ID: 20000453 Result: Up-regulated in Transcription
  misc_feature: MA Experiment 20000453 PARAMETER Experiment Name: At_100uM_ABA_P Parameter: Age (day) Value: 15
  misc_feature: MA Experiment 20000453 PARAMETER Experiment Name: At_100uM_ABA_P Parameter: Organism Value: A. thaliana
  misc_feature: MA Experiment 20000453 PARAMETER Experiment Name: At_100uM_ABA_P Parameter: Plant Line Value: WS
  misc_feature: MA Experiment 20000453 PARAMETER Experiment Name: At_100uM_ABA_P Parameter: Timepoint (hr) Value: 24
  misc_feature: MA Experiment 20000453 PARAMETER Experiment Name: At_100uM_ABA_P Parameter: Tissue Value: Aerial
  misc_feature: MA Experiment 20000453 PARAMETER Experiment Name: At_100uM_ABA_P Parameter: Treatment Value: 100uM ABA vs. No Treatment
  misc_feature: MA Experiment ID: 20000709 Result: Up-regulated in Transcription
  misc_feature: MA Experiment 20000709 PARAMETER Experiment Name: At_15mM_NH4NO3_L-to-H_P Parameter: Age (hr) Value: 14
  misc_feature: MA Experiment 20000709 PARAMETER Experiment Name: At_15mM_NH4NO3_L-to-H_P Parameter: Organism Value: A. thaliana
  misc_feature: MA Experiment 20000709 PARAMETER Experiment Name: At_15mM_NH4NO3_L-to-H_P Parameter: Plant Line Value: WS
  misc_feature: MA Experiment 20000709 PARAMETER Experiment Name: At_15mM_NH4NO3_L-to-H_P Parameter: Timepoint (hr) Value: 4
  misc_feature: MA Experiment 20000709 PARAMETER Experiment Name: At_15mM_NH4NO3_L-to-H_P Parameter: Tissue Value: Aerial
  misc_feature: MA Experiment 20000709 PARAMETER Experiment Name: At_15mM_NH4NO3_L-to-H_P Parameter: Treatment Value: 15mM NH4NO3 vs. 30mM Mannitol
  misc_feature: MA Experiment ID: 20001247 Result: Up-regulated in Transcription
  misc_feature: MA Experiment 20001247 PARAMETER Experiment Name: At_Far-red-induction_P Parameter: Age (day) Value: 7
  misc_feature: MA Experiment 20001247 PARAMETER Experiment Name: At_Far-red-induction_P Parameter: Light Value: Far-red vs. White
  misc_feature: MA Experiment 20001247 PARAMETER Experiment Name: At_Far-red-induction_P Parameter: Organism Value: A. thaliana
  misc_feature: MA Experiment 20001247 PARAMETER Experiment Name: At_Far-red-induction_P Parameter: Plant Line Value: Columbia
  misc_feature: MA Experiment 20001247 PARAMETER Experiment Name: At_Far-red-induction_P Parameter: Timepoint (hr) Value: 1
  misc_feature: MA Experiment 20001247 PARAMETER Experiment Name: At_Far-red-induction_P Parameter: Tissue Value: Whole Plant
  misc_feature: MA Experiment ID: 20001248 Result: Up-regulated in Transcription
  misc_feature: MA Experiment 20001248 PARAMETER Experiment Name: At_Far-red-induction_P Parameter: Age (day) Value: 7
  misc_feature: MA Experiment 20001248 PARAMETER Experiment Name: At_Far-red-induction_P Parameter: Light Value: Far-red vs. White
  misc_feature: MA Experiment 20001248 PARAMETER Experiment Name: At_Far-red-induction_P Parameter: Organism Value: A. thaliana
  misc_feature: MA Experiment 20001248 PARAMETER Experiment Name: At_Far-red-induction_P Parameter: Plant Line Value: Columbia
  misc_feature: MA Experiment 20001248 PARAMETER Experiment Name: At_Far-red-induction_P Parameter: Timepoint (hr) Value: 4
  misc_feature: MA Experiment 20001248 PARAMETER Experiment Name: At_Far-red-induction_P Parameter: Tissue Value: Whole Plant
  misc_feature: MA Experiment ID: 20001450 Result: Up-regulated in Transcription
  misc_feature: MA Experiment 20001450 PARAMETER Experiment Name: At_Far-red-induction_P Parameter: Age (day) Value: 7
  misc_feature: MA Experiment 20001450 PARAMETER Experiment Name: At_Far-red-induction_P Parameter: Light Value: Far-red vs. White
  misc_feature: MA Experiment 20001450 PARAMETER Experiment Name: At_Far-red-induction_P Parameter: Organism Value: A. thaliana
  misc_feature: MA Experiment 20001450 PARAMETER Experiment Name: At_Far-red-induction_P Parameter: Plant Line Value: Columbia
  misc_feature: MA Experiment 20001450 PARAMETER Experiment Name: At_Far-red-induction_P Parameter: Timepoint (hr) Value: 8
  misc_feature: MA Experiment 20001450 PARAMETER Experiment Name: At_Far-red-induction_P Parameter: Tissue Value: Whole Plant
  misc_feature: MA Experiment ID: 20001451 Result: Up-regulated in Transcription
  misc_feature: MA Experiment 20001451 PARAMETER Experiment Name: At_Far-red-induction_P Parameter: Age (day) Value: 7
  misc_feature: MA Experiment 20001451 PARAMETER Experiment Name: At_Far-red-induction_P Parameter: Light Value: Far-red vs. White
  misc_feature: MA Experiment 20001451 PARAMETER Experiment Name: At_Far-red-induction_P Parameter: Organism Value: A. thaliana
  misc_feature: MA Experiment 20001451 PARAMETER Experiment Name: At_Far-red-induction_P Parameter: Plant Line Value: Columbia
  misc_feature: MA Experiment 20001451 PARAMETER Experiment Name: At_Far-red-induction_P Parameter: Timepoint (hr) Value: 24
  misc_feature: MA Experiment 20001451 PARAMETER Experiment Name: At_Far-red-induction_P Parameter: Tissue Value: Whole Plant
  misc_feature: MA Experiment ID: 20001905 Result: Up-regulated in Transcription
  misc_feature: MA Experiment 20001905 PARAMETER Experiment Name: At_Drought_Reproduction_P Parameter: Age (day) Value: 40
  misc_feature: MA Experiment 20001905 PARAMETER Experiment Name: At_Drought_Reproduction_P Parameter: Organism Value: A. thaliana
  misc_feature: MA Experiment 20001905 PARAMETER Experiment Name: At_Drought_Reproduction_P Parameter: Plant Line Value: WS
  misc_feature: MA Experiment 20001905 PARAMETER Experiment Name: At_Drought_Reproduction_P Parameter: Timepoint (day) Value: 10
  misc_feature: MA Experiment 20001905 PARAMETER Experiment Name: At_Drought_Reproduction_P Parameter: Tissue Value: Rosettes
  misc_feature: MA Experiment 20001905 PARAMETER Experiment Name: At_Drought_Reproduction_P Parameter: Treatment Value: Drought vs. No Drought
atcacaacaaatcaaaaactccaagttcttacctttttcccatttacaatcggtaaatttctccgatcacgagatacaaatttcactttctgatatcttggatcttccgatcactttgaattttttggtttgttgattttttttttttttttgttccataaagttcgaattttttatagagaagaaaccatgaatgctttagctgcaacaaacagaaacttccgtcatgcatctcgaatcctgggtttggattcgaagatcgagagaagtcttatgatcccatttagagaaatcaaggttgagtgtacgattcctaaagacgatggcactctggtttcatacatcggatttagggttcaacatgacaatgctcgtggacccatgaaaggtggaatcagatatcatcctgaggttgatccagatgaagttaacgcactagctcagctgatgacttggaagactgctgtagcagatattccatatggtggtgctaaaggtggaattggatgtagtcctcgtgacttgagtttgagcgagcttgagaggttgactcgtgtgtttacacagaagattcatgatcttatcggtattcataccgatgtgcctgctcctgatatgggcactaacgctcaaaccatggcttggattcttgatgagtactccaagtttcatggtcattcccctgctgttgtcactggaaagcccattgatcttggtggttcattaggtagggaagctgccacaggtcgtggtgtagtatttgccaccgaagctcttcttgctgagtacgggaaatcgattcagggtttgacatttgttattcaagtaaaaccattatcagctaatctcagatctcaagctttattgtgtatatgatataagacagaaatgttgagagatttggatgatatgtgacagggttttgggaatgttggaacatgggctgcgaagctgatccacgagaaaggcggtaaagtggttgcagtaagcgacattactggtgcaatcaggaaccctgaaggtatcgacatcaacgctctcataaaacacaaggacgcaactggaagtctcaatgatttcaatggtggagacgctatgaattcagatgaattgctcattcatgagtgtgatgttctcattccatgcgctcttggtggtgtcctgaacaaggaaaatgctggagatgtgaaggcaaagtttatagtagaggcagctaaccatccaacagatccagatgctgatgagattctgtcgaagaaaggagtgattatacttccagatatctacgcaaacgcaggaggagtgacagtgagttacttcgagtgggtgcagaacattcaaggattcatgtgggaagaggaaaaagtgaacttggagctgcaaaaatacatgactcgagcctttcacaacatcaagacaatgtgccatactcattcttgcaacctccgtatgggagctttcactcttggagttaaccgagtcgctcgagccacccagttgcgtggttgggaagcttaattcagttgaatcccccttatatactctgtttcttgcttgctctgttttccatttttttttttttggtttcattgttactgaaaatcattgagctttccgaaatggaaaaggaaacaaatggattgaataaaaactaacaaattggaataaaatatatgattggatt

SEQ ID NO: 84576 - protein, 228 aa, Arabidopsis thaliana
  peptide (1)..(228): Ceres Seq. ID no. 12675809
  misc_feature (31)..(161): Pfam Name: Glu/Leu/Phe/Val dehydrogenase, dimerisation domain Pfam Description: Glu/Leu/Phe/Val dehydrogenase, dimerisation
  misc_feature (1)..(212): Homolog of NCBI NO: 12643763 NR Description: Glutamate dehydrogenase (GDH)
  misc_feature (1)..(212): Homolog of NCBI NO: 7431775 NR Description: glutamate dehydrogenase (EC 1.4.1.2) - maize
  misc_feature (1)..(212): Homolog of NCBI NO: 21314959 NR Description: NADH-glutamate dehydrogenase [Lycopersicon
  misc_feature (1)..(212): Homolog of NCBI NO: 1931629 NR Description: glutamate dehydrogenase mutant [Zea mays]
  misc_feature (1)..(212): Homolog of NCBI NO: 15238762 NR Description: glutamate dehydrogenase (EC 1.4.1.-) 1 protein id: At5g18170.1, supported by cDNA: gi_1098959, supported cDNA: gi_1293094, supported by cDNA: gi_15146203 [Arabidopsis
  misc_feature (1)..(212): Homolog of NCBI NO: 28269441 NR Description: glutamate dehydrogenase [Oryza sativa (japonica
  misc_feature (1)..(212): Homolog of NCBI NO: 4150965 NR Description: glutamate dehydrogenase [Asparagus officinalis]
  misc_feature (1)..(212): Homolog of NCBI NO: 12643806 NR Description: Glutamate dehydrogenase B (GDH B)
  misc_feature (1)..(212): Homolog of NCBI NO: 15228667 NR Description: putative glutamate dehydrogenase; protein id: [Arabidopsis thaliana] >gi|12229816|sp|Q9S7A0|DHE3_ARATH Probable dehydrogenase 3 (GDH 3) >gi|6006851|gb|AAF00627.1|AC009540_4
  misc_feature (1)..(212): Homolog of NCBI NO: 7431768 NR Description: glutamate dehydrogenase (EC 1.4.1.-) B - tobacco >gi|4688955|emb|CAA69601.2| NADH glutamate dehydrogenase
MNALAATNRNFRHASRILGLDSKIERSLMIPFREIKVECTIPKDDGTLVSYIGFRVQHDNARGPMKGGIRYHPEVDPDEVNALAQLMTWKTAVADIPYGGAKGGIGCSPRDLSLSELERLTRVFTQKIHDLIGIHTDVPAPDMGTNAQTMAWILDEYSKFHGHSPAVVTGKPIDLGGSLGREAATGRGVVFATEALLAEYGKSIQGLTFVIQVKPLSANLRSQALLCI

SEQ ID NO: 84577 - protein, 200 aa, Arabidopsis thaliana
  peptide (1)..(200): Ceres Seq. ID no. 12675810
  misc_feature (3)..(133): Pfam Name: Glu/Leu/Phe/Val dehydrogenase, dimerisation domain Pfam Description: Glu/Leu/Phe/Val dehydrogenase, dimerisation
  misc_feature (1)..(184): Homolog of NCBI NO: 12643763 NR Description: Glutamate dehydrogenase (GDH)
  misc_feature (1)..(184): Homolog of NCBI NO: 7431775 NR Description: glutamate dehydrogenase (EC 1.4.1.2) - maize
  misc_feature (1)..(184): Homolog of NCBI NO: 21314959 NR Description: NADH-glutamate dehydrogenase [Lycopersicon
  misc_feature (1)..(184): Homolog of NCBI NO: 1931629 NR Description: glutamate dehydrogenase mutant [Zea mays]
  misc_feature (1)..(184): Homolog of NCBI NO: 15238762 NR Description: glutamate dehydrogenase (EC 1.4.1.-) 1 protein id: At5g18170.1, supported by cDNA: gi_1098959, supported cDNA: gi_1293094, supported by cDNA: gi_15146203 [Arabidopsis
  misc_feature (1)..(184): Homolog of NCBI NO: 28269441 NR Description: glutamate dehydrogenase [Oryza sativa (japonica
  misc_feature (1)..(184): Homolog of NCBI NO: 4150965 NR Description: glutamate dehydrogenase [Asparagus officinalis]
  misc_feature (1)..(184): Homolog of NCBI NO: 12643806 NR Description: Glutamate dehydrogenase B (GDH B)
  misc_feature (1)..(184): Homolog of NCBI NO: 15228667 NR Description: putative glutamate dehydrogenase; protein id: [Arabidopsis thaliana] >gi|12229816|sp|Q9S7A0|DHE3_ARATH Probable dehydrogenase 3 (GDH 3) >gi|6006851|gb|AAF00627.1|AC009540_4
  misc_feature (1)..(184): Homolog of NCBI NO: 7431768 NR Description: glutamate dehydrogenase (EC 1.4.1.-) B - tobacco >gi|4688955|emb|CAA69601.2| NADH glutamate dehydrogenase
MIPFREIKVECTIPKDDGTLVSYIGFRVQHDNARGPMKGGIRYHPEVDPDEVNALAQLMTWKTAVADIPYGGAKGGIGCSPRDLSLSELERLTRVFTQKIHDLIGIHTDVPAPDMGTNAQTMAWILDEYSKFHGHSPAVVTGKPIDLGGSLGREAATGRGVVFATEALLAEYGKSIQGLTFVIQVKPLSANLRSQALLCI

SEQ ID NO: 84578 - protein, 164 aa, Arabidopsis thaliana
  peptide (1)..(164): Ceres Seq. ID no. 12675811
  misc_feature (1)..(97): Pfam Name: Glu/Leu/Phe/Val dehydrogenase, dimerisation domain Pfam Description: Glu/Leu/Phe/Val dehydrogenase, dimerisation
  misc_feature (1)..(148): Homolog of NCBI NO: 12643763 NR Description: Glutamate dehydrogenase (GDH)
  misc_feature (1)..(148): Homolog of NCBI NO: 7431775 NR Description: glutamate dehydrogenase (EC 1.4.1.2) - maize
  misc_feature (1)..(148): Homolog of NCBI NO: 21314959 NR Description: NADH-glutamate dehydrogenase [Lycopersicon
  misc_feature (1)..(148): Homolog of NCBI NO: 1931629 NR Description: glutamate dehydrogenase mutant [Zea mays]
  misc_feature (1)..(148): Homolog of NCBI NO: 15238762 NR Description: glutamate dehydrogenase (EC 1.4.1.-) 1 protein id: At5g18170.1, supported by cDNA: gi_1098959, supported cDNA: gi_1293094, supported by cDNA: gi_15146203 [Arabidopsis
  misc_feature (1)..(148): Homolog of NCBI NO: 28269441 NR Description: glutamate dehydrogenase [Oryza sativa (japonica
  misc_feature (1)..(148): Homolog of NCBI NO: 4150965 NR Description: glutamate dehydrogenase [Asparagus officinalis]
  misc_feature (1)..(148): Homolog of NCBI NO: 12643806 NR Description: Glutamate dehydrogenase B (GDH B)
  misc_feature (1)..(148): Homolog of NCBI NO: 15228667 NR Description: putative glutamate dehydrogenase; protein id: [Arabidopsis thaliana] >gi|12229816|sp|Q9S7A0|DHE3_ARATH Probable dehydrogenase 3 (GDH 3) >gi|6006851|gb|AAF00627.1|AC009540_4
  misc_feature (1)..(148): Homolog of NCBI NO: 7431768 NR Description: glutamate dehydrogenase (EC 1.4.1.-) B - tobacco >gi|4688955|emb|CAA69601.2| NADH glutamate dehydrogenase
MKGGIRYHPEVDPDEVNALAQLMTWKTAVADIPYGGAKGGIGCSPRDLSLSELERLTRVFTQKIHDLIGIHTDVPAPDMGTNAQTMAWILDEYSKFHGHSPAVVTGKPIDLGGSLGREAATGRGVVFATEALLAEYGKSIQGLTFVIQVKPLSANLRSQALLCI

SEQ ID NO: 84579 - DNA, 1999 bp, Arabidopsis thaliana
  misc_feature (1)..(1999): Ceres Seq. ID no. 12675826
  misc_feature: MA Experiment ID: 20000166 Result: Up-regulated in Transcription
  misc_feature: MA Experiment 20000166 PARAMETER Experiment Name: At_100uM_ABA_P Parameter: Age (day) Value: 14
  misc_feature: MA Experiment 20000166 PARAMETER Experiment Name: At_100uM_ABA_P Parameter: Organism Value: A. thaliana
  misc_feature: MA Experiment 20000166 PARAMETER Experiment Name: At_100uM_ABA_P Parameter: Plant Line Value: WS
  misc_feature: MA Experiment 20000166 PARAMETER Experiment Name: At_100uM_ABA_P Parameter: Timepoint (hr) Value: 1
  misc_feature: MA Experiment 20000166 PARAMETER Experiment Name: At_100uM_ABA_P Parameter: Tissue Value: Aerial
  misc_feature: MA Experiment 20000166 PARAMETER Experiment Name: At_100uM_ABA_P Parameter: Treatment Value: 100uM ABA vs. No Treatment
  misc_feature: MA Experiment ID: 20000171 Result: Down-regulated in Transcription
  misc_feature: MA Experiment 20000171 PARAMETER Experiment Name: At_42deg_Heat_P Parameter: Age (day) Value: 14
  misc_feature: MA Experiment 20000171 PARAMETER Experiment Name: At_42deg_Heat_P Parameter: Organism Value: A. thaliana
  misc_feature: MA Experiment 20000171 PARAMETER Experiment Name: At_42deg_Heat_P Parameter: Plant Line Value: WS
  misc_feature: MA Experiment 20000171 PARAMETER Experiment Name: At_42deg_Heat_P Parameter: Temperature (deg C) Value: 42 vs. 22
  misc_feature: MA Experiment 20000171 PARAMETER Experiment Name: At_42deg_Heat_P Parameter: Timepoint (hr) Value: 1
  misc_feature: MA Experiment 20000171 PARAMETER Experiment Name: At_42deg_Heat_P Parameter: Tissue Value: Aerial
  misc_feature: MA Experiment ID: 20000173 Result: Down-regulated in Transcription
  misc_feature: MA Experiment 20000173 PARAMETER Experiment Name: At_42deg_Heat_P Parameter: Age (day) Value: 14
  misc_feature: MA Experiment 20000173 PARAMETER Experiment Name: At_42deg_Heat_P Parameter: Organism Value: A. thaliana
  misc_feature: MA Experiment 20000173 PARAMETER Experiment Name: At_42deg_Heat_P Parameter: Plant Line Value: WS
  misc_feature: MA Experiment 20000173 PARAMETER Experiment Name: At_42deg_Heat_P Parameter: Temperature (deg C) Value: 42 vs. 22
  misc_feature: MA Experiment 20000173 PARAMETER Experiment Name: At_42deg_Heat_P Parameter: Timepoint (hr) Value: 6
  misc_feature: MA Experiment 20000173 PARAMETER Experiment Name: At_42deg_Heat_P Parameter: Tissue Value: Aerial
  misc_feature: MA Experiment ID: 20000185 Result: Up-regulated in Transcription
  misc_feature: MA Experiment 20000185 PARAMETER Experiment Name: At_Roots__P Parameter: Age (day) Value: 7 vs. 21
  misc_feature: MA Experiment 20000185 PARAMETER Experiment Name: At_Roots__P Parameter: Organism Value: A. thaliana
  misc_feature: MA Experiment 20000185 PARAMETER Experiment Name: At_Roots__P Parameter: Tissue Value: Roots vs. Whole Plant
  misc_feature: MA Experiment ID: 20000265 Result: Up-regulated in Transcription
  misc_feature: MA Experiment 20000265 PARAMETER Experiment Name: At_Open_Flower_P Parameter: Age (day) Value: 21
  misc_feature: MA Experiment 20000265 PARAMETER Experiment Name: At_Open_Flower_P Parameter: Plant Line Value: WS
  misc_feature: MA Experiment 20000265 PARAMETER Experiment Name: At_Open_Flower_P Parameter: Tissue Value: Closed Flower vs. Whole Plant
  misc_feature: MA Experiment ID: 20000286 Result: Up-regulated in Transcription
  misc_feature: MA Experiment 20000286 PARAMETER Experiment Name: At_Open_Flower_P Parameter: Age (day) Value: 21
  misc_feature: MA Experiment 20000286 PARAMETER Experiment Name: At_Open_Flower_P Parameter: Plant Line Value: WS
  misc_feature: MA Experiment 20000286 PARAMETER Experiment Name: At_Open_Flower_P Parameter: Tissue Value: Half Open vs. Whole Plant
  misc_feature: MA Experiment ID: 20000439 Result: Up-regulated in Transcription
  misc_feature: MA Experiment 20000439 PARAMETER Experiment Name: At_Roots__P Parameter: Age (day) Value: 14 vs. 21
  misc_feature: MA Experiment 20000439 PARAMETER Experiment Name: At_Roots__P Parameter: Organism Value: A. thaliana
  misc_feature: MA Experiment 20000439 PARAMETER Experiment Name: At_Roots__P Parameter: Tissue Value: Roots vs. Whole Plant
  misc_feature: MA Experiment ID: 20001247 Result: Up-regulated in Transcription
  misc_feature: MA Experiment 20001247 PARAMETER Experiment Name: At_Far-red-induction_P Parameter: Age (day) Value: 7
  misc_feature: MA Experiment 20001247 PARAMETER Experiment Name: At_Far-red-induction_P Parameter: Light Value: Far-red vs. White
  misc_feature: MA Experiment 20001247 PARAMETER Experiment Name: At_Far-red-induction_P Parameter: Organism Value: A. thaliana
  misc_feature: MA Experiment 20001247 PARAMETER Experiment Name: At_Far-red-induction_P Parameter: Plant Line Value: Columbia
  misc_feature: MA Experiment 20001247 PARAMETER Experiment Name: At_Far-red-induction_P Parameter: Timepoint (hr) Value: 1
  misc_feature: MA Experiment 20001247 PARAMETER Experiment Name: At_Far-red-induction_P Parameter: Tissue Value: Whole Plant
  misc_feature: MA Experiment ID: 20001248 Result: Up-regulated in Transcription
  misc_feature: MA Experiment 20001248 PARAMETER Experiment Name: At_Far-red-induction_P Parameter: Age (day) Value: 7
  misc_feature: MA Experiment 20001248 PARAMETER Experiment Name: At_Far-red-induction_P Parameter: Light Value: Far-red vs. White
  misc_feature: MA Experiment 20001248 PARAMETER Experiment Name: At_Far-red-induction_P Parameter: Organism Value: A. thaliana
  misc_feature: MA Experiment 20001248 PARAMETER Experiment Name: At_Far-red-induction_P Parameter: Plant Line Value: Columbia
  misc_feature: MA Experiment 20001248 PARAMETER Experiment Name: At_Far-red-induction_P Parameter: Timepoint (hr) Value: 4
  misc_feature: MA Experiment 20001248 PARAMETER Experiment Name: At_Far-red-induction_P Parameter: Tissue Value: Whole Plant
  misc_feature: MA Experiment ID: 20001911 Result: Down-regulated in Transcription
  misc_feature: MA Experiment 20001911 PARAMETER Experiment Name: At_Drought_Reproduction_P Parameter: Age (day) Value: 40
  misc_feature: MA Experiment 20001911 PARAMETER Experiment Name: At_Drought_Reproduction_P Parameter: Organism Value: A. thaliana
  misc_feature: MA Experiment 20001911 PARAMETER Experiment Name: At_Drought_Reproduction_P Parameter: Plant Line Value: WS
  misc_feature: MA Experiment 20001911 PARAMETER Experiment Name: At_Drought_Reproduction_P Parameter: Timepoint (day) Value: 10
  misc_feature: MA Experiment 20001911 PARAMETER Experiment Name: At_Drought_Reproduction_P Parameter: Tissue Value: Flowers
  misc_feature: MA Experiment 20001911 PARAMETER Experiment Name: At_Drought_Reproduction_P Parameter: Treatment Value: Drought vs. No Drought
aaaagaattcaaaaaccgtcgaagctctgtcgttcatggagcttcctcaacctcgtcccttcaaaacccaagtcattcaaccgtccacccagatccaaagccaacaccaccaccttcttctcaaggtagtcacttgaaaacccatgattttcttcaaccgttagaatgtgttggtgctaaagaagacgtaagtaggattaactctaccactacagcgtccgagaagccaccgccccctgctccacctccaccgttgcagcacgtgcttcccggtggtatagggacttatacgattagccccattccttacttccatcatcatcatcagagaattcctaagccggagttgtcaccaccaatgatgttcaatgctaatgagagaaacgttttggatgagaattctaactctaattgcagctcgtacgccgctgcatcaagcgggttcactctgtgggatgaatctgcttctgggaagaagggacagacaaggaaggagaatagtgttggggagagagtaaacatgagagctgatgttgcagcaactgtgggacaatggccagtggcggagagacggtcccagtctttgacaaacaaccatatgagcggtttcagttctctctcttcctctcaagggtctgtgcttaagagccagagcttcatggacatgataaggtcagcaaaaggaagttcacaggaagatgatttagatgatgaagaagattttatcatgaagaaagaaagctcctcgactagccagagccatagagtggatttgagggtaaaagcagatgtgagaggctctcctaacgatcaaaagctgaacacacctaggtctaaacattctgctacagagcaacggagaaggagcaagatcaatgatagatttcagatgttgagacaactaatacctaacagcgaccaaaagcgggataaggcctccttcttactagaggttatcgagtatattcaattcttacaagagaaagcagacaagtatgtgacctcttaccaaggatggaatcacgaacctgcgaagctattgaattggcagagtaacaacaaccaacagctagtacctgaaggagttgcttttgctccaaaattggaagaagagaaaaacaacattccggtttcggtccttgcaactgcacaaggtgttgttattgatcatccaacaaccgcgacgacctctccatttccattgtcgattcaaagcaacagttttttctctcctgtgattgcgggtaatcccgtaccccagttccacgcaagagtcgcatcatcagaggctgtagagccaagtccgagttcccggagtcaaaaagaagaagaagatgaggaagttcttgagggtaacatcagaatttcaagtgtttactcacaaggattagtgaaaacactgagagaagcattggagaattcaggagtggacttaacgaaagcaagcatctccgttgaaatcgagctcgctaaacaatcctcgtcttcttccttcaaggatcatgaagttcgtgaaccggtttctcgaaccagaaacgacaatgtcaagcaaactcggaaaccaaaacggctcaagacgggacagtagaagttataaaaacaaaacccaaacacacaatccggtaaaagttaaacaccaaaattgattcctctgtttttttctttaaatcattttatctcaaaaagggattataatttattattatagttatatctttgatttttttcttttgtacatccgaaatcctgttatatatatctcgtgggtccataatcgtatgagacctaagaagactagggcgacccggttatgctaaccgcattttagaacatactcttttgaggaatatatcgttaaggaaggctttcaaagttttctggaagcgtccagtgttaagtgaaaacatttttcactctcttatatacttgatcatctcacactttttatatttgtttcttcctcttactttgttctatggttttcaatgtaattccctgg

SEQ ID NO: 84580 - protein, 528 aa, Arabidopsis thaliana
  peptide (1)..(528): Ceres Seq. ID no. 12675827
  misc_feature (276)..(326): Pfam Name: Helix-loop-helix DNA-binding domain Pfam Description: Helix-loop-helix DNA-binding domain
  misc_feature (24)..(528): Homolog of NCBI NO: 11358566 NR Description: myc-like protein - Arabidopsis thaliana
  misc_feature (120)..(528): Homolog of NCBI NO: 30682248 NR Description: bHLH protein family [Arabidopsis thaliana]
  misc_feature (223)..(526): Homolog of NCBI NO: 15221582 NR Description: putative DNA-binding protein; protein id: supported by cDNA: 27793. [Arabidopsis thaliana]
  misc_feature (223)..(526): Homolog of NCBI NO: 21555388 NR Description: putative DNA-binding protein [Arabidopsis
  misc_feature (253)..(353): Homolog of NCBI NO: 15241563 NR Description: putative protein; protein id: At5g38860.1
  misc_feature (456)..(519): Homolog of NCBI NO: 15241563 NR Description: putative protein; protein id: At5g38860.1
  misc_feature (253)..(519): Homolog of NCBI NO: 9758063 NR Description: DNA-binding protein-like [Arabidopsis thaliana]
  misc_feature (323)..(526): Homolog of NCBI NO: 19310568 NR Description: putative DNA-binding protein [Arabidopsis
KEFKNRRSSVVHGASSTSSLQNPSHSTVHPDPKPTPPPSSQGSHLKTHDFLQPLECVGAKEDVSRINSTTTASEKPPPPAPPPPLQHVLPGGIGTYTISPIPYFHHHHQRIPKPELSPPMMFNANERNVLDENSNSNCSSYAAASSGFTLWDESASGKKGQTRKENSVGERVNMRADVAATVGQWPVAERRSQSLTNNHMSGFSSLSSSQGSVLKSQSFMDMIRSAKGSSQEDDLDDEEDFIMKKESSSTSQSHRVDLRVKADVRGSPNDQKLNTPRSKHSATEQRRRSKINDRFQMLRQLIPNSDQKRDKASFLLEVIEYIQFLQEKADKYVTSYQGWNHEPAKLLNWQSNNNQQLVPEGVAFAPKLEEEKNNIPVSVLATAQGVVIDHPTTATTSPFPLSIQSNSFFSPVIAGNPVPQFHARVASSEAVEPSPSSRSQKEEEDEEVLEGNIRISSVYSQGLVKTLREALENSGVDLTKASISVEIELAKQSSSSSFKDHEVREPVSRTRNDNVKQTRKPKRLKTGQ

SEQ ID NO: 84581 - protein, 409 aa, Arabidopsis thaliana
  peptide (1)..(409): Ceres Seq. ID no. 12675828
  misc_feature (157)..(207): Pfam Name: Helix-loop-helix DNA-binding domain Pfam Description: Helix-loop-helix DNA-binding domain
  misc_feature (1)..(409): Homolog of NCBI NO: 11358566 NR Description: myc-like protein - Arabidopsis thaliana
  misc_feature (1)..(409): Homolog of NCBI NO: 30682248 NR Description: bHLH protein family [Arabidopsis thaliana]
  misc_feature (104)..(407): Homolog of NCBI NO: 15221582 NR Description: putative DNA-binding protein; protein id: supported by cDNA: 27793. [Arabidopsis thaliana]
  misc_feature (104)..(407): Homolog of NCBI NO: 21555388 NR Description: putative DNA-binding protein [Arabidopsis
  misc_feature (134)..(234): Homolog of NCBI NO: 15241563 NR Description: putative protein; protein id: At5g38860.1
  misc_feature (337)..(400): Homolog of NCBI NO: 15241563 NR Description: putative protein; protein id: At5g38860.1
  misc_feature (134)..(400): Homolog of NCBI NO: 9758063 NR Description: DNA-binding protein-like [Arabidopsis thaliana]
  misc_feature (204)..(407): Homolog of NCBI NO: 19310568 NR Description: putative DNA-binding protein [Arabidopsis
MMFNANERNVLDENSNSNCSSYAAASSGFTLWDESASGKKGQTRKENSVGERVNMRADVAATVGQWPVAERRSQSLTNNHMSGFSSLSSSQGSVLKSQSFMDMIRSAKGSSQEDDLDDEEDFIMKKESSSTSQSHRVDLRVKADVRGSPNDQKLNTPRSKHSATEQRRRSKINDRFQMLRQLIPNSDQKRDKASFLLEVIEYIQFLQEKADKYVTSYQGWNHEPAKLLNWQSNNNQQLVPEGVAFAPKLEEEKNNIPVSVLATAQGVVIDHPTTATTSPFPLSIQSNSFFSPVIAGNPVPQFHARVASSEAVEPSPSSRSQKEEEDEEVLEGNIRISSVYSQGLVKTLREALENSGVDLTKASISVEIELAKQSSSSSFKDHEVREPVSRTRNDNVKQTRKPKRLKTGQ

SEQ ID NO: 84582 - protein, 408 aa, Arabidopsis thaliana
  peptide (1)..(408): Ceres Seq. ID no. 12675829
  misc_feature (156)..(206): Pfam Name: Helix-loop-helix DNA-binding domain Pfam Description: Helix-loop-helix DNA-binding domain
  misc_feature (1)..(408): Homolog of NCBI NO: 11358566 NR Description: myc-like protein - Arabidopsis thaliana
  misc_feature (1)..(408): Homolog of NCBI NO: 30682248 NR Description: bHLH protein family [Arabidopsis thaliana]
  misc_feature (103)..(406): Homolog of NCBI NO: 15221582 NR Description: putative DNA-binding protein; protein id: supported by cDNA: 27793. [Arabidopsis thaliana]
  misc_feature (103)..(406): Homolog of NCBI NO: 21555388 NR Description: putative DNA-binding protein [Arabidopsis
  misc_feature (133)..(233): Homolog of NCBI NO: 15241563 NR Description: putative protein; protein id: At5g38860.1
  misc_feature (336)..(399): Homolog of NCBI NO: 15241563 NR Description: putative protein; protein id: At5g38860.1
  misc_feature (133)..(399): Homolog of NCBI NO: 9758063 NR Description: DNA-binding protein-like [Arabidopsis thaliana]
  misc_feature (203)..(406): Homolog of NCBI NO: 19310568 NR Description: putative DNA-binding protein [Arabidopsis
MFNANERNVLDENSNSNCSSYAAASSGFTLWDESASGKKGQTRKENSVGERVNMRADVAATVGQWPVAERRSQSLTNNHMSGFSSLSSSQGSVLKSQSFMDMIRSAKGSSQEDDLDDEEDFIMKKESSSTSQSHRVDLRVKADVRGSPNDQKLNTPRSKHSATEQRRRSKINDRFQMLRQLIPNSDQKRDKASFLLEVIEYIQFLQEKADKYVTSYQGWNHEPAKLLNWQSNNNQQLVPEGVAFAPKLEEEKNNIPVSVLATAQGVVIDHPTTATTSPFPLSIQSNSFFSPVIAGNPVPQFHARVASSEAVEPSPSSRSQKEEEDEEVLEGNIRISSVYSQGLVKTLREALENSGVDLTKASISVEIELAKQSSSSSFKDHEVREPVSRTRNDNVKQTRKPKRLKTGQ

SEQ ID NO: 84583 - DNA, 1298 bp, Arabidopsis thaliana
  misc_feature (1)..(1298): Ceres Seq. ID no. 12675854
  misc_feature: MA Experiment ID: 20000179 Result: Up-regulated in Transcription
  misc_feature: MA Experiment 20000179 PARAMETER Experiment Name: At_Germinating_Seeds_P Parameter: Age (hr) Value: 6 vs. 0
  misc_feature: MA Experiment 20000179 PARAMETER Experiment Name: At_Germinating_Seeds_P Parameter: Tissue Value: Germinating Seeds
  misc_feature: MA Experiment ID: 20001557 Result: Up-regulated in Transcription
  misc_feature: MA Experiment 20001557 PARAMETER Experiment Name: At_Drought_Soil_Dry_P Parameter: Age (day) Value: 27
  misc_feature: MA Experiment 20001557 PARAMETER Experiment Name: At_Drought_Soil_Dry_P Parameter: Organism Value: A. thaliana
  misc_feature: MA Experiment 20001557 PARAMETER Experiment Name: At_Drought_Soil_Dry_P Parameter: Plant Line Value: WS
  misc_feature: MA Experiment 20001557 PARAMETER Experiment Name: At_Drought_Soil_Dry_P Parameter: Post Timepoint (hr) Value: 3
  misc_feature: MA Experiment 20001557 PARAMETER Experiment Name: At_Drought_Soil_Dry_P Parameter: Post-Treatment Value: Re-Water vs. No Drought
  misc_feature: MA Experiment 20001557 PARAMETER Experiment Name: At_Drought_Soil_Dry_P Parameter: Timepoint (day) Value: 13
  misc_feature: MA Experiment 20001557 PARAMETER Experiment Name: At_Drought_Soil_Dry_P Parameter: Treatment Value: Drought vs. No Drought
tccatttccgtcttcacacagtttagggttcacaacttgattcggatcgaaagcaccgagaagaagaagccaatcaatcatgtctagacaagtggcaaggcttatcggatctctgtcatcaaaagctcgccgttgttctaccggcggctcagaggtttttccgtcatgccagtctctcacttcgttgacccaatctcgctccttcgcgtcggatcctcatcctcctgcggcggttttcgttgacaaaaacacacgagtcctctgtcaaggcatcaccggaaagaacggcactttccacactgaacaagccattgagtacggcaccaaaatggtggcaggagtgacaccgaagaagggtggaacagaacacttgggtctcccagttttcaactctgttgctgaagctaaggctgacaccaaagccaatgcctctgtgatttatgttcctgctccttttgctgctgctgctattatggagggtattgaggctgagttagatcttattgtgtgtatcaccgaaggaatccctcaacatgacatggtacgtgtaaagcatgctcttaacagtcaatcgaaaactaggctgattggtccaaactgccctgggattatcaagcctggtgaatgcaaaattggaattatgccgggatacatccacaagcctgggaagattggaattgtctcacgatctggaaccttgacatatgaagctgttttccaaacaactgcagtgggtctaggccaatctacttgtgtaggaatcggtggggatccttttaacgggacaaactttgtcgactgcttggagaaattctttgttgatcctcaaacagaaggtatcgttctcattggagaaatcggaggcactgcagaagaagatgctgcagcattgataaaggcaagtggtactgagaagcctgttgttgcttttattgctggacttactgcaccaccgggtcgtcgaatgggtcatgccggagccattgtttccggtggtaaaggtacggctcaggacaaaattaagagtttgaatgatgctggagtgaaggttgttgaatctccggctaagattggatcagcgatgtatgagctctttcaagaaagaggtcttttgaagcagtgaagtgaatttcactagctttcgcttctttttttccatcttgaaaccttcaagaaaaaagaaaagaaaaaaaccctaattccacgccattgatggctgcacacttttttggggtttgttttgctatattgatatgatttttccaattgaacagtgataattaaaagagattcaaatc

SEQ ID NO: 84584 - protein, 347 aa, Arabidopsis thaliana; identical to SEQ ID NO: 28445
  peptide (1)..(347): Ceres Seq. ID no. 12675855
  misc_feature (53)..(164): Pfam Name: CoA binding domain Pfam Description: CoA binding domain
  misc_feature (1)..(347): Homolog of NCBI NO: 15241592 NR Description: succinyl-CoA-ligase alpha subunit; protein id: supported by cDNA: 10292., supported by cDNA: gi_18252214
  misc_feature (1)..(346): Homolog of NCBI NO: 15237260 NR Description: succinyl-CoA synthetase, alpha subunit; protein At5g23250.1, supported by cDNA: 39462., supported by cDNA:
  misc_feature (1)..(346): Homolog of NCBI NO: 21593483 NR Description: succinyl-CoA synthetase, alpha subunit
  misc_feature (52)..(346): Homolog of NCBI NO: 1076415 NR Description: succinate-CoA ligase (GDP-forming) (EC 6.2.1.4)
  misc_feature (1)..(345): Homolog of NCBI NO: 27357175 NR Description: succinyl-CoA ligase alpha subunit [Lycopersicon
  misc_feature (12)..(346): Homolog of NCBI NO: 34393512 NR Description: putative succinyl-CoA ligase alpha subunit [Oryza
  misc_feature (52)..(345): Homolog of NCBI NO: 38181885 NR Description: Suclg1 protein [Rattus norvegicus]
  misc_feature (52)..(345): Homolog of NCBI NO: 16758586 NR Description: succinate-CoA ligase, GDP-forming, alpha subunit
  misc_feature (52)..(345): Homolog of NCBI NO: 20141810 NR Description: Succinyl-CoA ligase [GDP-forming] alpha-chain,
  misc_feature (40)..(335): Homolog of NCBI NO: 1711574 NR Description: SUCCINYL-COA LIGASE [GDP-FORMING] ALPHA-CHAIN,

SEQ ID NO: 84585 - protein, 264 aa, Arabidopsis thaliana; identical to SEQ ID NO: 28446
  peptide (1)..(264): Ceres Seq. ID no. 12675856
  misc_feature (1)..(81): Pfam Name: CoA binding domain Pfam Description: CoA binding domain
  misc_feature (1)..(264): Homolog of NCBI NO: 15241592 NR Description: succinyl-CoA-ligase alpha subunit; protein id: supported by cDNA: 10292., supported by cDNA: gi_18252214
  misc_feature (1)..(263): Homolog of NCBI NO: 15237260 NR Description: succinyl-CoA synthetase, alpha subunit; protein At5g23250.1, supported by cDNA: 39462., supported by cDNA:
  misc_feature (1)..(263): Homolog of NCBI NO: 21593483 NR Description: succinyl-CoA synthetase, alpha subunit
  misc_feature (1)..(263): Homolog of NCBI NO: 1076415 NR Description: succinate-CoA ligase (GDP-forming) (EC 6.2.1.4)
  misc_feature (1)..(262): Homolog of NCBI NO: 27357175 NR Description: succinyl-CoA ligase alpha subunit [Lycopersicon
  misc_feature (1)..(263): Homolog of NCBI NO: 34393512 NR Description: putative succinyl-CoA ligase alpha subunit [Oryza
  misc_feature (1)..(262): Homolog of NCBI NO: 38181885 NR Description: Suclg1 protein [Rattus norvegicus]
  misc_feature (1)..(262): Homolog of NCBI NO: 16758586 NR Description: succinate-CoA ligase, GDP-forming, alpha subunit
  misc_feature (1)..(262): Homolog of NCBI NO: 20141810 NR Description: Succinyl-CoA ligase [GDP-forming] alpha-chain,
  misc_feature (1)..(252): Homolog of NCBI NO: 1711574 NR Description: SUCCINYL-COA LIGASE [GDP-FORMING] ALPHA-CHAIN,

SEQ ID NO: 84586 - protein, 216 aa, Arabidopsis thaliana; identical to SEQ ID NO: 28447
  peptide (1)..(216): Ceres Seq. ID no. 12675857
  misc_feature (1)..(216): Homolog of NCBI NO: 15241592 NR Description: succinyl-CoA-ligase alpha subunit; protein id: supported by cDNA: 10292., supported by cDNA: gi_18252214
  misc_feature (1)..(215): Homolog of NCBI NO: 15237260 NR Description: succinyl-CoA synthetase, alpha subunit; protein At5g23250.1, supported by cDNA: 39462., supported by cDNA:
  misc_feature (1)..(215): Homolog of NCBI NO: 21593483 NR Description: succinyl-CoA synthetase, alpha subunit
  misc_feature (1)..(215): Homolog of NCBI NO: 1076415 NR Description: succinate-CoA ligase (GDP-forming) (EC 6.2.1.4)
  misc_feature (1)..(214): Homolog of NCBI NO: 27357175 NR Description: succinyl-CoA ligase alpha subunit [Lycopersicon
  misc_feature (1)..(215): Homolog of NCBI NO: 34393512 NR Description: putative succinyl-CoA ligase alpha subunit [Oryza
  misc_feature (1)..(214): Homolog of NCBI NO: 38181885 NR Description: Suclg1 protein [Rattus norvegicus]
  misc_feature (1)..(214): Homolog of NCBI NO: 16758586 NR Description: succinate-CoA ligase, GDP-forming, alpha subunit
  misc_feature (1)..(214): Homolog of NCBI NO: 20141810 NR Description: Succinyl-CoA ligase [GDP-forming] alpha-chain,
  misc_feature (1)..(204): Homolog of NCBI NO: 1711574 NR Description: SUCCINYL-COA LIGASE [GDP-FORMING] ALPHA-CHAIN,

SEQ ID NO: 84587 - DNA, 1592 bp, Arabidopsis thaliana
  misc_feature (1)..(1592): Ceres Seq. ID no. 12675858
  misc_feature: MA Experiment ID: 108561 Result: Down-regulated in Transcription
  misc_feature: MA Experiment 108561 PARAMETER Experiment Name: At_100uM_ABA_cDNA_P Parameter: Timepoint (hr) Value: 6
  misc_feature: MA Experiment 108561 PARAMETER Experiment Name: At_100uM_ABA_cDNA_P Parameter: Tissue Value: Aerial
  misc_feature: MA Experiment 108561 PARAMETER Experiment Name: At_100uM_ABA_cDNA_P Parameter: Treatment Value: 100uM ABA vs. No Treatment
  misc_feature: MA Experiment ID: 108573 Result: Down-regulated in Transcription
  misc_feature: MA Experiment 108573 PARAMETER Experiment Name: At_Drought_cDNA_P Parameter: Timepoint (hr) Value: 6
  misc_feature: MA Experiment 108573 PARAMETER Experiment Name: At_Drought_cDNA_P Parameter: Tissue Value: Aerial
  misc_feature: MA Experiment 108573 PARAMETER Experiment Name: At_Drought_cDNA_P Parameter: Treatment Value: Drought vs. No Drought
  misc_feature: MA Experiment ID: 108576 Result: Up-regulated in Transcription
  misc_feature: MA Experiment 108576 PARAMETER Experiment Name: At_42deg_Heat_cDNA_P Parameter: Temperature (deg C) Value: 42 vs. 22
  misc_feature: MA Experiment 108576 PARAMETER Experiment Name: At_42deg_Heat_cDNA_P Parameter: Timepoint (hr) Value: 1
  misc_feature: MA Experiment 108576 PARAMETER Experiment Name: At_42deg_Heat_cDNA_P Parameter: Tissue Value: Aerial
  misc_feature: MA Experiment ID: 108577 Result: Up-regulated in Transcription
  misc_feature: MA Experiment 108577 PARAMETER Experiment Name: At_42deg_Heat_cDNA_P Parameter: Temperature (deg C) Value: 42 vs. 22
  misc_feature: MA Experiment 108577 PARAMETER Experiment Name: At_42deg_Heat_cDNA_P Parameter: Timepoint (hr) Value: 6
  misc_feature: MA Experiment 108577 PARAMETER Experiment Name: At_42deg_Heat_cDNA_P Parameter: Tissue Value: Aerial
  misc_feature: MA Experiment ID: 108595 Result: Down-regulated in Transcription
  misc_feature: MA Experiment 108595 PARAMETER Experiment Name: At_Ler-pi_Ovule_cDNA_P Parameter: Plant Line Value: null
  misc_feature: MA Experiment ID: 108668 Result: Down-regulated in Transcription
  misc_feature: MA Experiment 108668 PARAMETER Experiment Name: At_2mM_SA_cDNA_P Parameter: Plant Line Value: WS
  misc_feature: MA Experiment 108668 PARAMETER Experiment Name: At_2mM_SA_cDNA_P Parameter: Timepoint (hr) Value: 6
  misc_feature: MA Experiment 108668 PARAMETER Experiment Name: At_2mM_SA_cDNA_P Parameter: Treatment Value: 2mM SA vs. No Treatment
  misc_feature: MA Experiment ID: 20000315 Result: Up-regulated in Transcription
  misc_feature: MA Experiment 20000315 PARAMETER Experiment Name: At_14day_Shoots-Roots_Sub_P Parameter: Age (day) Value: 14
  misc_feature: MA Experiment 20000315 PARAMETER Experiment Name: At_14day_Shoots-Roots_Sub_P Parameter: Organism Value: A. thaliana
  misc_feature: MA Experiment 20000315 PARAMETER Experiment Name: At_14day_Shoots-Roots_Sub_P Parameter: Plant Line Value: WS
  misc_feature: MA Experiment 20000315 PARAMETER Experiment Name: At_14day_Shoots-Roots_Sub_P Parameter: Tissue Value: Shoots vs. Whole Plant
  misc_feature: MA Experiment ID: 20000327 Result: Up-regulated in Transcription
  misc_feature: MA Experiment 20000327 PARAMETER Experiment Name: At_42deg_Heat_Sub_P Parameter: Age (day) Value: 14
  misc_feature: MA Experiment 20000327 PARAMETER Experiment Name: At_42deg_Heat_Sub_P Parameter: Organism Value: A. thaliana
  misc_feature: MA Experiment 20000327 PARAMETER Experiment Name: At_42deg_Heat_Sub_P Parameter: Plant Line Value: WS
  misc_feature: MA Experiment 20000327 PARAMETER Experiment Name: At_42deg_Heat_Sub_P Parameter: Temperature (deg C) Value: 42 vs. 22
  misc_feature: MA Experiment 20000327 PARAMETER Experiment Name: At_42deg_Heat_Sub_P Parameter: Timepoint (hr) Value: 1
  misc_feature: MA Experiment 20000327 PARAMETER Experiment Name: At_42deg_Heat_Sub_P Parameter: Tissue Value: Aerial
  misc_feature: MA Experiment ID: 20000328 Result: Up-regulated in Transcription
  misc_feature: MA Experiment 20000328 PARAMETER Experiment Name: At_42deg_Heat_Sub_P Parameter: Age (day) Value: 14
  misc_feature: MA Experiment 20000328 PARAMETER Experiment Name: At_42deg_Heat_Sub_P Parameter: Organism Value: A. thaliana
  misc_feature: MA Experiment 20000328 PARAMETER Experiment Name: At_42deg_Heat_Sub_P Parameter: Plant Line Value: WS
  misc_feature: MA Experiment 20000328 PARAMETER Experiment Name: At_42deg_Heat_Sub_P Parameter: Temperature (deg C) Value: 42 vs. 22
  misc_feature: MA Experiment 20000328 PARAMETER Experiment Name: At_42deg_Heat_Sub_P Parameter: Timepoint (hr) Value: 6
  misc_feature: MA Experiment 20000328 PARAMETER Experiment Name: At_42deg_Heat_Sub_P Parameter: Tissue Value: Aerial
  misc_feature: MA Experiment ID: 20000347 Result: Down-regulated in Transcription
  misc_feature: MA Experiment 20000347 PARAMETER Experiment Name: At_2mM_SA_Sub_P Parameter: Age (day) Value: 14
  misc_feature: MA Experiment 20000347 PARAMETER Experiment Name: At_2mM_SA_Sub_P Parameter: Organism Value: A. thaliana
  misc_feature: MA Experiment 20000347 PARAMETER Experiment Name: At_2mM_SA_Sub_P Parameter: Plant Line Value: WS
  misc_feature: MA Experiment 20000347 PARAMETER Experiment Name: At_2mM_SA_Sub_P Parameter: Timepoint (hr) Value: 6
  misc_feature: MA Experiment 20000347 PARAMETER Experiment Name: At_2mM_SA_Sub_P Parameter: Tissue Value: Aerial
  misc_feature: MA Experiment 20000347 PARAMETER Experiment Name: At_2mM_SA_Sub_P Parameter: Treatment Value: 2mM SA vs. No Treatment
  misc_feature: MA Experiment ID: 20000349 Result: Down-regulated in Transcription
  misc_feature: MA Experiment 20000349 PARAMETER Experiment Name: At_100uM_ABA_Sub_P Parameter: Age (day) Value: 14
  misc_feature: MA Experiment 20000349 PARAMETER Experiment Name: At_100uM_ABA_Sub_P Parameter: Organism Value: A. thaliana
  misc_feature: MA Experiment 20000349 PARAMETER Experiment Name: At_100uM_ABA_Sub_P Parameter: Plant Line Value: WS
  misc_feature: MA Experiment 20000349 PARAMETER Experiment Name: At_100uM_ABA_Sub_P Parameter: Timepoint (hr) Value: 6
  misc_feature: MA Experiment 20000349 PARAMETER Experiment Name: At_100uM_ABA_Sub_P Parameter: Tissue Value: Aerial
  misc_feature: MA Experiment 20000349 PARAMETER Experiment Name: At_100uM_ABA_Sub_P Parameter: Treatment Value: 100uM ABA vs. No Treatment
  misc_feature: MA Experiment ID: 20000355 Result: Up-regulated in Transcription
  misc_feature: MA Experiment 20000355 PARAMETER Experiment Name: At_Siliques_Sub_P Parameter: Age (day) Value: 21
  misc_feature: MA Experiment 20000355 PARAMETER Experiment Name: At_Siliques_Sub_P Parameter: Organism Value: A. thaliana
  misc_feature: MA Experiment 20000355 PARAMETER Experiment Name: At_Siliques_Sub_P Parameter: Plant Line Value: WS
  misc_feature: MA Experiment 20000355 PARAMETER Experiment Name: At_Siliques_Sub_P Parameter: Tissue Value: Less Than 5mm Siliques vs. Whole Plant
  misc_feature: MA Experiment ID: 20001807 Result: Up-regulated in Transcription
  misc_feature: MA Experiment 20001807 PARAMETER Experiment Name: At_50mM_NH4NO3_L-to-H_Sub_P Parameter: Timepoint (hr) Value: 6
  misc_feature: MA Experiment 20001807 PARAMETER Experiment Name: At_50mM_NH4NO3_L-to-H_Sub_P Parameter: Tissue Value: Leaf
  misc_feature: MA Experiment 20001807 PARAMETER Experiment Name: At_50mM_NH4NO3_L-to-H_Sub_P Parameter: Treatment Value: 50mM NH4NO3 vs 100mM Mannitol
ttacctaatgccatggaaaatgctggtgcagcgcttattcgtgaggttgcgagtaagactaatgactctgctggtgatgggacaaccactgcgtctatccttgctcgggagataatcaaacatggattgttgagcgtcacttctggtgcgaatcccgtttcactcaagaggggaattgataagactgttcaaggtctgatcgaagagcttcagaagaaagctaggcccgtgaaaggtcgtgatgacatcagagctgtggcttctatctctgctggaaatgatgaccttatagggtcaatgattgctgatgccatcgacaaagttggacctgatggtgttttgtccattgaatcttcatcttcttttgagaccacggtcgaagttgaagaagggatggagattgacagaggttacatctcgcctcagtttgttacaaaccctgagaaactactagctgagtttgagaatgctagggtattgatcactgatcagaagatcactgcgatcaaagacatcatccctattttggagaagaccactcagcttcgtgctccgttgttgattattgcagaggatgttactggtgaagccttagctacccttgtcgtgaacaagcttcgtggtgtcctcaatgttgttgccgttaaagcgccaggatttggagaaagaagaaaagccatgcttcaagatattgcaatcttgacaggagctgagtacctagccatggacatgagcttactggttgaaaacgcaaccatagatcaattgggtattgcccgaaaagtcacgattagcaaagattcgactaccctcattgcagatgcagcttccaaggacgaattacaagctcggattgctcagctgaagaaagaactattcgagactgattctgtgtatgactcagagaagctcgctgagagaattgcgaagctatctggaggtgttgctgtcattaaagtcggagcagcaactgaaactgagcttgaggaccgtaagcttcgtatcgaggatgcaaagaacgcaacatttgctgctatcgaggaaggcatagttccaggtggtggtgctgctttggtgcatctctccactgttattcccgccattaaggagacttttgaggatgctgatgaacgtttgggagctgacatagtacaaaaggcattgctgtcaccagctgctcttattgctcagaacgctggagttgaaggagaagttgttgtggaaaagattatgttcagcgattgggagaatgggtacaacgcaatgactgatacatatgagaatctgttcgaagctggagtgattgatccggctaaagtgacaagatgtgcgctacagaacgctgcttccgtagcaggaatggtactgaccactcaggccattgttgttgacaaaccgaaacccaaggctcctgctgctgctgctcctgagggtctcatggtgtaatcaaaacacaacatcttatcatcacaatggcatctttgtctttttgcacatttgtcatccccatttatctgcaatgtttttcttttttgggggaatatgagtagtttgttaacagtatcgagaaataattatcatcttttttgtcc

SEQ ID NO: 84588 - protein, 481 aa, Arabidopsis thaliana
  peptide (1)..(481): Ceres Seq. ID no. 12675859
  misc_feature (1)..(466): Pfam Name: TCP-1/cpn60 chaperonin family Pfam Description: TCP-1/cpn60 chaperonin family
  misc_feature (1)..(481): Homolog of NCBI NO: 15226314 NR Description: putative rubisco subunit binding-protein alpha protein id: At2g28000.1, supported by cDNA: 25773. [Arabidopsis
  misc_feature (1)..(481): Homolog of NCBI NO: 21554572 NR Description: putative rubisco subunit binding-protein alpha
  misc_feature (1)..(481): Homolog of NCBI NO: 1351030 NR Description: RuBisCO subunit binding-protein alpha subunit,
  misc_feature (1)..(481): Homolog of NCBI NO: 464727 NR Description: RuBisCO subunit binding-protein alpha subunit,
  misc_feature (1)..(481): Homolog of NCBI NO: 99801 NR Description: chaperonine 60K alpha chain - rape (fragment)
  misc_feature (1)..(481): Homolog of NCBI NO: 1710807 NR Description: RuBisCO subunit binding-protein alpha subunit,
  misc_feature (1)..(478): Homolog of NCBI NO: 134102 NR Description: RuBisCO subunit binding-protein alpha subunit,
  misc_feature (1)..(481): Homolog of NCBI NO: 3790441 NR Description: chaperonin 60 alpha subunit [Canavalia lineata]
  misc_feature (1)..(448): Homolog of NCBI NO: 5650721 NR Description: rubisco subunit binding-protein alpha subunit ( AA) (1 is 3rd base in codon) (1488 is 2nd base in codon) [Ricinus
  misc_feature (1)..(447): Homolog of NCBI NO: 134101 NR Description: RUBISCO SUBUNIT BINDING-PROTEIN ALPHA SUBUNIT (60
LPNAMENAGAALIREVASKTNDSAGDGTTTASILAREIIKHGLLSVTSGANPVSLKRGIDKTVQGLIEELQKKARPVKGRDDIRAVASISAGNDDLIGSMIADAIDKVGPDGVLSIESSSSFETTVEVEEGMEIDRGYISPQFVTNPEKLLAEFENARVLITDQKITAIKDIIPILEKTTQLRAPLLIIAEDVTGEALATLVVNKLRGVLNVVAVKAPGFGERRKAMLQDIAILTGAEYLAMDMSLLVENATIDQLGIARKVTISKDSTTLIADAASKDELQARIAQLKKELFETDSVYDSEKLAERIAKLSGGVAVIKVGAATETELEDRKLRIEDAKNATFAAIEEGIVPGGGAALVHLSTVIPAIKETFEDADERLGADIVQKALLSPAALIAQNAGVEGEVVVEKIMFSDWENGYNAMTDTYENLFEAGVIDPAKVTRCALQNAASVAGMVLTTQAIVVDKPKPKAPAAAAPEGLMV

SEQ ID NO: 84589 - protein, 477 aa, Arabidopsis thaliana; identical to SEQ ID NO: 22384
  peptide (1)..(477): Ceres Seq. ID no. 12675860
  misc_feature (1)..(462): Pfam Name: TCP-1/cpn60 chaperonin family Pfam Description: TCP-1/cpn60 chaperonin family
  misc_feature (1)..(477): Homolog of NCBI NO: 15226314 NR Description: putative rubisco subunit binding-protein alpha protein id: At2g28000.1, supported by cDNA: 25773. [Arabidopsis
  misc_feature (1)..(477): Homolog of NCBI NO: 21554572 NR Description: putative rubisco subunit binding-protein alpha
  misc_feature (1)..(477): Homolog of NCBI NO: 1351030 NR Description: RuBisCO subunit binding-protein alpha subunit,
  misc_feature (1)..(477): Homolog of NCBI NO: 464727 NR Description: RuBisCO subunit binding-protein alpha subunit,
  misc_feature (1)..(477): Homolog of NCBI NO: 99801 NR Description: chaperonine 60K alpha chain - rape (fragment)
  misc_feature (1)..(477): Homolog of NCBI NO: 1710807 NR Description: RuBisCO subunit binding-protein alpha subunit,
  misc_feature (1)..(474): Homolog of NCBI NO: 134102 NR Description: RuBisCO subunit binding-protein alpha subunit,
  misc_feature (1)..(477): Homolog of NCBI NO: 3790441 NR Description: chaperonin 60 alpha subunit [Canavalia lineata]
  misc_feature (1)..(444): Homolog of NCBI NO: 5650721 NR Description: rubisco subunit binding-protein alpha subunit ( AA) (1 is 3rd base in codon) (1488 is 2nd base in codon) [Ricinus
  misc_feature (1)..(443): Homolog of NCBI NO: 134101 NR Description: RUBISCO SUBUNIT BINDING-PROTEIN ALPHA SUBUNIT (60

SEQ ID NO: 84590 - protein, 382 aa, Arabidopsis thaliana
  peptide (1)..(382): Ceres Seq. ID no. 12675861
  misc_feature (1)..(367): Pfam Name: TCP-1/cpn60 chaperonin family Pfam Description: TCP-1/cpn60 chaperonin family
  misc_feature (1)..(382): Homolog of NCBI NO: 15226314 NR Description: putative rubisco subunit binding-protein alpha protein id: At2g28000.1, supported by cDNA: 25773. [Arabidopsis
  misc_feature (1)..(382): Homolog of NCBI NO: 21554572 NR Description: putative rubisco subunit binding-protein alpha
  misc_feature (1)..(382): Homolog of NCBI NO: 1351030 NR Description: RuBisCO subunit binding-protein alpha subunit,
  misc_feature (1)..(382): Homolog of NCBI NO: 464727 NR Description: RuBisCO subunit binding-protein alpha subunit,
  misc_feature (1)..(382): Homolog of NCBI NO: 99801 NR Description: chaperonine 60K alpha chain - rape (fragment)
  misc_feature (1)..(382): Homolog of NCBI NO: 1710807 NR Description: RuBisCO subunit binding-protein alpha subunit,
  misc_feature (1)..(379): Homolog of NCBI NO: 134102 NR Description: RuBisCO subunit binding-protein alpha subunit,
  misc_feature (1)..(382): Homolog of NCBI NO: 3790441 NR Description: chaperonin 60 alpha subunit [Canavalia lineata]
  misc_feature (1)..(349): Homolog of NCBI NO: 5650721 NR Description: rubisco subunit binding-protein alpha subunit ( AA) (1 is 3rd base in codon) (1488 is 2nd base in codon) [Ricinus
  misc_feature (1)..(348): Homolog of NCBI NO: 134101 NR Description: RUBISCO SUBUNIT BINDING-PROTEIN ALPHA SUBUNIT (60
MIADAIDKVGPDGVLSIESSSSFETTVEVEEGMEIDRGYISPQFVTNPEKLLAEFENARVLITDQKITAIKDIIPILEKTTQLRAPLLIIAEDVTGEALATLVVNKLRGVLNVVAVKAPGFGERRKAMLQDIAILTGAEYLAMDMSLLVENATIDQLGIARKVTISKDSTTLIADAASKDELQARIAQLKKELFETDSVYDSEKLAERIAKLSGGVAVIKVGAATETELEDRKLRIEDAKNATFAAIEEGIVPGGGAALVHLSTVIPAIKETFEDADERLGADIVQKALLSPAALIAQNAGVEGEVVVEKIMFSDWENGYNAMTDTYENLFEAGVIDPAKVTRCALQNAASVAGMVLTTQAIVVDKPKPKAPAAAAPEGLMV

SEQ ID NO: 84591 - DNA, 651 bp, Arabidopsis thaliana
  misc_feature (1)..(651): Ceres Seq. ID no. 12675862
  misc_feature: MA Experiment ID: 108434 Result: Up-regulated in Transcription
  misc_feature: MA Experiment 108434 PARAMETER Experiment Name: At_Root_Tips_cDNA_P Parameter: Tissue Value: Root Tips
  misc_feature: MA Experiment ID: 20000180 Result: Up-regulated in Transcription
  misc_feature: MA Experiment 20000180 PARAMETER Experiment Name: At_Germinating_Seeds_P Parameter: Age (hr) Value: 24 vs. 0
  misc_feature: MA Experiment 20000180 PARAMETER Experiment Name: At_Germinating_Seeds_P Parameter: Tissue Value: Germinating Seeds
  misc_feature: MA Experiment ID: 20000235 Result: Up-regulated in Transcription
  misc_feature: MA Experiment 20000235 PARAMETER Experiment Name: At_Siliques_P Parameter: Age (day) Value: 21
  misc_feature: MA Experiment 20000235 PARAMETER Experiment Name: At_Siliques_P Parameter: Organism Value: A. thaliana
  misc_feature: MA Experiment 20000235 PARAMETER Experiment Name: At_Siliques_P Parameter: Plant Line Value: WS
  misc_feature: MA Experiment 20000235 PARAMETER Experiment Name: At_Siliques_P Parameter: Tissue Value: 5-10mm Siliques vs. Whole Plant
accgagccatttcttctgtaagcggatttcatcagcattcagcagccagacgaaacttttaacgatctaccatcgaaccaggatacttcttcattaccatggcaacaagaaatgctttgagaattgtgtctcgtaggttctctagtggcaaagttcttagcgaagaggagagagccgctgagaatgttttcattaagaaaatggagcaggagaagcttcagaagttagctcgacagggtcctggagaacaagcagcagggtcagcaagcgaagcaaaggttgctggtgcaacagcatctgcatcagctgagtcgggcccaaaggtgtcagaagacaagaacagaaactatgcggttgtggcaggtgtggttgctattgtcggttcgattggttggtacttgaaagcaggtggaaagaagcagccagaggtccaagagtaaagagatagattgattgatggacttgtgatgagtgaataaaacagggagtagcattactcattcctcccttgtgagacactttggaatcaaatcttacgttgctgctactctctttgagtcttttcttttgtttttgttacttgacacagtttttttttgtttccggtttgttgacatttagtttctcaatctaaactccagagacttattt

SEQ ID NO: 84592 - protein, 113 aa, Arabidopsis thaliana; identical to SEQ ID NO: 26661
  peptide (1)..(113): Ceres Seq. ID no. 12675863
  misc_feature (1)..(113): Homolog of NCBI NO: 18401511 NR Description: expressed protein; protein id: At2g27730.1, by cDNA: 3359., supported by cDNA: gi_14334933 [Arabidopsis >gi|25091508|sp|Q9ZUX4|UMP2_ARATH Unknown mitochondrial protein
  misc_feature (1)..(113): Homolog of NCBI NO: 21592886 NR Description: F1F0-ATPase inhibitor protein [Arabidopsis
  misc_feature (3)..(111): Homolog of NCBI NO: 5821432 NR Description: F1F0-ATPase inhibitor protein [Oryza sativa

SEQ ID NO: 84593 - protein, 79 aa, Arabidopsis thaliana; identical to SEQ ID NO: 26662
  peptide (1)..(79): Ceres Seq. ID no. 12675864
  misc_feature (1)..(79): Homolog of NCBI NO: 18401511 NR Description: expressed protein; protein id: At2g27730.1, by cDNA: 3359., supported by cDNA: gi_14334933 [Arabidopsis >gi|25091508|sp|Q9ZUX4|UMP2_ARATH Unknown mitochondrial protein
  misc_feature (1)..(79): Homolog of NCBI NO: 21592886 NR Description: F1F0-ATPase inhibitor protein [Arabidopsis
  misc_feature (1)..(77): Homolog of NCBI NO: 5821432 NR Description: F1F0-ATPase inhibitor protein [Oryza sativa

SEQ ID NO: 84594 - DNA, 583 bp, Arabidopsis thaliana
  misc_feature (1)..(583): Ceres Seq. ID no. 12675873
  misc_feature: MA Experiment ID: 108434 Result: Up-regulated in Transcription
  misc_feature: MA Experiment 108434 PARAMETER Experiment Name: At_Root_Tips_cDNA_P Parameter: Tissue Value: Root Tips
  misc_feature: MA Experiment ID: 108462 Result: Down-regulated in Transcription
  misc_feature: MA Experiment 108462 PARAMETER Experiment Name: At_Germinating_Seeds_cDNA_P Parameter: Age (day) Value: 2 vs. 0
  misc_feature: MA Experiment 108462 PARAMETER Experiment Name: At_Germinating_Seeds_cDNA_P Parameter: Tissue Value: Germinating Seeds
  misc_feature: MA Experiment ID: 108463 Result: Down-regulated in Transcription
  misc_feature: MA Experiment 108463 PARAMETER Experiment Name: At_Germinating_Seeds_cDNA_P Parameter: Age (day) Value: 3 vs. 0
  misc_feature: MA Experiment 108463 PARAMETER Experiment Name: At_Germinating_Seeds_cDNA_P Parameter: Tissue Value: Germinating Seeds
  misc_feature: MA Experiment ID: 108573 Result: Down-regulated in Transcription
  misc_feature: MA Experiment 108573 PARAMETER Experiment Name: At_Drought_cDNA_P Parameter: Timepoint (hr) Value: 6
  misc_feature: MA Experiment 108573 PARAMETER Experiment Name: At_Drought_cDNA_P Parameter: Tissue Value: Aerial
  misc_feature: MA Experiment 108573 PARAMETER Experiment Name: At_Drought_cDNA_P Parameter: Treatment Value: Drought vs. No Drought
  misc_feature: MA Experiment ID: 20000264 Result: Up-regulated in Transcription
  misc_feature: MA Experiment 20000264 PARAMETER Experiment Name: At_Open_Flower_P Parameter: Age (day) Value: 21
  misc_feature: MA Experiment 20000264 PARAMETER Experiment Name: At_Open_Flower_P Parameter: Plant Line Value: WS
  misc_feature: MA Experiment 20000264 PARAMETER Experiment Name: At_Open_Flower_P Parameter: Tissue Value: Open Flower vs. Whole Plant
  misc_feature: MA Experiment ID: 20000573 Result: Up-regulated in Transcription
  misc_feature: MA Experiment 20000573 PARAMETER Experiment Name: At_100uM_ABA_Mutants__P Parameter: Organism Value: A. thaliana
  misc_feature: MA Experiment 20000573 PARAMETER Experiment Name: At_100uM_ABA_Mutants__P Parameter: Plant Line Value: CS22 vs. Ler wt
  misc_feature: MA Experiment 20000573 PARAMETER Experiment Name: At_100uM_ABA_Mutants__P Parameter: Timepoint (hr) Value: N/A
  misc_feature: MA Experiment 20000573 PARAMETER Experiment Name: At_100uM_ABA_Mutants__P Parameter: Tissue Value: Whole Plant
  misc_feature: MA Experiment 20000573 PARAMETER Experiment Name: At_100uM_ABA_Mutants__P Parameter: Treatment Value: None
  misc_feature: MA Experiment ID: 20001558 Result: Up-regulated in Transcription
  misc_feature: MA Experiment 20001558 PARAMETER Experiment Name: At_Drought_Soil_Dry_P Parameter: Age (day) Value: 27
  misc_feature: MA Experiment 20001558 PARAMETER Experiment Name: At_Drought_Soil_Dry_P Parameter: Organism Value: A. thaliana
  misc_feature: MA Experiment 20001558 PARAMETER Experiment Name: At_Drought_Soil_Dry_P Parameter: Plant Line Value: WS
  misc_feature: MA Experiment 20001558 PARAMETER Experiment Name: At_Drought_Soil_Dry_P Parameter: Post Timepoint (hr) Value: 6
  misc_feature: MA Experiment 20001558 PARAMETER Experiment Name: At_Drought_Soil_Dry_P Parameter: Post-Treatment Value: Re-Water vs. No Drought
  misc_feature: MA Experiment 20001558 PARAMETER Experiment Name: At_Drought_Soil_Dry_P Parameter: Timepoint (day) Value: 13
  misc_feature: MA Experiment 20001558 PARAMETER Experiment Name: At_Drought_Soil_Dry_P Parameter: Treatment Value: Drought vs. No Drought
  misc_feature: MA Experiment ID: 20001560 Result: Up-regulated in Transcription
  misc_feature: MA Experiment 20001560 PARAMETER Experiment Name: At_Drought_Soil_Dry_P Parameter: Age (day) Value: 28
  misc_feature: MA Experiment 20001560 PARAMETER Experiment Name: At_Drought_Soil_Dry_P Parameter: Organism Value: A. thaliana
  misc_feature: MA Experiment 20001560 PARAMETER Experiment Name: At_Drought_Soil_Dry_P Parameter: Plant Line Value: WS
  misc_feature: MA Experiment 20001560 PARAMETER Experiment Name: At_Drought_Soil_Dry_P Parameter: Post Timepoint (hr) Value: None
  misc_feature: MA Experiment 20001560 PARAMETER Experiment Name: At_Drought_Soil_Dry_P Parameter: Post-Treatment Value: None
  misc_feature: MA Experiment 20001560 PARAMETER Experiment Name: At_Drought_Soil_Dry_P Parameter: Timepoint (day) Value: 14
  misc_feature: MA Experiment 20001560 PARAMETER Experiment Name: At_Drought_Soil_Dry_P Parameter: Treatment Value: Drought vs. No Drought
  misc_feature: MA Experiment ID: 20001757 Result: Up-regulated in Transcription
  misc_feature: MA Experiment 20001757 PARAMETER Experiment Name: At_50mM_NH4NO3_L-to-H_P Parameter: Timepoint (hr) Value: 6
  misc_feature: MA Experiment 20001757 PARAMETER Experiment Name: At_50mM_NH4NO3_L-to-H_P Parameter: Tissue Value: Leaf
  misc_feature: MA Experiment 20001757 PARAMETER Experiment Name: At_50mM_NH4NO3_L-to-H_P Parameter: Treatment Value: 50mM NH4NO3 vs 100mM Mannitol
acttcttcatcgccgtctgcacaaaaccctaatctcacaatctcctacgagatctatcagtctccacgatgaaggttgttgccgcatacttgctcgctgttttgagcggaaaagcttcaccaaccagtgccgatatcaagactatccttggatcagttggtgctgagacagaggattctcagattgagcttttgttgaaggaagtgaaaggaaaagatttggctgagttgattgctgctggaagggagaagttagcttcagtgccgtctggtggcggaggtggtgttgcggttgcttctgctacatctggaggtggaggaggtggtggtgcttctgctgctgagtccaagaaagaagagaagaaggaagaaaaggaagaatccgatgatgacatgggtttcagtctattcgagtaagctggtagtagcatgaaaagtccggttttgttgtcctcttttaatattgtaaccttttgaaatctatatgttgttgttgtttagtttgtattcgatcatcttttttagacattgctgaaattctcaagagtttttgacccgaatgtcatttgcactttgttgttagc

SEQ ID NO: 84595 - protein, 115 aa, Arabidopsis thaliana; identical to SEQ ID NO: 23308
  peptide (1)..(115): Ceres Seq. ID no. 12675874
  misc_feature (17)..(114): Pfam Name: 60s Acidic ribosomal protein Pfam Description: 60s Acidic ribosomal protein
  misc_feature (1)..(115): Homolog of NCBI NO: 15226230 NR Description: 60S acidic ribosomal protein P2; protein id: supported by cDNA: 36076., supported by cDNA: gi_16226550, by cDNA: gi_17065555 [Arabidopsis thaliana]
  misc_feature (1)..(115): Homolog of NCBI NO: 21593095 NR Description: 60S acidic ribosomal protein P2 [Arabidopsis
  misc_feature (1)..(115): Homolog of NCBI NO: 15226231 NR Description: 60S acidic ribosomal protein P2; protein id: supported by cDNA: 19986., supported by cDNA: gi_15294207, by cDNA: gi_20147254 [Arabidopsis thaliana]
  misc_feature (1)..(115): Homolog of NCBI NO: 24473796 NR Description: 60s acidic ribosomal protein [Prunus dulcis]
  misc_feature (1)..(115): Homolog of NCBI NO: 34906408 NR Description: putative 60S acidic ribosomal protein P2A [Oryza
  misc_feature (1)..(115): Homolog of NCBI NO: 15230454 NR Description: acidic ribosomal protein P2 -like; protein id:
  misc_feature (1)..(115): Homolog of NCBI NO: 730583 NR Description: 60S acidic ribosomal protein P2
  misc_feature (1)..(115): Homolog of NCBI NO: 1173073 NR Description: 60S ACIDIC RIBOSOMAL PROTEIN P2A (P2)
  misc_feature (1)..(115): Homolog of NCBI NO: 899610 NR Description: acidic ribosomal protein P2
  misc_feature (1)..(115): Homolog of NCBI NO: 4204372 NR Description: acidic ribosomal protein P2a-2 [Zea mays]

SEQ ID NO: 84596 - DNA, 1806 bp, Arabidopsis thaliana
  misc_feature (1)..(1806): Ceres Seq. ID no. 12675945
  misc_feature: MA Experiment ID: 20000171 Result: Up-regulated in Transcription
  misc_feature: MA Experiment 20000171 PARAMETER Experiment Name: At_42deg_Heat_P Parameter: Age (day) Value: 14
  misc_feature: MA Experiment 20000171 PARAMETER Experiment Name: At_42deg_Heat_P Parameter: Organism Value: A. thaliana
  misc_feature: MA Experiment 20000171 PARAMETER Experiment Name: At_42deg_Heat_P Parameter: Plant Line Value: WS
  misc_feature: MA Experiment 20000171 PARAMETER Experiment Name: At_42deg_Heat_P Parameter: Temperature (deg C) Value: 42 vs. 22
  misc_feature: MA Experiment 20000171 PARAMETER Experiment Name: At_42deg_Heat_P Parameter: Timepoint (hr) Value: 1
  misc_feature: MA Experiment 20000171 PARAMETER Experiment Name: At_42deg_Heat_P Parameter: Tissue Value: Aerial
  misc_feature: MA Experiment ID: 20000182 Result: Up-regulated in Transcription
  misc_feature: MA Experiment 20000182 PARAMETER Experiment Name: At_2mM_SA_P Parameter: Age (day) Value: 14
  misc_feature: MA Experiment 20000182 PARAMETER Experiment Name: At_2mM_SA_P Parameter: Organism Value: A. thaliana
  misc_feature: MA Experiment 20000182 PARAMETER Experiment Name: At_2mM_SA_P Parameter: Plant Line Value: WS
  misc_feature: MA Experiment 20000182 PARAMETER Experiment Name: At_2mM_SA_P Parameter: Timepoint (hr) Value: 6
  misc_feature: MA Experiment 20000182 PARAMETER Experiment Name: At_2mM_SA_P Parameter: Tissue Value: Aerial
  misc_feature: MA Experiment 20000182 PARAMETER Experiment Name: At_2mM_SA_P Parameter: Treatment Value: 2mM SA vs. No Treatment
  misc_feature: MA Experiment ID: 20001905 Result: Up-regulated in Transcription
  misc_feature: MA Experiment 20001905 PARAMETER Experiment Name: At_Drought_Reproduction_P Parameter: Age (day) Value: 40
  misc_feature: MA Experiment 20001905 PARAMETER Experiment Name: At_Drought_Reproduction_P Parameter: Organism Value: A. thaliana
  misc_feature: MA Experiment 20001905 PARAMETER Experiment Name: At_Drought_Reproduction_P Parameter: Plant Line Value: WS
  misc_feature: MA Experiment 20001905 PARAMETER Experiment Name: At_Drought_Reproduction_P Parameter: Timepoint (day) Value: 10
  misc_feature: MA Experiment 20001905 PARAMETER Experiment Name: At_Drought_Reproduction_P Parameter: Tissue Value: Rosettes
  misc_feature: MA Experiment 20001905 PARAMETER Experiment Name: At_Drought_Reproduction_P Parameter: Treatment Value: Drought vs. No Drought
atcctgcgaagaccaaccagtctgttaattttgtataaacaatgaaacgaagaagatcttccgagaatattctctccttctcacgcataccctagaatattgtttcgtctctcttccttctacgtttgcttatttgccccaactcgacgcgaatcatcagcttttataaattctgtcaactcaaagattgtttctgaattggaatcttacaggagcaacacattgcgatatttacaacagctagtattccatggcttacgggaactgctgttaatcctctcttccgtgctgcctaccttgcaaatgatggggaaagacgggtcacgttggtgattccatggctgactttgaagcaccaaaagcttgtctacccaaatagcatcacttttagttccccgtcagagcaagaagcttatgtccgccagtggcttgaggagagagtctcttttcgtttagcctttgagatacgtttctatcctggaaagtttgctattgacaaaaggagtattcttcctgttggggatatatctgatgccattcctgatgaagaggcagacattgctgtcctcgaggagcctgagcatctcacatggtttcatcatggccaaaaatggaaaactaagttcaactacgtcataggaatcgtacacactaactacttggaatacgttaaaagagagaaacaaggccgtgtcaaagcatttttcctcaaatacttaaatagttgggttgttggcatttactgccacaaggtaatcaggttatctgctgcgactcaagaataccctaaatctatagtctgcaatgttcatggcgtcaaccctaaatttctcgaaattgggttgagaaaactagaacagcagaagctccaggagcagcccttcactaaaggcgcatactacattggtaagatggtctggagcaaagggtacaaggagcttcttaaactacttgagaaacaccaaaaggaacttgccgagttagaggttgatttatacggtgatggagaggactctgaagagatcaaagaagcagcccgaaaactcgacttgacggttaatgtttacccaggacgtgatcacgctgactcgctatttcacaactataaagtgtttctcaaccccagcacgacagacgttgtgtgtacaacaactgcagaagccttggcgatgggaaaaatagtagtatgcgcgaatcacatatcgaacaagttcttcaaacagtttcccaactgcagaacctatgacgatggacaaggttttgtaagagccacgctcaaggctcttggggaacaaccatcgcaacttacagagcaacaaaggcatgaactatcatgggaagctgctacacaacggtttataaaagtctctgatctgaaccggttatcaagagctgattcgaacttgtcaaagagaagtgtgtttgcgtcatcttcgattagtgtggggaaaaacttggaggatatgtcagcgtatattcatttcttggcgtctggatttgaagcttccagaacagcttttggtgctatacctggaagcttgcagcccgatgaagagttatgtagagatcttggtttgtctctcaacactccttccccaaatactcgcaagcaagattgacctgttttttaatttatctttgtctgcatatcattgggatatttttgtgtataaatcaatgtatactatctgaatcattctatagcagctttggtgtaatattgatgatgaaagttagatttttcatcttgtggaacatgtatgatgacacgagtctgaattataaaatttagtatatgattccatt

SEQ ID NO: 84597 - protein, 235 aa, Arabidopsis thaliana; identical to SEQ ID NO: 20756
  peptide (1)..(235): Ceres Seq. ID no. 12675946
  misc_feature (1)..(139): Pfam Name: Glycosyl transferases group 1 Pfam Description: Glycosyl transferases group 1
  misc_feature (1)..(235): Homolog of NCBI NO: 22328179 NR Description: similar to digalactosyldiacylglycerol; protein At4g00550.1, supported by cDNA: gi_18141111 [Arabidopsis >gi|18141112|gb|AAL60504.1|AF421193_1 digalactosyldiacylglycerol
  misc_feature (64)..(235): Homolog of NCBI NO: 7486557 NR Description: hypothetical protein F6N23.24 - Arabidopsis >gi|3047114|gb|AAC13625.1| F6N23.24 gene product [Arabidopsis >gi|7267394|emb|CAB80864.1| predicted protein of unknown function
  misc_feature (1)..(28): Homolog of NCBI NO: 7486557 NR Description: hypothetical protein F6N23.24 - Arabidopsis >gi|3047114|gb|AAC13625.1| F6N23.24 gene product [Arabidopsis >gi|7267394|emb|CAB80864.1| predicted protein of unknown function
  misc_feature (1)..(224): Homolog of NCBI NO: 34902044 NR Description: name [Oryza sativa (japonica cultivar-group)]
  misc_feature (1)..(222): Homolog of NCBI NO: 38344037 NR Description: OJ991214_12.18 [Oryza sativa (japonica
  misc_feature (1)..(222): Homolog of NCBI NO: 27542603 NR Description: digalactosyldiacylglycerol synthase [Xerophyta
  misc_feature (1)..(235): Homolog of NCBI NO: 15229824 NR Description: digalactosyldiacylglycerol synthase; protein id: supported by cDNA: gi_18700088, supported by cDNA: gi_20855997, by cDNA: gi_5354157 [Arabidopsis thaliana]
  misc_feature (1)..(235): Homolog of NCBI NO: 18141114 NR Description: digalactosyldiacylglycerol synthase [Arabidopsis
  misc_feature (1)..(63): Homolog of NCBI NO: 30681840 NR Description: digalactosyldiacylglycerol synthase 1 (MGDG:MGDG (galactolipid galactosyltransferase) (DGD1) [Arabidopsis

SEQ ID NO: 84598 - protein, 149 aa, Arabidopsis thaliana
  peptide (1)..(149): Ceres Seq. ID no. 12675947
  misc_feature (1)..(53): Pfam Name: Glycosyl transferases group 1 Pfam Description: Glycosyl transferases group 1
  misc_feature (1)..(149): Homolog of NCBI NO: 22328179 NR Description: similar to digalactosyldiacylglycerol; protein At4g00550.1, supported by cDNA: gi_18141111 [Arabidopsis >gi|18141112|gb|AAL60504.1|AF421193_1 digalactosyldiacylglycerol
  misc_feature (1)..(149): Homolog of NCBI NO: 7486557 NR Description: hypothetical protein F6N23.24 - Arabidopsis >gi|3047114|gb|AAC13625.1| F6N23.24 gene product [Arabidopsis >gi|7267394|emb|CAB80864.1| predicted protein of unknown function
  misc_feature (1)..(138): Homolog of NCBI NO: 34902044 NR Description: name [Oryza sativa (japonica cultivar-group)]
  misc_feature (1)..(136): Homolog of NCBI NO: 38344037 NR Description: OJ991214_12.18 [Oryza sativa (japonica
  misc_feature (1)..(136): Homolog of NCBI NO: 27542603 NR Description: digalactosyldiacylglycerol synthase [Xerophyta
  misc_feature (1)..(149): Homolog of NCBI NO: 15229824 NR Description: digalactosyldiacylglycerol synthase; protein id: supported by cDNA: gi_18700088, supported by cDNA: gi_20855997, by cDNA: gi_5354157 [Arabidopsis thaliana]
  misc_feature (1)..(149): Homolog of NCBI NO: 18141114 NR Description: digalactosyldiacylglycerol synthase [Arabidopsis
MGKIVVCANHISNKFFKQFPNCRTYDDGQGFVRATLKALGEQPSQLTEQQRHELSWEAATQRFIKVSDLNRLSRADSNLSKRSVFASSSISVGKNLEDMSAYIHFLASGFEASRTAFGAIPGSLQPDEELCRDLGLSLNTPSPNTRKQD

SEQ ID NO: 84599 - DNA, 1331 bp, Arabidopsis thaliana
  misc_feature (1)..(1331): Ceres Seq. ID no. 12675948
  misc_feature: MA Experiment ID: 20000169 Result: Up-regulated in Transcription
  misc_feature: MA Experiment 20000169 PARAMETER Experiment Name: At_100uM_ABA_P Parameter: Age (day) Value: 14
  misc_feature: MA Experiment 20000169 PARAMETER Experiment Name: At_100uM_ABA_P Parameter: Organism Value: A. thaliana
  misc_feature: MA Experiment 20000169 PARAMETER Experiment Name: At_100uM_ABA_P Parameter: Plant Line Value: WS
  misc_feature: MA Experiment 20000169 PARAMETER Experiment Name: At_100uM_ABA_P Parameter: Timepoint (hr) Value: 6
  misc_feature: MA Experiment 20000169 PARAMETER Experiment Name: At_100uM_ABA_P Parameter: Tissue Value: Aerial
  misc_feature: MA Experiment 20000169 PARAMETER Experiment Name: At_100uM_ABA_P Parameter: Treatment Value: 100uM ABA vs. No Treatment
  misc_feature: MA Experiment ID: 20000171 Result: Up-regulated in Transcription
  misc_feature: MA Experiment 20000171 PARAMETER Experiment Name: At_42deg_Heat_P Parameter: Age (day) Value: 14
  misc_feature: MA Experiment 20000171 PARAMETER Experiment Name: At_42deg_Heat_P Parameter: Organism Value: A. thaliana
  misc_feature: MA Experiment 20000171 PARAMETER Experiment Name: At_42deg_Heat_P Parameter: Plant Line Value: WS
  misc_feature: MA Experiment 20000171 PARAMETER Experiment Name: At_42deg_Heat_P Parameter: Temperature (deg C) Value: 42 vs. 22
  misc_feature: MA Experiment 20000171 PARAMETER Experiment Name: At_42deg_Heat_P Parameter: Timepoint (hr) Value: 1
  misc_feature: MA Experiment 20000171 PARAMETER Experiment Name: At_42deg_Heat_P Parameter: Tissue Value: Aerial
  misc_feature: MA Experiment ID: 20000173 Result: Up-regulated in Transcription
  misc_feature: MA Experiment 20000173 PARAMETER Experiment Name: At_42deg_Heat_P Parameter: Age (day) Value: 14
  misc_feature: MA Experiment 20000173 PARAMETER Experiment Name: At_42deg_Heat_P Parameter: Organism Value: A. thaliana
  misc_feature: MA Experiment 20000173 PARAMETER Experiment Name: At_42deg_Heat_P Parameter: Plant Line Value: WS
  misc_feature: MA Experiment 20000173 PARAMETER Experiment Name: At_42deg_Heat_P Parameter: Temperature (deg C) Value: 42 vs. 22
  misc_feature: MA Experiment 20000173 PARAMETER Experiment Name: At_42deg_Heat_P Parameter: Timepoint (hr) Value: 6
  misc_feature: MA Experiment 20000173 PARAMETER Experiment Name: At_42deg_Heat_P Parameter: Tissue Value: Aerial
  misc_feature: MA Experiment ID: 20000184 Result: Up-regulated in Transcription
  misc_feature: MA Experiment 20000184 PARAMETER Experiment Name: At_Shoots__P Parameter: Age (day) Value: 7
  misc_feature: MA Experiment 20000184 PARAMETER Experiment Name: At_Shoots__P Parameter: Tissue Value: Shoots vs. Whole Plant
  misc_feature: MA Experiment ID: 20000436 Result: Up-regulated in Transcription
  misc_feature: MA Experiment 20000436 PARAMETER Experiment Name: At_Drought_P Parameter: Age (day) Value: 7
  misc_feature: MA Experiment 20000436 PARAMETER Experiment Name: At_Drought_P Parameter: Organism Value: A. thaliana
  misc_feature: MA Experiment 20000436 PARAMETER Experiment Name: At_Drought_P Parameter: Plant Line Value: WS
  misc_feature: MA Experiment 20000436 PARAMETER Experiment Name: At_Drought_P Parameter: Timepoint (hr) Value: 12
  misc_feature: MA Experiment 20000436 PARAMETER Experiment Name: At_Drought_P Parameter: Tissue Value: Whole Plant
  misc_feature: MA Experiment 20000436 PARAMETER Experiment Name: At_Drought_P Parameter: Treatment Value: Drought vs. No Drought
  misc_feature: MA Experiment ID: 20000794 Result: Up-regulated in Transcription
  misc_feature: MA Experiment 20000794 PARAMETER Experiment Name: At_Petals_P Parameter: Age (day) Value: 23-25 days
  misc_feature: MA Experiment 20000794 PARAMETER Experiment Name: At_Petals_P Parameter: Plant Line Value: WS
  misc_feature: MA Experiment 20000794 PARAMETER Experiment Name: At_Petals_P Parameter: Tissue Value: Petals vs. Whole plant
  misc_feature: MA Experiment ID: 20001248 Result: Down-regulated in Transcription
  misc_feature: MA Experiment 20001248 PARAMETER Experiment Name: At_Far-red-induction_P Parameter: Age (day) Value: 7
  misc_feature: MA Experiment 20001248 PARAMETER Experiment Name: At_Far-red-induction_P Parameter: Light Value: Far-red vs. White
  misc_feature: MA Experiment 20001248 PARAMETER Experiment Name: At_Far-red-induction_P Parameter: Organism Value: A. thaliana
  misc_feature: MA Experiment 20001248 PARAMETER Experiment Name: At_Far-red-induction_P Parameter: Plant Line Value: Columbia
  misc_feature: MA Experiment 20001248 PARAMETER Experiment Name: At_Far-red-induction_P Parameter: Timepoint (hr) Value: 4
  misc_feature: MA Experiment 20001248 PARAMETER Experiment Name: At_Far-red-induction_P Parameter: Tissue Value: Whole Plant
  misc_feature: MA Experiment ID: 20001557 Result: Up-regulated in Transcription
  misc_feature: MA Experiment 20001557 PARAMETER Experiment Name: At_Drought_Soil_Dry_P Parameter: Age (day) Value: 27
  misc_feature: MA Experiment 20001557 PARAMETER Experiment Name: At_Drought_Soil_Dry_P Parameter: Organism Value: A. thaliana
  misc_feature: MA Experiment 20001557 PARAMETER Experiment Name: At_Drought_Soil_Dry_P Parameter: Plant Line Value: WS
  misc_feature: MA Experiment 20001557 PARAMETER Experiment Name: At_Drought_Soil_Dry_P Parameter: Post Timepoint (hr) Value: 3
  misc_feature: MA Experiment 20001557 PARAMETER Experiment Name: At_Drought_Soil_Dry_P Parameter: Post-Treatment Value: Re-Water vs. No Drought
  misc_feature: MA Experiment 20001557 PARAMETER Experiment Name: At_Drought_Soil_Dry_P Parameter: Timepoint (day) Value: 13
  misc_feature: MA Experiment 20001557 PARAMETER Experiment Name: At_Drought_Soil_Dry_P Parameter: Treatment Value: Drought vs. No Drought
  misc_feature: MA Experiment ID: 20001558 Result: Up-regulated in Transcription
  misc_feature: MA Experiment 20001558 PARAMETER Experiment Name: At_Drought_Soil_Dry_P Parameter: Age (day) Value: 27
  misc_feature: MA Experiment 20001558 PARAMETER Experiment Name: At_Drought_Soil_Dry_P Parameter: Organism Value: A. thaliana
  misc_feature: MA Experiment 20001558 PARAMETER Experiment Name: At_Drought_Soil_Dry_P Parameter: Plant Line Value: WS
  misc_feature: MA Experiment 20001558 PARAMETER Experiment Name: At_Drought_Soil_Dry_P Parameter: Post Timepoint (hr) Value: 6
  misc_feature: MA Experiment 20001558 PARAMETER Experiment Name: At_Drought_Soil_Dry_P Parameter: Post-Treatment Value: Re-Water vs. No Drought
  misc_feature: MA Experiment 20001558 PARAMETER Experiment Name: At_Drought_Soil_Dry_P Parameter: Timepoint (day) Value: 13
  misc_feature: MA Experiment 20001558 PARAMETER Experiment Name: At_Drought_Soil_Dry_P Parameter: Treatment Value: Drought vs. No Drought
  misc_feature: MA Experiment ID: 20001905 Result: Up-regulated in Transcription
  misc_feature: MA Experiment 20001905 PARAMETER Experiment Name: At_Drought_Reproduction_P Parameter: Age (day) Value: 40
  misc_feature: MA Experiment 20001905 PARAMETER Experiment Name: At_Drought_Reproduction_P Parameter: Organism Value: A. thaliana
  misc_feature: MA Experiment 20001905 PARAMETER Experiment Name: At_Drought_Reproduction_P Parameter: Plant Line Value: WS
  misc_feature: MA Experiment 20001905 PARAMETER Experiment Name: At_Drought_Reproduction_P Parameter: Timepoint (day) Value: 10
  misc_feature: MA Experiment 20001905 PARAMETER Experiment Name: At_Drought_Reproduction_P Parameter: Tissue Value: Rosettes
  misc_feature: MA Experiment 20001905 PARAMETER Experiment Name: At_Drought_Reproduction_P Parameter: Treatment Value: Drought vs. No Drought
atggaaggcaaagaagaagatgtacgagtgggagctaacaagttcccggagaggcaacccatcggtacatcggctcagtccaccgacaaggactacaaagagccacctcctgcgccactgttcgagcccggcgagctcagctcatggtctttctacagagccggaatagctgagtttatcgctactttcttgtttctctacatcactgttttgactgtaatgggagttaagagagcaccaaacatgtgtgcttctgttggaatccaaggtatcgcttgggcttttggtggcatgatctttgctcttgtctactgtactgctggaatttcaggtggacacatcaaccctgctgtaacattcggtctgttcttggctcggaagttatctctgaccagagcagtgttctacatgattatgcaatgtcttggagccatctgtggtgccggagtcgtcaaaggtttccagccaacgccgtaccagactctcggtggtggtgctaacaccgttgctcatggctacaccaaaggttctggccttggtgctgaaatcatcggaacattcgttctcgtctacactgtcttctccgccaccgacgccaagagaagcgcccgtgactcacacgtcccgattttggcgccgctcccaatcggatttgcagtgttcttggtacacttggcaacaataccgatcaccgggaccggaatcaacccagctagaagtcttggagccgcaattatctacaacaaggaccactcttgggatgaccattggattttctgggttggaccattcattggagcagctctagcagcactatatcaccagattgtcatcagagcgattcctttcaagagcaagagttagagacacacagaaagattccacggtccagaatttgttctttagtagtttctttgcttatctatctaatgtagcttgtgttttgcaatgtaatgagcctttcaagaatatgtatttgggatttctaatcagcttttgtctatgtaaaaactatgtgtttcttttttcttcctatactcgtctcagatgctttatggcaaagggtctctgaagtctaaggtgattagtgctccggttattgatgttttgaatagtttgttcgacgaatataaaataaacatagtcaaccctcattctgtatcaacatcaagttctcgggttggttttgagagacatgattatgaagatgatcatgacttcgtgaatgtgggggttgaaggattggcctctgtttatgacaagatggtgaatgaagagcttgactattgtgtacttgcaagaaagtgttgaaaacacaagggccaatacat

SEQ ID NO: 84600 - protein, 287 aa, Arabidopsis thaliana; identical to SEQ ID NO: 29005
  peptide (1)..(287): Ceres Seq. ID no. 12675949
  misc_feature (45)..(274): Pfam Name: Major intrinsic protein Pfam Description: Major intrinsic protein
  misc_feature (1)..(287): Homolog of NCBI NO: 18411332 NR Description: probable plasma membrane intrinsic protein 1c; id: At4g00430.1, supported by cDNA: gi_20466717, supported by gi_2373400, supported by cDNA: gi_535779 [Arabidopsis thaliana]
  misc_feature (1)..(287): Homolog of NCBI NO: 7441247 NR Description: probable plasma membrane intrinsic protein 1c - thaliana >gi|2252825|gb|AAB62824.1| Similar to transmembrane coded for by A. thaliana cDNA H37637; coded for by A. for by A.
  misc_feature (1)..(287): Homolog of NCBI NO: 2373401 NR Description: transmembrane protein [Arabidopsis thaliana]
  misc_feature (1)..(287): Homolog of NCBI NO: 15223438 NR Description: plasma membrane intrinsic protein 1c, putative; id: At1g01620.1, supported by cDNA: gi_13194765, supported by
  misc_feature (1)..(287): Homolog of NCBI NO: 17065068 NR Description: plasma membrane intrinsic protein 1C protein B) [Arabidopsis thaliana] >gi|25083740|gb|AAN72112.1| membrane intrinsic protein 1C (transmembrane protein B)
  misc_feature (1)..(287): Homolog of NCBI NO: 472875 NR Description: plasma membrane intrinsic protein 1c [Arabidopsis
  misc_feature (1)..(287): Homolog of NCBI NO: 15233109 NR Description: plasma membrane intrinsic protein 1a; protein id: supported by cDNA: 6690., supported by cDNA: gi_16648674, by cDNA: gi_20453350 [Arabidopsis thaliana]
  misc_feature (1)..(287): Homolog of NCBI NO: 3551131 NR Description: plasma membrane aquaporin (PAQ1) [Raphanus
  misc_feature (1)..(287): Homolog of NCBI NO: 15236485 NR Description: water channel - like protein; protein id: supported by cDNA: 3982., supported by cDNA: gi_16649156,
  misc_feature (1)..(287): Homolog of NCBI NO: 10799095 NR Description: aquaporin PIP1b2 [Brassica oleracea]

SEQ ID NO: 84601 - protein, 214 aa, Arabidopsis thaliana; identical to SEQ ID NO: 29006
  peptide (1)..(214): Ceres Seq. ID no. 12675950
  misc_feature (1)..(201): Pfam Name: Major intrinsic protein Pfam Description: Major intrinsic protein
  misc_feature (1)..(214): Homolog of NCBI NO: 18411332 NR Description: probable plasma membrane intrinsic protein 1c; id: At4g00430.1, supported by cDNA: gi_20466717, supported by gi_2373400, supported by cDNA: gi_535779 [Arabidopsis thaliana]
  misc_feature (1)..(214): Homolog of NCBI NO: 7441247 NR Description: probable plasma membrane intrinsic protein 1c - thaliana >gi|2252825|gb|AAB62824.1| Similar to transmembrane coded for by A. thaliana cDNA H37637; coded for by A. for by A.
  misc_feature (1)..(214): Homolog of NCBI NO: 2373401 NR Description: transmembrane protein [Arabidopsis thaliana]
  misc_feature (1)..(214): Homolog of NCBI NO: 15223438 NR Description: plasma membrane intrinsic protein 1c, putative; id: At1g01620.1, supported by cDNA: gi_13194765, supported by
  misc_feature (1)..(214): Homolog of NCBI NO: 17065068 NR Description: plasma membrane intrinsic protein 1C protein B) [Arabidopsis thaliana] >gi|25083740|gb|AAN72112.1| membrane intrinsic protein 1C (transmembrane protein B)
  misc_feature (1)..(214): Homolog of NCBI NO: 472875 NR Description: plasma membrane intrinsic protein 1c [Arabidopsis
  misc_feature (1)..(214): Homolog of NCBI NO: 15233109 NR Description: plasma membrane intrinsic protein 1a; protein id: supported by cDNA: 6690., supported by cDNA: gi_16648674, by cDNA: gi_20453350 [Arabidopsis thaliana]
  misc_feature (1)..(214): Homolog of NCBI NO: 3551131 NR Description: plasma membrane aquaporin (PAQ1) [Raphanus
  misc_feature (1)..(214): Homolog of NCBI NO: 15236485 NR Description: water channel - like protein; protein id: supported by cDNA: 3982., supported by cDNA: gi_16649156,
  misc_feature (1)..(214): Homolog of NCBI NO: 10799095 NR Description: aquaporin PIP1b2 [Brassica oleracea]

SEQ ID NO: 84602 - protein, 206 aa, Arabidopsis thaliana; identical to SEQ ID NO: 29007
  peptide (1)..(206): Ceres Seq. ID no. 12675951
  misc_feature (1)..(193): Pfam Name: Major intrinsic protein Pfam Description: Major intrinsic protein
  misc_feature (1)..(206): Homolog of NCBI NO: 18411332 NR Description: probable plasma membrane intrinsic protein 1c; id: At4g00430.1, supported by cDNA: gi_20466717, supported by gi_2373400, supported by cDNA: gi_535779 [Arabidopsis thaliana]
  misc_feature (1)..(206): Homolog of NCBI NO: 7441247 NR Description: probable plasma membrane intrinsic protein 1c - thaliana >gi|2252825|gb|AAB62824.1| Similar to transmembrane coded for by A. thaliana cDNA H37637; coded for by A. for by A.
  misc_feature (1)..(206): Homolog of NCBI NO: 2373401 NR Description: transmembrane protein [Arabidopsis thaliana]
  misc_feature (1)..(206): Homolog of NCBI NO: 15223438 NR Description: plasma membrane intrinsic protein 1c, putative; id: At1g01620.1, supported by cDNA: gi_13194765, supported by
  misc_feature (1)..(206): Homolog of NCBI NO: 17065068 NR Description: plasma membrane intrinsic protein 1C protein B) [Arabidopsis thaliana] >gi|25083740|gb|AAN72112.1| membrane intrinsic protein 1C (transmembrane protein B)
  misc_feature (1)..(206): Homolog of NCBI NO: 472875 NR Description: plasma membrane intrinsic protein 1c [Arabidopsis
  misc_feature (1)..(206): Homolog of NCBI NO: 15233109 NR Description: plasma membrane intrinsic protein 1a; protein id: supported by cDNA: 6690., supported by cDNA: gi_16648674, by cDNA: gi_20453350 [Arabidopsis thaliana]
  misc_feature (1)..(206): Homolog of NCBI NO: 3551131 NR Description: plasma membrane aquaporin (PAQ1) [Raphanus
  misc_feature (1)..(206): Homolog of NCBI NO: 15236485 NR Description: water channel - like protein; protein id: supported by cDNA: 3982., supported by cDNA: gi_16649156,
  misc_feature (1)..(206): Homolog of NCBI NO: 10799095 NR Description: aquaporin PIP1b2 [Brassica oleracea]

SEQ ID NO: 84603 - DNA, 1083 bp, Arabidopsis thaliana
  misc_feature (1)..(1083): Ceres Seq. ID no. 12675956
  misc_feature: MA Experiment ID: 20000169 Result: Up-regulated in Transcription
  misc_feature: MA Experiment 20000169 PARAMETER Experiment Name: At_100uM_ABA_P Parameter: Age (day) Value: 14
  misc_feature: MA Experiment 20000169 PARAMETER Experiment Name: At_100uM_ABA_P Parameter: Organism Value: A. thaliana
  misc_feature: MA Experiment 20000169 PARAMETER Experiment Name: At_100uM_ABA_P Parameter: Plant Line Value: WS
  misc_feature: MA Experiment 20000169 PARAMETER Experiment Name: At_100uM_ABA_P Parameter: Timepoint (hr) Value: 6
  misc_feature: MA Experiment 20000169 PARAMETER Experiment Name: At_100uM_ABA_P Parameter: Tissue Value: Aerial
  misc_feature: MA Experiment 20000169 PARAMETER Experiment Name: At_100uM_ABA_P Parameter: Treatment Value: 100uM ABA vs. No Treatment
  misc_feature: MA Experiment ID: 20000171 Result: Up-regulated in Transcription
  misc_feature: MA Experiment 20000171 PARAMETER Experiment Name: At_42deg_Heat_P Parameter: Age (day) Value: 14
  misc_feature: MA Experiment 20000171 PARAMETER Experiment Name: At_42deg_Heat_P Parameter: Organism Value: A. thaliana
  misc_feature: MA Experiment 20000171 PARAMETER Experiment Name: At_42deg_Heat_P Parameter: Plant Line Value: WS
  misc_feature: MA Experiment 20000171 PARAMETER Experiment Name: At_42deg_Heat_P Parameter: Temperature (deg C) Value: 42 vs. 22
  misc_feature: MA Experiment 20000171 PARAMETER Experiment Name: At_42deg_Heat_P Parameter: Timepoint (hr) Value: 1
  misc_feature: MA Experiment 20000171 PARAMETER Experiment Name: At_42deg_Heat_P Parameter: Tissue Value: Aerial
  misc_feature: MA Experiment ID: 20000173 Result: Up-regulated in Transcription
  misc_feature: MA Experiment 20000173 PARAMETER Experiment Name: At_42deg_Heat_P Parameter: Age (day) Value: 14
  misc_feature: MA Experiment 20000173 PARAMETER Experiment Name: At_42deg_Heat_P Parameter: Organism Value: A. thaliana
  misc_feature: MA Experiment 20000173 PARAMETER Experiment Name: At_42deg_Heat_P Parameter: Plant Line Value: WS
  misc_feature: MA Experiment 20000173 PARAMETER Experiment Name: At_42deg_Heat_P Parameter: Temperature (deg C) Value: 42 vs. 22
  misc_feature: MA Experiment 20000173 PARAMETER Experiment Name: At_42deg_Heat_P Parameter: Timepoint (hr) Value: 6
  misc_feature: MA Experiment 20000173 PARAMETER Experiment Name: At_42deg_Heat_P Parameter: Tissue Value: Aerial
  misc_feature: MA Experiment ID: 20000184 Result: Up-regulated in Transcription
  misc_feature: MA Experiment 20000184 PARAMETER Experiment Name: At_Shoots__P Parameter: Age (day) Value: 7
  misc_feature: MA Experiment 20000184 PARAMETER Experiment Name: At_Shoots__P Parameter: Tissue Value: Shoots vs. Whole Plant
  misc_feature: MA Experiment ID: 20000436 Result: Up-regulated in Transcription
  misc_feature: MA Experiment 20000436 PARAMETER Experiment Name: At_Drought_P Parameter: Age (day) Value: 7
  misc_feature: MA Experiment 20000436 PARAMETER Experiment Name: At_Drought_P Parameter: Organism Value: A. thaliana
  misc_feature: MA Experiment 20000436 PARAMETER Experiment Name: At_Drought_P Parameter: Plant Line Value: WS
  misc_feature: MA Experiment 20000436 PARAMETER Experiment Name: At_Drought_P Parameter: Timepoint (hr) Value: 12
  misc_feature: MA Experiment 20000436 PARAMETER Experiment Name: At_Drought_P Parameter: Tissue Value: Whole Plant
  misc_feature: MA Experiment 20000436 PARAMETER Experiment Name: At_Drought_P Parameter: Treatment Value: Drought vs. No Drought
  misc_feature: MA Experiment ID: 20000794 Result: Up-regulated in Transcription
  misc_feature: MA Experiment 20000794 PARAMETER Experiment Name: At_Petals_P Parameter: Age (day) Value: 23-25 days
  misc_feature: MA Experiment 20000794 PARAMETER Experiment Name: At_Petals_P Parameter: Plant Line Value: WS
  misc_feature: MA Experiment 20000794 PARAMETER Experiment Name: At_Petals_P Parameter: Tissue Value: Petals vs. Whole plant
  misc_feature: MA Experiment ID: 20001248 Result: Down-regulated in Transcription
  misc_feature: MA Experiment 20001248 PARAMETER Experiment Name: At_Far-red-induction_P Parameter: Age (day) Value: 7
  misc_feature: MA Experiment 20001248 PARAMETER Experiment Name: At_Far-red-induction_P Parameter: Light Value: Far-red vs. White
  misc_feature: MA Experiment 20001248 PARAMETER Experiment Name: At_Far-red-induction_P Parameter: Organism Value: A. thaliana
  misc_feature: MA Experiment 20001248 PARAMETER Experiment Name: At_Far-red-induction_P Parameter: Plant Line Value: Columbia
  misc_feature: MA Experiment 20001248 PARAMETER Experiment Name: At_Far-red-induction_P Parameter: Timepoint (hr) Value: 4
  misc_feature: MA Experiment 20001248 PARAMETER Experiment Name: At_Far-red-induction_P Parameter: Tissue Value: Whole Plant
  misc_feature: MA Experiment ID: 20001557 Result: Up-regulated in Transcription
  misc_feature: MA Experiment 20001557 PARAMETER Experiment Name: At_Drought_Soil_Dry_P Parameter: Age (day) Value: 27
  misc_feature: MA Experiment 20001557 PARAMETER Experiment Name: At_Drought_Soil_Dry_P Parameter: Organism Value: A. thaliana
  misc_feature: MA Experiment 20001557 PARAMETER Experiment Name: At_Drought_Soil_Dry_P Parameter: Plant Line Value: WS
  misc_feature: MA Experiment 20001557 PARAMETER Experiment Name: At_Drought_Soil_Dry_P Parameter: Post Timepoint (hr) Value: 3
  misc_feature: MA Experiment 20001557 PARAMETER Experiment Name: At_Drought_Soil_Dry_P Parameter: Post-Treatment Value: Re-Water vs. No Drought
  misc_feature: MA Experiment 20001557 PARAMETER Experiment Name: At_Drought_Soil_Dry_P Parameter: Timepoint (day) Value: 13
  misc_feature: MA Experiment 20001557 PARAMETER Experiment Name: At_Drought_Soil_Dry_P Parameter: Treatment Value: Drought vs. No Drought
  misc_feature: MA Experiment ID: 20001558 Result: Up-regulated in Transcription
  misc_feature: MA Experiment 20001558 PARAMETER Experiment Name: At_Drought_Soil_Dry_P Parameter: Age (day) Value: 27
  misc_feature: MA Experiment 20001558 PARAMETER Experiment Name: At_Drought_Soil_Dry_P Parameter: Organism Value: A. thaliana
  misc_feature: MA Experiment 20001558 PARAMETER Experiment Name: At_Drought_Soil_Dry_P Parameter: Plant Line Value: WS
  misc_feature: MA Experiment 20001558 PARAMETER Experiment Name: At_Drought_Soil_Dry_P Parameter: Post Timepoint (hr) Value: 6
  misc_feature: MA Experiment 20001558 PARAMETER Experiment Name: At_Drought_Soil_Dry_P Parameter: Post-Treatment Value: Re-Water vs. No Drought
  misc_feature: MA Experiment 20001558 PARAMETER Experiment Name: At_Drought_Soil_Dry_P Parameter: Timepoint (day) Value: 13
  misc_feature: MA Experiment 20001558 PARAMETER Experiment Name: At_Drought_Soil_Dry_P Parameter: Treatment Value: Drought vs. No Drought
  misc_feature: MA Experiment ID: 20001905 Result: Up-regulated in Transcription
  misc_feature: MA Experiment 20001905 PARAMETER Experiment Name: At_Drought_Reproduction_P Parameter: Age (day) Value: 40
  misc_feature: MA Experiment 20001905 PARAMETER Experiment Name: At_Drought_Reproduction_P Parameter: Organism Value: A. thaliana
  misc_feature: MA Experiment 20001905 PARAMETER Experiment Name: At_Drought_Reproduction_P Parameter: Plant Line Value: WS
  misc_feature: MA Experiment 20001905 PARAMETER Experiment Name: At_Drought_Reproduction_P Parameter: Timepoint (day) Value: 10
  misc_feature: MA Experiment 20001905 PARAMETER Experiment Name: At_Drought_Reproduction_P Parameter: Tissue Value: Rosettes
  misc_feature: MA Experiment 20001905 PARAMETER Experiment Name: At_Drought_Reproduction_P Parameter: Treatment Value: Drought vs. No Drought
agctacacacgagaaagaaaaagctcacaactttaacctttctggagagagaagaacaaaagagggagagggagagaaatggaaggcaaagaagaagatgtacgagtgggagctaacaagttcccggagaggcaacccatcggtacatcggctcagtccaccgacaaggactacaaagagccacctcctgcgccactgttcgagcccggcgagctcagctcatggtctttctacagagccggaatagctgagtttatcgctactttcttgtttctctacatcactgttttgactgtaatgggagttaagagagcaccaaacatgtgtgcttctgttggaatccaaggtatcgcttgggcttttggtggcatgatctttgctcttgtctactgtactgctggaatttcaggtggacacatcaaccctgctgtaacattcggtctgttcttggctcggaagttatctctgaccagagcagtgttctacatgattatgcaatgtcttggagccatctgtggtgccggagtcgtcaaaggtttccagccaacgccgtaccagactctcggtggtggtgctaacaccgttgctcatggctacaccaaaggttctggccttggtgctgaaatcatcggaacattcgttctcgtctacactgtcttctccgccaccgacgccaagagaagcgcccgtgactcacacgtcccgattttggcgccgctcccaatcggatttgcagtgttcttggtacacttggcaacaataccgatcaccgggaccggaatcaacccagctagaagtcttggagccgcaattatctacaacaaggaccactcttgggatgaccattggattttctgggttggaccattcattggagcagctctagcagcactatatcaccagattgtcatcagagcgattcctttcaagagcaagagttagagacacacagaaagattccacggtccagaatttgttctttagtagtttctttgcttatctatctaatgtagcttgtgttttgcaatgtaatgagcctttcaagaatatgtatttgggatttctaatcagcttttgtctatg

SEQ ID NO: 84604 - protein, 287 aa, Arabidopsis thaliana; identical to SEQ ID NO: 29005
  peptide (1)..(287): Ceres Seq. ID no. 12675957
  misc_feature (45)..(274): Pfam Name: Major intrinsic protein Pfam Description: Major intrinsic protein
  misc_feature (1)..(287): Homolog of NCBI NO: 18411332 NR Description: probable plasma membrane intrinsic protein 1c; id: At4g00430.1, supported by cDNA: gi_20466717, supported by gi_2373400, supported by cDNA: gi_535779 [Arabidopsis thaliana]
  misc_feature (1)..(287): Homolog of NCBI NO: 7441247 NR Description: probable plasma membrane intrinsic protein 1c - thaliana >gi|2252825|gb|AAB62824.1| Similar to transmembrane coded for by A. thaliana cDNA H37637; coded for by A. for by A.
  misc_feature (1)..(287): Homolog of NCBI NO: 2373401 NR Description: transmembrane protein [Arabidopsis thaliana]
  misc_feature (1)..(287): Homolog of NCBI NO: 15223438 NR Description: plasma membrane intrinsic protein 1c, putative; id: At1g01620.1, supported by cDNA: gi_13194765, supported by
  misc_feature (1)..(287): Homolog of NCBI NO: 17065068 NR Description: plasma membrane intrinsic protein 1C protein B) [Arabidopsis thaliana] >gi|25083740|gb|AAN72112.1| membrane intrinsic protein 1C (transmembrane protein B)
  misc_feature (1)..(287): Homolog of NCBI NO: 472875 NR Description: plasma membrane intrinsic protein 1c [Arabidopsis
  misc_feature (1)..(287): Homolog of NCBI NO: 15233109 NR Description: plasma membrane intrinsic protein 1a; protein id: supported by cDNA: 6690., supported by cDNA: gi_16648674, by cDNA: gi_20453350 [Arabidopsis thaliana]
  misc_feature (1)..(287): Homolog of NCBI NO: 3551131 NR Description: plasma membrane aquaporin (PAQ1) [Raphanus
  misc_feature (1)..(287): Homolog of NCBI NO: 15236485 NR Description: water channel - like protein; protein id: supported by cDNA: 3982., supported by cDNA: gi_16649156,
  misc_feature (1)..(287): Homolog of NCBI NO: 10799095 NR Description: aquaporin PIP1b2 [Brassica oleracea]

SEQ ID NO: 84605 - protein, 214 aa, Arabidopsis thaliana; identical to SEQ ID NO: 29006
  peptide (1)..(214): Ceres Seq. ID no. 12675958
  misc_feature (1)..(201): Pfam Name: Major intrinsic protein Pfam Description: Major intrinsic protein
  misc_feature (1)..(214): Homolog of NCBI NO: 18411332 NR Description: probable plasma membrane intrinsic protein 1c; id: At4g00430.1, supported by cDNA: gi_20466717, supported by gi_2373400, supported by cDNA: gi_535779 [Arabidopsis thaliana]
  misc_feature (1)..(214): Homolog of NCBI NO: 7441247 NR Description: probable plasma membrane intrinsic protein 1c - thaliana >gi|2252825|gb|AAB62824.1| Similar to transmembrane coded for by A. thaliana cDNA H37637; coded for by A. for by A.
  misc_feature (1)..(214): Homolog of NCBI NO: 2373401 NR Description: transmembrane protein [Arabidopsis thaliana]
  misc_feature (1)..(214): Homolog of NCBI NO: 15223438 NR Description: plasma membrane intrinsic protein 1c, putative; id: At1g01620.1, supported by cDNA: gi_13194765, supported by
  misc_feature (1)..(214): Homolog of NCBI NO: 17065068 NR Description: plasma membrane intrinsic protein 1C protein B) [Arabidopsis thaliana] >gi|25083740|gb|AAN72112.1| membrane intrinsic protein 1C (transmembrane protein B)
  misc_feature (1)..(214): Homolog of NCBI NO: 472875 NR Description: plasma membrane intrinsic protein 1c [Arabidopsis
  misc_feature (1)..(214): Homolog of NCBI NO: 15233109 NR Description: plasma membrane intrinsic protein 1a; protein id: supported by cDNA: 6690., supported by cDNA: gi_16648674, by cDNA: gi_20453350 [Arabidopsis thaliana]
  misc_feature (1)..(214): Homolog of NCBI NO: 3551131 NR Description: plasma membrane aquaporin (PAQ1) [Raphanus
  misc_feature (1)..(214): Homolog of NCBI NO: 15236485 NR Description: water channel - like protein; protein id: supported by cDNA: 3982., supported by cDNA: gi_16649156,
  misc_feature (1)..(214): Homolog of NCBI NO: 10799095 NR Description: aquaporin PIP1b2 [Brassica oleracea]

SEQ ID NO: 84606 - protein, 206 aa, Arabidopsis thaliana; identical to SEQ ID NO: 29007
  peptide (1)..(206): Ceres Seq. ID no. 12675959
  misc_feature (1)..(193): Pfam Name: Major intrinsic protein Pfam Description: Major intrinsic protein
  misc_feature (1)..(206): Homolog of NCBI NO: 18411332 NR Description: probable plasma membrane intrinsic protein 1c; id: At4g00430.1, supported by cDNA: gi_20466717, supported by gi_2373400, supported by cDNA: gi_535779 [Arabidopsis thaliana]
  misc_feature (1)..(206): Homolog of NCBI NO: 7441247 NR Description: probable plasma membrane intrinsic protein 1c - thaliana >gi|2252825|gb|AAB62824.1| Similar to transmembrane coded for by A. thaliana cDNA H37637; coded for by A. for by A.
  misc_feature (1)..(206): Homolog of NCBI NO: 2373401 NR Description: transmembrane protein [Arabidopsis thaliana]
  misc_feature (1)..(206): Homolog of NCBI NO: 15223438 NR Description: plasma membrane intrinsic protein 1c, putative; id: At1g01620.1, supported by cDNA: gi_13194765, supported by
  misc_feature (1)..(206): Homolog of NCBI NO: 17065068 NR Description: plasma membrane intrinsic protein 1C protein B) [Arabidopsis thaliana] >gi|25083740|gb|AAN72112.1| membrane intrinsic protein 1C (transmembrane protein B)
  misc_feature (1)..(206): Homolog of NCBI NO: 472875 NR Description: plasma membrane intrinsic protein 1c [Arabidopsis
  misc_feature (1)..(206): Homolog of NCBI NO: 15233109 NR Description: plasma membrane intrinsic protein 1a; protein id: supported by cDNA: 6690., supported by cDNA: gi_16648674, by cDNA: gi_20453350 [Arabidopsis thaliana]
  misc_feature (1)..(206): Homolog of NCBI NO: 3551131 NR Description: plasma membrane aquaporin (PAQ1) [Raphanus
  misc_feature (1)..(206): Homolog of NCBI NO: 15236485 NR Description: water channel - like protein; protein id: supported by cDNA: 3982., supported by cDNA: gi_16649156,
  misc_feature (1)..(206): Homolog of NCBI NO: 10799095 NR Description: aquaporin PIP1b2 [Brassica oleracea]

SEQ ID NO: 84607 - DNA, 1500 bp, Arabidopsis thaliana
  misc_feature (1)..(1500): Ceres Seq. ID no. 12675960
  misc_feature: MA Experiment ID: 108573 Result: Up-regulated in Transcription
  misc_feature: MA Experiment 108573 PARAMETER Experiment Name: At_Drought_cDNA_P Parameter: Timepoint (hr) Value: 6
  misc_feature: MA Experiment 108573 PARAMETER Experiment Name: At_Drought_cDNA_P Parameter: Tissue Value: Aerial
  misc_feature: MA Experiment 108573 PARAMETER Experiment Name: At_Drought_cDNA_P Parameter: Treatment Value: Drought vs. No Drought
  misc_feature: MA Experiment ID: 108577 Result: Down-regulated in Transcription
  misc_feature: MA Experiment 108577 PARAMETER Experiment Name: At_42deg_Heat_cDNA_P Parameter: Temperature (deg C) Value: 42 vs. 22
  misc_feature: MA Experiment 108577 PARAMETER Experiment Name: At_42deg_Heat_cDNA_P Parameter: Timepoint (hr) Value: 6
  misc_feature: MA Experiment 108577 PARAMETER Experiment Name: At_42deg_Heat_cDNA_P Parameter: Tissue Value: Aerial
aacgtttcgacagtctctacaccgtcatgaacactgaatcagttgtcgagttccttgggaatgtgaccttgttgcagcggttacctagttcctctctgaagagaatctccgaagtcgttgtcttcaaaggttatgacagaggtgattatgtggttcgtgaaaatcaaaatgtggatggagtttattttctcttgcaaggacaggctcaggttctgagatcagccggagaggaaaactatcaagagttccctttgaaacgatatgatttcttcggccatggtattttcggggatgtttactcagcagatgttgttgctgtgacagagcttacctgcttgctgttgatgtctgatcatcgtgctttacttgaaataaagtcagtctcggattcagataaggaacgctgtcttgtggaagacatactatatctagaaccattagatttgaatgtataccgggggttcaccccacctaatgctccaacctatggaaaggtttatggagggcaattagttggacaggcacttgccgcagcatcaaaaactgttgaaactatgaagatagtccataattttcattgctatttccttcttgttggagatataaatattcccatcatatatgatgttaaccgcttacgtgacggcaacaactttgccaccagaagtgtagatgctagacagaaaggaaaaactatattcaccttgttcgcgtcatttcagaaaaagcaacaaggttttattcaccaggagtcgaccatgcctcatacaccagctcctgaaacgcttctaccaagggaggagatgcttgaacggcttgttactgagcctctgctacctagggattaccgaaaccaagttgcaactgaaattagtgttccattccctatagatattcgattttgtgagccaaatcgttccactaaacagaataagtctcctccaagactaaaatattggtttagagcaaagggaaaactttctgatgatgatcaagctttgcacagatgtgtggttgcatttgcttccgatttgatattcgccactatcagtttaaaccctcaccggagagagggcatgagtgtagctgctcttagcctggaccactcgatgtggttccaccgacctgtaagagcagatgattggttgttgtttgtgtgagtccaactgcgaccgaaagccgcggttttgcaactggcaaaatgttcaacagaaagggagagctggtggtatcattgacgcaagaagctgtgttaagagaagctgtgactattaagccatccttcggggccaagctatgaagccataggattttgatagtgagagaattgctgcatctgttactcctcacggtcacattccaaagagtcgtcacttatactacatttgcatatgtttttcgatccacaattattattttcccctctaaaagggtctacacatatgtttgtttgtaaccacgataatgtttcaacagcaatgaaaaagcaaacagtggttc

SEQ ID NO: 84608 - protein, 385 aa, Arabidopsis thaliana
  peptide (1)..(385): Ceres Seq. ID no. 12675961
  misc_feature (286)..(385): Pfam Name: Acyl-CoA thioesterase Pfam Description: Acyl-CoA thioesterase
  misc_feature (9)..(385): Homolog of NCBI NO: 30678177 NR Description: acyl CoA thioesterase -related [Arabidopsis
  misc_feature (9)..(385): Homolog of NCBI NO: 26449786 NR Description: putative acyl CoA thioesterase [Arabidopsis
  misc_feature (13)..(385): Homolog of NCBI NO: 38345758 NR Description: OSJNBa0065O17.11 [Oryza sativa (japonica
  misc_feature (152)..(385): Homolog of NCBI NO: 25304479 NR Description: hypothetical protein T1N6.10 - Arabidopsis
  misc_feature (173)..(240): Homolog of NCBI NO: 15236850 NR Description: putative acetyl CoA thioesterase; protein id:
  misc_feature (335)..(385): Homolog of NCBI NO: 15236850 NR Description: putative acetyl CoA thioesterase; protein id:
  misc_feature (281)..(315): Homolog of NCBI NO: 15236850 NR Description: putative acetyl CoA thioesterase; protein id:
  misc_feature (9)..(165): Homolog of NCBI NO: 15236847 NR Description: similar to Similar to protein kinase; protein id:
  misc_feature (131)..(384): Homolog of NCBI NO: 14548007 NR Description: Peroxisomal acyl-coenzyme A thioester hydrolase 1
  misc_feature (131)..(384): Homolog of NCBI NO: 18543371 NR Description: 4,8-dimethylnonanoyl-CoA thioesterase; acyl-CoA thioesterase 1 [Rattus norvegicus]
RFDSLYTVMNTESVVEFLGNVTLLQRLPSSSLKRISEVVVFKGYDRGDYVVRENQNVDGVYFLLQGQAQVLRSAGEENYQEFPLKRYDFFGHGIFGDVYSADVVAVTELTCLLLMSDHRALLEIKSVSDSDKERCLVEDILYLEPLDLNVYRGFTPPNAPTYGKVYGGQLVGQALAAASKTVETMKIVHNFHCYFLLVGDINIPIIYDVNRLRDGNNFATRSVDARQKGKTIFTLFASFQKKQQGFIHQESTMPHTPAPETLLPREEMLERLVTEPLLPRDYRNQVATEISVPFPIDIRFCEPNRSTKQNKSPPRLKYWFRAKGKLSDDDQALHRCVVAFASDLIFATISLNPHRREGMSVAALSLDHSMWFHRPVRADDWLLFV

SEQ ID NO: 84609 - protein, 377 aa, Arabidopsis thaliana
  peptide (1)..(377): Ceres Seq. ID no. 12675962
  misc_feature (278)..(377): Pfam Name: Acyl-CoA thioesterase Pfam Description: Acyl-CoA thioesterase
  misc_feature (1)..(377): Homolog of NCBI NO: 30678177 NR Description: acyl CoA thioesterase -related [Arabidopsis
  misc_feature (1)..(377): Homolog of NCBI NO: 26449786 NR Description: putative acyl CoA thioesterase [Arabidopsis
  misc_feature (5)..(377): Homolog of NCBI NO: 38345758 NR Description: OSJNBa0065O17.11 [Oryza sativa (japonica
  misc_feature (144)..(377): Homolog of NCBI NO: 25304479 NR Description: hypothetical protein T1N6.10 - Arabidopsis
  misc_feature (165)..(232): Homolog of NCBI NO: 15236850 NR Description: putative acetyl CoA thioesterase; protein id:
  misc_feature (327)..(377): Homolog of NCBI NO: 15236850 NR Description: putative acetyl CoA thioesterase; protein id:
  misc_feature (273)..(307): Homolog of NCBI NO: 15236850 NR Description: putative acetyl CoA thioesterase; protein id:
  misc_feature (1)..(157): Homolog of NCBI NO: 15236847 NR Description: similar to Similar to protein kinase; protein id:
  misc_feature (123)..(376): Homolog of NCBI NO: 14548007 NR Description: Peroxisomal acyl-coenzyme A thioester hydrolase 1
  misc_feature (123)..(376): Homolog of NCBI NO: 18543371 NR Description: 4,8-dimethylnonanoyl-CoA thioesterase; acyl-CoA thioesterase 1 [Rattus norvegicus]
MNTESVVEFLGNVTLLQRLPSSSLKRISEVVVFKGYDRGDYVVRENQNVDGVYFLLQGQAQVLRSAGEENYQEFPLKRYDFFGHGIFGDVYSADVVAVTELTCLLLMSDHRALLEIKSVSDSDKERCLVEDILYLEPLDLNVYRGFTPPNAPTYGKVYGGQLVGQALAAASKTVETMKIVHNFHCYFLLVGDINIPIIYDVNRLRDGNNFATRSVDARQKGKTIFTLFASFQKKQQGFIHQESTMPHTPAPETLLPREEMLERLVTEPLLPRDYRNQVATEISVPFPIDIRFCEPNRSTKQNKSPPRLKYWFRAKGKLSDDDQALHRCVVAFASDLIFATISLNPHRREGMSVAALSLDHSMWFHRPVRADDWLLFV

SEQ ID NO: 84610 - protein, 271 aa, Arabidopsis thaliana; identical to SEQ ID NO: 22843
  peptide (1)..(271): Ceres Seq. ID no. 12675963
  misc_feature (172)..(271): Pfam Name: Acyl-CoA thioesterase Pfam Description: Acyl-CoA thioesterase
  misc_feature (1)..(271): Homolog of NCBI NO: 30678177 NR Description: acyl CoA thioesterase -related [Arabidopsis
  misc_feature (1)..(271): Homolog of NCBI NO: 26449786 NR Description: putative acyl CoA thioesterase [Arabidopsis
  misc_feature (1)..(271): Homolog of NCBI NO: 38345758 NR Description: OSJNBa0065O17.11 [Oryza sativa (japonica
  misc_feature (38)..(271): Homolog of NCBI NO: 25304479 NR Description: hypothetical protein T1N6.10 - Arabidopsis
  misc_feature (59)..(126): Homolog of NCBI NO: 15236850 NR Description: putative acetyl CoA thioesterase; protein id:
  misc_feature (221)..(271): Homolog of NCBI NO: 15236850 NR Description: putative acetyl CoA thioesterase; protein id:
  misc_feature (167)..(201): Homolog of NCBI NO: 15236850 NR Description: putative acetyl CoA thioesterase; protein id:
  misc_feature (1)..(51): Homolog of NCBI NO: 15236847 NR Description: similar to Similar to protein kinase; protein id:
  misc_feature (17)..(270): Homolog of NCBI NO: 14548007 NR Description: Peroxisomal acyl-coenzyme A thioester hydrolase 1
  misc_feature (17)..(270): Homolog of NCBI NO: 18543371 NR Description: 4,8-dimethylnonanoyl-CoA thioesterase; acyl-CoA thioesterase 1 [Rattus norvegicus]

SEQ ID NO: 84611 - DNA, 2497 bp, Arabidopsis thaliana
  misc_feature (1)..(2497): Ceres Seq. ID no. 12675968
  misc_feature: MA Experiment ID: 108434 Result: Up-regulated in Transcription
  misc_feature: MA Experiment 108434 PARAMETER Experiment Name: At_Root_Tips_cDNA_P Parameter: Tissue Value: Root Tips
  misc_feature: MA Experiment ID: 108573 Result: Up-regulated in Transcription
  misc_feature: MA Experiment 108573 PARAMETER Experiment Name: At_Drought_cDNA_P Parameter: Timepoint (hr) Value: 6
  misc_feature: MA Experiment 108573 PARAMETER Experiment Name: At_Drought_cDNA_P Parameter: Tissue Value: Aerial
  misc_feature: MA Experiment 108573 PARAMETER Experiment Name: At_Drought_cDNA_P Parameter: Treatment Value: Drought vs. No Drought
  misc_feature: MA Experiment ID: 108576 Result: Down-regulated in Transcription
  misc_feature: MA Experiment 108576 PARAMETER Experiment Name: At_42deg_Heat_cDNA_P Parameter: Temperature (deg C) Value: 42 vs. 22
  misc_feature: MA Experiment 108576 PARAMETER Experiment Name: At_42deg_Heat_cDNA_P Parameter: Timepoint (hr) Value: 1
  misc_feature: MA Experiment 108576 PARAMETER Experiment Name: At_42deg_Heat_cDNA_P Parameter: Tissue Value: Aerial
  misc_feature: MA Experiment ID: 108595 Result: Down-regulated in Transcription
  misc_feature: MA Experiment 108595 PARAMETER Experiment Name: At_Ler-pi_Ovule_cDNA_P Parameter: Plant Line Value: null
  misc_feature: MA Experiment ID: 108608 Result: Down-regulated in Transcription
  misc_feature: MA Experiment 108608 PARAMETER Experiment Name: At_100uM_ABA_cDNA_P Parameter: Timepoint (hr) Value: 1
  misc_feature: MA Experiment 108608 PARAMETER Experiment Name: At_100uM_ABA_cDNA_P Parameter: Tissue Value: Aerial
  misc_feature: MA Experiment 108608 PARAMETER Experiment Name: At_100uM_ABA_cDNA_P Parameter: Treatment Value: 100uM ABA vs. No Treatment
  misc_feature: MA Experiment ID: 20000087 Result: Down-regulated in Transcription
  misc_feature: MA Experiment 20000087 PARAMETER Experiment Name: At_100uM_ABA_Mutants_cDNA_P Parameter: Plant Line Value: WS
  misc_feature: MA Experiment 20000087 PARAMETER Experiment Name: At_100uM_ABA_Mutants_cDNA_P Parameter: Timepoint (hr) Value: 6
  misc_feature: MA Experiment 20000087 PARAMETER Experiment Name: At_100uM_ABA_Mutants_cDNA_P Parameter: Tissue Value: Aerial
  misc_feature: MA Experiment 20000087 PARAMETER Experiment Name: At_100uM_ABA_Mutants_cDNA_P Parameter: Treatment Value: 100uM ABA vs. No Treatment
  misc_feature: MA Experiment ID: 20000185 Result: Up-regulated in Transcription
  misc_feature: MA Experiment 20000185 PARAMETER Experiment Name: At_Roots__P Parameter: Age (day) Value: 7 vs. 21
  misc_feature: MA Experiment 20000185 PARAMETER Experiment Name: At_Roots__P Parameter: Organism Value: A. thaliana
  misc_feature: MA Experiment 20000185 PARAMETER Experiment Name: At_Roots__P Parameter: Tissue Value: Roots vs. Whole Plant
  misc_feature: MA Experiment ID: 20001557 Result: Up-regulated in Transcription
  misc_feature: MA Experiment 20001557 PARAMETER Experiment Name: At_Drought_Soil_Dry_P Parameter: Age (day) Value: 27
  misc_feature: MA Experiment 20001557 PARAMETER Experiment Name: At_Drought_Soil_Dry_P Parameter: Organism Value: A. thaliana
  misc_feature: MA Experiment 20001557 PARAMETER Experiment Name: At_Drought_Soil_Dry_P Parameter: Plant Line Value: WS
  misc_feature: MA Experiment 20001557 PARAMETER Experiment Name: At_Drought_Soil_Dry_P Parameter: Post Timepoint (hr) Value: 3
  misc_feature: MA Experiment 20001557 PARAMETER Experiment Name: At_Drought_Soil_Dry_P Parameter: Post-Treatment Value: Re-Water vs. No Drought
  misc_feature: MA Experiment 20001557 PARAMETER Experiment Name: At_Drought_Soil_Dry_P Parameter: Timepoint (day) Value: 13
  misc_feature: MA Experiment 20001557 PARAMETER Experiment Name: At_Drought_Soil_Dry_P Parameter: Treatment Value: Drought vs. No Drought
  misc_feature: MA Experiment ID: 20001757 Result: Down-regulated in Transcription
  misc_feature: MA Experiment 20001757 PARAMETER Experiment Name: At_50mM_NH4NO3_L-to-H_P Parameter: Timepoint (hr) Value: 6
  misc_feature: MA Experiment 20001757 PARAMETER Experiment Name: At_50mM_NH4NO3_L-to-H_P Parameter: Tissue Value: Leaf
  misc_feature: MA Experiment 20001757 PARAMETER Experiment Name: At_50mM_NH4NO3_L-to-H_P Parameter: Treatment Value: 50mM NH4NO3 vs 100mM Mannitol
acacccattaaaatatttcatcaacttgtcggtaaaattaattcttggcttattctatctttctttctctgtcttcttctttcaatttttcaataacaataatacagatgtgtatacattagatacacgtatactagtactaaacttcactgtgtgatctgatctagagtttttatactatcagaataaataatagtcgacaatttgggatttgtttatggtttacttcacatgaatcacatacgttcatgtcgattcctttgagatactgtctcgatttcgtttttttctcttgtttaatttaaaattattgtaaagcacgtggatttgcttgtcttggttttgttttctccttcgacctctttgatgaaatcgaggaacctacaatttcttcgtcgatccaaatggtagcttagtggtggtgataataggtttctcctcttgattggctccagctttaggtttttttttttatctttgtttctgcttcgattcccaaaatttaccctttcgattttgagtctaactagtcgagttgactcagtagagtcgaaagcttctgggtttacgaagagacatctcctaattgaaacaaaacctttcctttccattgggctgagaaaaaagcaagagtctttgaatattttttggagcgtggttttatttagatgggaggtcaatgctctagcctgagttgttgcaggaacacttcacacaagacagctgttcttgaagctcctgatgttgataatggagagagtagtgagatcactgatgttcctaatttccgggagtatactttagaacagcttaaggcagctacttctggttttgccgtggagtatattgtatctgaacatggagaaaaggctccaaatgttgtctataaagggaaattggagaaccaaaagaagattgctgtcaagcgttttactagaatggcctggcctgattcacgacagttcttggaggaagcgaggtcggttggtcagctacggagtgagagaatggccaatttactcggatgttgctgcgaaggtgacgagaggttacttgtagcagagtttatgcctaatgaaacactagccaaacacctttttcactgggaaactcaacctatgaaatggactatgaggctacgagttgttttatatctagcacaagctcttgaatactgcaccagcaaaggccgtactctttaccacgacctcaatgcttaccgggttttgtttgatgaggaatgcaatccaagactatctacttttggcttgatgaagaatagtcgggatggaaaaagttacagcactaatcttgctttcacccctcctgaatatctacgaactgggagaattactccagagagtgtaatatacagctttggcactcttctgcttgatcttctcagcggaaaacatatacctcctagccatgcccttgatctgattagagacagaaatctccagacgctaactgattcttgcctagatgggcagttttctgatagtgatggtacagagctagtacgcctagcttctcgttgtcttcagtatgaagctcgtgagcggccaaacaccaaatctttagtgactgccttgacacctcttcagaaggagacagaggtcctgtctcatgttctaatgggtctacctcacagtggttcagtctctcctctgtcccctcttggtgaggcttgttcaagaagggacctgaccgctatgcttgagatcctggagaaacttggatacaaagacgacgagggtgtcaccaatgagctctcgtttcatatgtggacagaccagatgcaagagtctttgaactcgaagaagaagggtgatgtggctttcaggcaaaaagactttagagaggccatcgagtgttacacacagtttattgatggaggaatgatctctccaacagtgtgtgctcggcgtagtctgtgttacctaatgagtgacatgccgaaagaagctttagatgatgcaattcaggctcaagtgatctctcccgtgtggcatgtcgcatcatatctgcagtctgcttcccttggtatcctgggaatggagaaggaatctcaaatcgcactgaaagagggctcgaaccttgaagcaaagatgaatggagttccccgagtgaagtaagatatatagcatttaagatttttcttgttgggaaagatgaaagaacatcttaccaagtaaaaggggtatgaatcttttgagcacaatgatgggaaaacactcaagagcaatgcaaaactatagaccctcttcttctggttgtatgaggtgttttgcccttcttgtgcctctttttatgggcattgaattgaaggagtcatttcctttattagctttgaaatccatttcctgaaactttattgtactaaaaaacccattattgcagaaaccaaaagagggttttgtttcttttgatctataggtcacacagactaaacatgtatgaactcttgtcttttgactaaagagatattcgacag

SEQ ID NO: 84612 - protein, 489 aa, Arabidopsis thaliana; identical to SEQ ID NO: 21116
  peptide (1)..(489): Ceres Seq. ID no. 12675969
  misc_feature (1)..(489): Homolog of NCBI NO: 22328189 NR Description: hypothetical protein; protein id: At4g00710.1, by cDNA: gi_17064837, supported by cDNA: gi_20259853 [Arabidopsis >gi|17064838|gb|AAL32573.1| Unknown protein [Arabidopsis
  misc_feature (1)..(489): Homolog of NCBI NO: 7486564 NR Description: hypothetical protein F6N23.9 - Arabidopsis >gi|3047104|gb|AAC13615.1| F6N23.9 gene product [Arabidopsis >gi|7267410|emb|CAB80880.1| hypothetical protein [Arabidopsis
  misc_feature (1)..(481): Homolog of NCBI NO: 15223469 NR Description: protein kinase, putative; protein id: At1g01740.1
  misc_feature (1)..(483): Homolog of NCBI NO: 15237604 NR Description: protein kinase-like; protein id: At5g41260.1
  misc_feature (1)..(481): Homolog of NCBI NO: 22327962 NR Description: protein kinase - like; protein id: At5g59010.1, by cDNA: gi_19715585 [Arabidopsis thaliana]
  misc_feature (1)..(481): Homolog of NCBI NO: 15232406 NR Description: protein kinase -like protein; protein id: supported by cDNA: 150889., supported by cDNA: gi_15450845
  misc_feature (1)..(481): Homolog of NCBI NO: 21553556 NR Description: protein kinase-like protein [Arabidopsis thaliana]
  misc_feature (99)..(312): Homolog of NCBI NO: 6633851 NR Description: F2K11.13 [Arabidopsis thaliana]
  misc_feature (329)..(483): Homolog of NCBI NO: 6633851 NR Description: F2K11.13 [Arabidopsis thaliana]
  misc_feature (26)..(100): Homolog of NCBI NO: 6633851 NR Description: F2K11.13 [Arabidopsis thaliana]

SEQ ID NO: 84613 - protein, 399 aa, Arabidopsis thaliana; identical to SEQ ID NO: 21117
  peptide (1)..(399): Ceres Seq. ID no. 12675970
  misc_feature (1)..(399): Homolog of NCBI NO: 22328189 NR Description: hypothetical protein; protein id: At4g00710.1, by cDNA: gi_17064837, supported by cDNA: gi_20259853 [Arabidopsis >gi|17064838|gb|AAL32573.1| Unknown protein [Arabidopsis
  misc_feature (1)..(399): Homolog of NCBI NO: 7486564 NR Description: hypothetical protein F6N23.9 - Arabidopsis >gi|3047104|gb|AAC13615.1| F6N23.9 gene product [Arabidopsis >gi|7267410|emb|CAB80880.1| hypothetical protein [Arabidopsis
  misc_feature (1)..(391): Homolog of NCBI NO: 15223469 NR Description: protein kinase, putative; protein id: At1g01740.1
  misc_feature (1)..(393): Homolog of NCBI NO: 15237604 NR Description: protein kinase-like; protein id: At5g41260.1
  misc_feature (1)..(391): Homolog of NCBI NO: 22327962 NR Description: protein kinase - like; protein id: At5g59010.1, by cDNA: gi_19715585 [Arabidopsis thaliana]
  misc_feature (1)..(391): Homolog of NCBI NO: 15232406 NR Description: protein kinase -like protein; protein id: supported by cDNA: 150889., supported by cDNA: gi_15450845
  misc_feature (1)..(391): Homolog of NCBI NO: 21553556 NR Description: protein kinase-like protein [Arabidopsis thaliana]
  misc_feature (9)..(222): Homolog of NCBI NO: 6633851 NR Description: F2K11.13 [Arabidopsis thaliana]
  misc_feature (239)..(393): Homolog of NCBI NO: 6633851 NR Description: F2K11.13 [Arabidopsis thaliana]
  misc_feature (1)..(391): Homolog of NCBI NO: 25518738 NR Description: hypothetical protein T1N6.15 - Arabidopsis

SEQ ID NO: 84614 - protein, 376 aa, Arabidopsis thaliana; identical to SEQ ID NO: 21118
  peptide (1)..(376): Ceres Seq. ID no. 12675971
  misc_feature (1)..(376): Homolog of NCBI NO: 22328189 NR Description: hypothetical protein; protein id: At4g00710.1, by cDNA: gi_17064837, supported by cDNA: gi_20259853 [Arabidopsis >gi|17064838|gb|AAL32573.1| Unknown protein [Arabidopsis
  misc_feature (1)..(376): Homolog of NCBI NO: 7486564 NR Description: hypothetical protein F6N23.9 - Arabidopsis >gi|3047104|gb|AAC13615.1| F6N23.9 gene product [Arabidopsis >gi|7267410|emb|CAB80880.1| hypothetical protein [Arabidopsis
  misc_feature (1)..(368): Homolog of NCBI NO: 15223469 NR Description: protein kinase, putative; protein id: At1g01740.1
  misc_feature (1)..(370): Homolog of NCBI NO: 15237604 NR Description: protein kinase-like; protein id: At5g41260.1
  misc_feature (1)..(368): Homolog of NCBI NO: 22327962 NR Description: protein kinase - like; protein id: At5g59010.1, by cDNA: gi_19715585 [Arabidopsis thaliana]
  misc_feature (1)..(368): Homolog of NCBI NO: 15232406 NR Description: protein kinase -like protein; protein id: supported by cDNA: 150889., supported by cDNA: gi_15450845
  misc_feature (1)..(368): Homolog of NCBI NO: 21553556 NR Description: protein kinase-like protein [Arabidopsis thaliana]
  misc_feature (1)..(199): Homolog of NCBI NO: 6633851 NR Description: F2K11.13 [Arabidopsis thaliana]
  misc_feature (216)..(370): Homolog of NCBI NO: 6633851 NR Description: F2K11.13 [Arabidopsis thaliana]
  misc_feature (1)..(368): Homolog of NCBI NO: 25518738 NR Description: hypothetical protein T1N6.15 - Arabidopsis

SEQ ID NO: 84615 - DNA, 1187 bp, Arabidopsis thaliana
  misc_feature (1)..(1187): Ceres Seq. ID no. 12675997
  misc_feature: MA Experiment ID: 20000227 Result: Down-regulated in Transcription
  misc_feature: MA Experiment 20000227 PARAMETER Experiment Name: At_Root-Tips-vs-Tops_P Parameter: Tissue Value: Root Tips vs. Root Tops
  misc_feature: MA Experiment ID: 20000235 Result: Up-regulated in Transcription
  misc_feature: MA Experiment 20000235 PARAMETER Experiment Name: At_Siliques_P Parameter: Age (day) Value: 21
  misc_feature: MA Experiment 20000235 PARAMETER Experiment Name: At_Siliques_P Parameter: Organism Value: A. thaliana
  misc_feature: MA Experiment 20000235 PARAMETER Experiment Name: At_Siliques_P Parameter: Plant Line Value: WS
  misc_feature: MA Experiment 20000235 PARAMETER Experiment Name: At_Siliques_P Parameter: Tissue Value: 5-10mm Siliques vs. Whole Plant
  misc_feature: MA Experiment ID: 20000265 Result: Down-regulated in Transcription
  misc_feature: MA Experiment 20000265 PARAMETER Experiment Name: At_Open_Flower_P Parameter: Age (day) Value: 21
  misc_feature: MA Experiment 20000265 PARAMETER Experiment Name: At_Open_Flower_P Parameter: Plant Line Value: WS
  misc_feature: MA Experiment 20000265 PARAMETER Experiment Name: At_Open_Flower_P Parameter: Tissue Value: Closed Flower vs. Whole Plant
  misc_feature: MA Experiment ID: 20000286 Result: Down-regulated in Transcription
  misc_feature: MA Experiment 20000286 PARAMETER Experiment Name: At_Open_Flower_P Parameter: Age (day) Value: 21
  misc_feature: MA Experiment 20000286 PARAMETER Experiment Name: At_Open_Flower_P Parameter: Plant Line Value: WS
  misc_feature: MA Experiment 20000286 PARAMETER Experiment Name: At_Open_Flower_P Parameter: Tissue Value: Half Open vs. Whole Plant
  misc_feature: MA Experiment ID: 20000437 Result: Down-regulated in Transcription
  misc_feature: MA Experiment 20000437 PARAMETER Experiment Name: At_Drought_P Parameter: Age (day) Value: 8
  misc_feature: MA Experiment 20000437 PARAMETER Experiment Name: At_Drought_P Parameter: Organism Value: A. thaliana
  misc_feature: MA Experiment 20000437 PARAMETER Experiment Name: At_Drought_P Parameter: Plant Line Value: WS
  misc_feature: MA Experiment 20000437 PARAMETER Experiment Name: At_Drought_P Parameter: Timepoint (hr) Value: 24
  misc_feature: MA Experiment 20000437 PARAMETER Experiment Name: At_Drought_P Parameter: Tissue Value: Whole Plant
  misc_feature: MA Experiment 20000437 PARAMETER Experiment Name: At_Drought_P Parameter: Treatment Value: Drought vs. No Drought
  misc_feature: MA Experiment ID: 20000438 Result: Up-regulated in Transcription
  misc_feature: MA Experiment 20000438 PARAMETER Experiment Name: At_Shoots__P Parameter: Age (day) Value: 14
  misc_feature: MA Experiment 20000438 PARAMETER Experiment Name: At_Shoots__P Parameter: Tissue Value: Shoots vs. Whole Plant
atcttctcacttcaaactctctctatctttctctctcacctcatattatgaactaaagatttctctgaaagctgacttcataaactttttctgaagaagaaacacacaaaaacgatcgatcttgaattgattctttgtagtattttatttacatatatatatagatgggaagacattcatgttgttacaaacagaaactgaggaaaggactttggtctcctgaagaagatgagaagcttcttcgttacatcactaagtatggtcatggttgctggagctctgtccctaaacaagctggtttacagagatgtggaaaaagttgtagattaagatggataaattatttaagaccagatttgaagagaggagcattttctcaagatgaagaaaatctcattattgaacttcatgccgttcttggcaatagatggtctcagatagctgcacagcttcctggaagaaccgacaatgaaatcaagaatctttggaattcttgtttgaagaagaaattgaggctgagaggaattgacccggttacacacaagctcttaaccgaaatcgaaaccggtacagatgacaaaacaaaaccggttgagaagagtcaacagacctacctcgttgagactgatggctcctctagtaccactacttgtagtactaaccaaaacaacaacactgatcatctttataccggaaatttcggttttcaacggttaagtctagaaaacggttcaagaatcgcagccggttctgacctcggtatctggattccccaaaccggaagaaaccatcatcatcatgtcgatgaaaccatccctagtgcagtgagcatcagcaaattcaagagagtaactacaacaattcaacattctttggaaatgggaatctgaattggggattaacaatggaggaaaatcaaaatccattcacaatatcgaatcattcaaattcgtccttatacagtgatataaaatcagagaccaatttttttggcacagaggctacaaatgttggtatgtggccatgtaaccagctccagcctcagcaacatgcatatggccatatataaatcttcttgtatattataaggtgtgtgaatcttcttttttttttttctcaaatatggttttttttttttttaatgggttgtgtatatagtttgtgttatatatcatttaatttaacag

SEQ ID NO: 84616 - protein, 241 aa, Arabidopsis thaliana
  peptide (1)..(241): Ceres Seq. ID no. 12675998
  misc_feature (14)..(61): Pfam Name: Myb-like DNA-binding domain Pfam Description: Myb-like DNA-binding domain
  misc_feature (1)..(221): Homolog of NCBI NO: 15234262 NR Description: myb family transcription factor; protein id: supported by cDNA: gi_15375280, supported by cDNA: gi_15450989
  misc_feature (1)..(221): Homolog of NCBI NO: 7438352 NR Description: transcription factor MYB4 homolog T15B16.7 -
  misc_feature (1)..(203): Homolog of NCBI NO: 22329445 NR Description: myb family transcription factor; protein id: supported by cDNA: gi_20465974 [Arabidopsis thaliana] putative transcription factor [Arabidopsis thaliana]
  misc_feature (1)..(203): Homolog of NCBI NO: 25294104 NR Description: hypothetical protein [imported] - Arabidopsis >gi|3482929|gb|AAC33214.1| Putative transcription factor
  misc_feature (1)..(207): Homolog of NCBI NO: 28628949 NR Description: MYB2 [Dendrobium sp. XMW-2002-2]
  misc_feature (1)..(149): Homolog of NCBI NO: 15223612 NR Description: myb family transcription factor; protein id: supported by cDNA: 250386. [Arabidopsis thaliana]
  misc_feature (1)..(149): Homolog of NCBI NO: 34902542 NR Description: putative transcription factor (myb) [Oryza sativa
  misc_feature (1)..(134): Homolog of NCBI NO: 2280530 NR Description: ATMYB4 [Arabidopsis thaliana]
  misc_feature (1)..(134): Homolog of NCBI NO: 30690317 NR Description: myb transcription factor (ATMYB4) [Arabidopsis >gi|20466622|gb|AAM20628.1| transcription factor ATMYB4 thaliana] >gi|30984580|gb|AAP42753.1| At5g26655 [Arabidopsis
  misc_feature (43)..(134): Homolog of NCBI NO: 7446174 NR Description: transcription factor MYB4 - Arabidopsis thaliana
MGRHSCCYKQKLRKGLWSPEEDEKLLRYITKYGHGCWSSVPKQAGLQRCGKSCRLRWINYLRPDLKRGAFSQDEENLIIELHAVLGNRWSQIAAQLPGRTDNEIKNLWNSCLKKKLRLRGIDPVTHKLLTEIETGTDDKTKPVEKSQQTYLVETDGSSSTTTCSTNQNNNTDHLYTGNFGFQRLSLENGSRIAAGSDLGIWIPQTGRNHHHHVDETIPSAVSISKFKRVTTTIQHSLEMGI

SEQ ID NO: 84617 - DNA, 1085 bp, Arabidopsis thaliana
  misc_feature (1)..(1085): Ceres Seq. ID no. 12676009
  misc_feature: MA Experiment ID: 108573 Result: Up-regulated in Transcription
  misc_feature: MA Experiment 108573 PARAMETER Experiment Name: At_Drought_cDNA_P Parameter: Timepoint (hr) Value: 6
  misc_feature: MA Experiment 108573 PARAMETER Experiment Name: At_Drought_cDNA_P Parameter: Tissue Value: Aerial
  misc_feature: MA Experiment 108573 PARAMETER Experiment Name: At_Drought_cDNA_P Parameter: Treatment Value: Drought vs. No Drought
  misc_feature: MA Experiment ID: 108595 Result: Down-regulated in Transcription
  misc_feature: MA Experiment 108595 PARAMETER Experiment Name: At_Ler-pi_Ovule_cDNA_P Parameter: Plant Line Value: null
  misc_feature: MA Experiment ID: 108668 Result: Up-regulated in Transcription
  misc_feature: MA Experiment 108668 PARAMETER Experiment Name: At_2mM_SA_cDNA_P Parameter: Plant Line Value: WS
  misc_feature: MA Experiment 108668 PARAMETER Experiment Name: At_2mM_SA_cDNA_P Parameter: Timepoint (hr) Value: 6
  misc_feature: MA Experiment 108668 PARAMETER Experiment Name: At_2mM_SA_cDNA_P Parameter: Treatment Value: 2mM SA vs. No Treatment
  misc_feature: MA Experiment ID: 20000224 Result: Down-regulated in Transcription
  misc_feature: MA Experiment ID: 20000437 Result: Up-regulated in Transcription
  misc_feature: MA Experiment 20000437 PARAMETER Experiment Name: At_Drought_P Parameter: Age (day) Value: 8
  misc_feature: MA Experiment 20000437 PARAMETER Experiment Name: At_Drought_P Parameter: Organism Value: A. thaliana
  misc_feature: MA Experiment 20000437 PARAMETER Experiment Name: At_Drought_P Parameter: Plant Line Value: WS
  misc_feature: MA Experiment 20000437 PARAMETER Experiment Name: At_Drought_P Parameter: Timepoint (hr) Value: 24
  misc_feature: MA Experiment 20000437 PARAMETER Experiment Name: At_Drought_P Parameter: Tissue Value: Whole Plant
  misc_feature: MA Experiment 20000437 PARAMETER Experiment Name: At_Drought_P Parameter: Treatment Value: Drought vs. No Drought
tttcccaaaattggattcaaagttctttctttttgtcttcctcgtacatcacagcatcaagggttttcgacattaccagctattatgcttgaattcgaggacgcaaggagttaaaagagcaagtcttttgagttgaggaagcttctgtagaggattattatttcaggggaaatttaagggtttgatcagcttttgtgtgttgtgcgggatggatcaaattgtttcaggagaagaagaagatcttgatgtagatattgaagatggtagattcaatgagacacaagagataacgacgaatcttgtttcagcggaaggggattcagagaatgttttgaatcatgtttggagtggacgtttgagttttgatgggtctgaaaagagtgctgatgatctagtagaccctttaatgggagagggaaagcggagagaaagaagcagtcaaagtttggatctttcggatatgaagtttgataatgataagtttaagaagacgagaaaaccttcaaagccaccgaggcctccaaaaggtccgttactgagtgctaatgaccagaagttgatgagggaaatcacggagcttgctatgagaaagcgtgctcggattgaacggatgaaaacactcagaagattgaaagcagcaaagtcctcgtctccctgcagtagcattttcgccatgatagtgacggttatattcttcgtcttcttaatctttcaagggttcttcacaagcaatgcgagtttgaattctgacaattcacctgcaccaaataattcagctaataaccgtatggtctctgttcagttctacaatgagtttgctcctcgtgagagaatcgatcccagccctactacttctttcaggtataagagagtctcaggtgcagacaatgaagaaaacacaagagaagttaccagatgagtttcttctctttggattcttgtaaaatgtaaccaaaaacactacttatgtttttgtttgttcgtaaattcttgacatcactctattgttcctttgatctgtttgtgttcacatgtttgtctctctgttactcttcttgtaaatattcttatggatgaatctgctc

SEQ ID NO: 84618 - protein, 236 aa, Arabidopsis thaliana; identical to SEQ ID NO: 29151
  peptide (1)..(236): Ceres Seq. ID no. 12676010
  misc_feature (1)..(236): Homolog of NCBI NO: 15235188 NR Description: PITSLRE protein kinase family; protein id: supported by cDNA: 13256. [Arabidopsis thaliana]
  misc_feature (1)..(236): Homolog of NCBI NO: 25372617 NR Description: T6A9.7 protein - Arabidopsis thaliana
  misc_feature (1)..(172): Homolog of NCBI NO: 30678287 NR Description: expressed protein [Arabidopsis thaliana] unknown protein [Arabidopsis thaliana]
  misc_feature (91)..(233): Homolog of NCBI NO: 15228970 NR Description: hypothetical protein; protein id: At3g17120.1, by cDNA: gi_18087520 [Arabidopsis thaliana] gb|AAD22658.1~gene_id:K14A17.19~similar to unknown protein

SEQ ID NO: 84619 - protein, 170 aa, Arabidopsis thaliana; identical to SEQ ID NO: 29152
  peptide (1)..(170): Ceres Seq. ID no. 12676011
  misc_feature (1)..(170): Homolog of NCBI NO: 15235188 NR Description: PITSLRE protein kinase family; protein id: supported by cDNA: 13256. [Arabidopsis thaliana]
  misc_feature (1)..(170): Homolog of NCBI NO: 25372617 NR Description: T6A9.7 protein - Arabidopsis thaliana
  misc_feature (1)..(106): Homolog of NCBI NO: 30678287 NR Description: expressed protein [Arabidopsis thaliana] unknown protein [Arabidopsis thaliana]
  misc_feature (25)..(167): Homolog of NCBI NO: 15228970 NR Description: hypothetical protein; protein id: At3g17120.1, by cDNA: gi_18087520 [Arabidopsis thaliana] gb|AAD22658.1~gene_id:K14A17.19~similar to unknown protein

SEQ ID NO: 84620 - protein, 152 aa, Arabidopsis thaliana; identical to SEQ ID NO: 29153
  peptide (1)..(152): Ceres Seq. ID no. 12676012
  misc_feature (1)..(152): Homolog of NCBI NO: 15235188 NR Description: PITSLRE protein kinase family; protein id: supported by cDNA: 13256. [Arabidopsis thaliana]
  misc_feature (1)..(152): Homolog of NCBI NO: 25372617 NR Description: T6A9.7 protein - Arabidopsis thaliana
  misc_feature (1)..(88): Homolog of NCBI NO: 30678287 NR Description: expressed protein [Arabidopsis thaliana] unknown protein [Arabidopsis thaliana]
  misc_feature (7)..(149): Homolog of NCBI NO: 15228970 NR Description: hypothetical protein; protein id: At3g17120.1, by cDNA: gi_18087520 [Arabidopsis thaliana] gb|AAD22658.1~gene_id:K14A17.19~similar to unknown protein

SEQ ID NO: 84621 - DNA, 1041 bp, Arabidopsis thaliana
  misc_feature (1)..(1041): Ceres Seq. ID no. 12676013
  misc_feature: MA Experiment ID: 108434 Result: Down-regulated in Transcription
  misc_feature: MA Experiment 108434 PARAMETER Experiment Name: At_Root_Tips_cDNA_P Parameter: Tissue Value: Root Tips
  misc_feature: MA Experiment ID: 108595 Result: Down-regulated in Transcription
  misc_feature: MA Experiment 108595 PARAMETER Experiment Name: At_Ler-pi_Ovule_cDNA_P Parameter: Plant Line Value: null
  misc_feature: MA Experiment ID: 20000069 Result: Up-regulated in Transcription
  misc_feature: MA Experiment 20000069 PARAMETER Experiment Name: At_100uM_ABA_Mutants_cDNA_P Parameter: Plant Line Value: CS23
  misc_feature: MA Experiment 20000069 PARAMETER Experiment Name: At_100uM_ABA_Mutants_cDNA_P Parameter: Timepoint (hr) Value: 6
  misc_feature: MA Experiment 20000069 PARAMETER Experiment Name: At_100uM_ABA_Mutants_cDNA_P Parameter: Tissue Value: Aerial
  misc_feature: MA Experiment 20000069 PARAMETER Experiment Name: At_100uM_ABA_Mutants_cDNA_P Parameter: Treatment Value: 100uM ABA vs. No Treatment
  misc_feature: MA Experiment ID: 20000071 Result: Up-regulated in Transcription
  misc_feature: MA Experiment 20000071 PARAMETER Experiment Name: At_100uM_ABA_Mutants_cDNA_P Parameter: Plant Line Value: CS8104
  misc_feature: MA Experiment 20000071 PARAMETER Experiment Name: At_100uM_ABA_Mutants_cDNA_P Parameter: Timepoint (hr) Value: 6
  misc_feature: MA Experiment 20000071 PARAMETER Experiment Name: At_100uM_ABA_Mutants_cDNA_P Parameter: Tissue Value: Aerial
  misc_feature: MA Experiment 20000071 PARAMETER Experiment Name: At_100uM_ABA_Mutants_cDNA_P Parameter: Treatment Value: 100uM ABA vs. No Treatment
  misc_feature: MA Experiment ID: 20000072 Result: Up-regulated in Transcription
  misc_feature: MA Experiment 20000072 PARAMETER Experiment Name: At_100uM_ABA_Mutants_cDNA_P Parameter: Plant Line Value: CS8105
  misc_feature: MA Experiment 20000072 PARAMETER Experiment Name: At_100uM_ABA_Mutants_cDNA_P Parameter: Timepoint (hr) Value: 6
  misc_feature: MA Experiment 20000072 PARAMETER Experiment Name: At_100uM_ABA_Mutants_cDNA_P Parameter: Tissue Value: Aerial
  misc_feature: MA Experiment 20000072 PARAMETER Experiment Name: At_100uM_ABA_Mutants_cDNA_P Parameter: Treatment Value: 100uM ABA vs. No Treatment
  misc_feature: MA Experiment ID: 20000117 Result: Up-regulated in Transcription
  misc_feature: MA Experiment 20000117 PARAMETER Experiment Name: At_100uM_ABA_Mutants_cDNA_P Parameter: Plant Line Value: Columbia
  misc_feature: MA Experiment 20000117 PARAMETER Experiment Name: At_100uM_ABA_Mutants_cDNA_P Parameter: Timepoint (hr) Value: 6
  misc_feature: MA Experiment 20000117 PARAMETER Experiment Name: At_100uM_ABA_Mutants_cDNA_P Parameter: Tissue Value: Aerial
  misc_feature: MA Experiment 20000117 PARAMETER Experiment Name: At_100uM_ABA_Mutants_cDNA_P Parameter: Treatment Value: 100uM ABA vs. No Treatment
  misc_feature: MA Experiment ID: 20000437 Result: Up-regulated in Transcription
  misc_feature: MA Experiment 20000437 PARAMETER Experiment Name: At_Drought_P Parameter: Age (day) Value: 8
  misc_feature: MA Experiment 20000437 PARAMETER Experiment Name: At_Drought_P Parameter: Organism Value: A. thaliana
  misc_feature: MA Experiment 20000437 PARAMETER Experiment Name: At_Drought_P Parameter: Plant Line Value: WS
  misc_feature: MA Experiment 20000437 PARAMETER Experiment Name: At_Drought_P Parameter: Timepoint (hr) Value: 24
  misc_feature: MA Experiment 20000437 PARAMETER Experiment Name: At_Drought_P Parameter: Tissue Value: Whole Plant
  misc_feature: MA Experiment 20000437 PARAMETER Experiment Name: At_Drought_P Parameter: Treatment Value: Drought vs. No Drought
attccgcaatttattgattcttctttatcgtgcttctgattgttttggttaacggatcaaattatcgaacgatgatggcttctctcgcgacttccataagtggaagcttcagaattctggttaaatcatcttcgacgaggaatgggtttcctgtaatctctgatcaaaacccgagtttcgtcttgtttgcgaataaacgcagacatatctctagaacggcgatttttcaccgatctgcgataagtggttcgagtcaaggagaaaagatatcacctttagcatctggtgtatcttcaggtttatattcagctcagacttttgatttgacgcctcaaaacgttgatttggtgcttgaggatgttagaccgttcttgatctctgatggtggaaacgtcgacgttgtctccgttgaagatggggtagtctctcttaagctccaaggagcatgtaccagctgtccaagttcttcaacaactatgacaatgggaatagagagggtactcaaggaaaagtttggagatgcattgaaagatattcgacaagtttttgatgaagaagtaaaacagataaccgtggaggcagtgaatgctcatctagatatactgaggccagctatcaagaactatggcggaagtgttgaagttttatcggttgaaggcgaggactgcgttgtaaaatatgttggaccggagtcgattggaatgggaatacaggcagcgattaaagaaaagtttaaggacatatctaatgtaacctttacaagctagaaagcatgaagaaagccactatattatgtaaaaacattattgctctttgtttgagctaatgtccacttcaatagtcgtcctctccataactgtccttagccatcttgccaggttgatcaagaacggtgtgtagacaaagtagcaagttgttgtccacgtaaccagtcccttcaccagcaaacaaaacaagaaagaaacagagtcatgtgtatgtttttgtttgatgatgtctgtataaacacttattacctggccaaagatttctatgtttgct

SEQ ID NO: 84622 - protein, 231 aa, Arabidopsis thaliana; identical to SEQ ID NO: 34911
  peptide (1)..(231): Ceres Seq. ID no. 12676014
  misc_feature (90)..(158): Pfam Name: NifU-like domain Pfam Description: NifU-like domain
  misc_feature (1)..(231): Homolog of NCBI NO: 18411785 NR Description: putative NifU-like metallocluster assembly protein id: At4g01940.1, supported by cDNA: gi_14517433, by cDNA: gi_15215669, supported by cDNA: gi_20908089 [Arabidopsis
  misc_feature (2)..(173): Homolog of NCBI NO: 25407141 NR Description: hypothetical protein AT4g01940 [imported] -
  misc_feature (84)..(158): Homolog of NCBI NO: 2688826 NR Description: putative NifU protein [Prunus armeniaca]
  misc_feature (85)..(223): Homolog of NCBI NO: 18423084 NR Description: Expressed protein; protein id: At5g49940.1, by cDNA: gi_13878180, supported by cDNA: gi_16226433, supported cDNA: gi_17104538 [Arabidopsis thaliana]
  misc_feature (8)..(223): Homolog of NCBI NO: 21554503 NR Description: nitrogen fixation like protein [Arabidopsis
  misc_feature (8)..(223): Homolog of NCBI NO: 18416645 NR Description: nitrogen fixation like protein; protein id: supported by cDNA: 256052. [Arabidopsis thaliana]
  misc_feature (68)..(223): Homolog of NCBI NO: 30698492 NR Description: NifU1 [Oryza sativa (japonica cultivar-group)]
  misc_feature (85)..(223): Homolog of NCBI NO: 7485833 NR Description: hypothetical protein F20B18.20 - Arabidopsis >gi|4538920|emb|CAB39656.1| nitrogen fixation like protein thaliana] >gi|7269442|emb|CAB79446.1| nitrogen fixation like
  misc_feature (79)..(159): Homolog of NCBI NO: 24414813 NR Description: putative NifU-like protein [Synechococcus sp. PCC
  misc_feature (79)..(158): Homolog of NCBI NO: 33860975 NR Description: NifU-like protein [Prochlorococcus marinus subsp.

SEQ ID NO: 84623 - protein, 230 aa, Arabidopsis thaliana; identical to SEQ ID NO: 34912
  peptide (1)..(230): Ceres Seq. ID no. 12676015
  misc_feature (89)..(157): Pfam Name: NifU-like domain Pfam Description: NifU-like domain
  misc_feature (1)..(230): Homolog of NCBI NO: 18411785 NR Description: putative NifU-like metallocluster assembly protein id: At4g01940.1, supported by cDNA: gi_14517433, by cDNA: gi_15215669, supported by cDNA: gi_20908089 [Arabidopsis
  misc_feature (1)..(172): Homolog of NCBI NO: 25407141 NR Description: hypothetical protein AT4g01940 [imported] -
  misc_feature (83)..(157): Homolog of NCBI NO: 2688826 NR Description: putative NifU protein [Prunus armeniaca]
  misc_feature (84)..(222): Homolog of NCBI NO: 18423084 NR Description: Expressed protein; protein id: At5g49940.1, by cDNA: gi_13878180, supported by cDNA: gi_16226433, supported cDNA: gi_17104538 [Arabidopsis thaliana]
  misc_feature (7)..(222): Homolog of NCBI NO: 21554503 NR Description: nitrogen fixation like protein [Arabidopsis
  misc_feature (7)..(222): Homolog of NCBI NO: 18416645 NR Description: nitrogen fixation like protein; protein id: supported by cDNA: 256052. [Arabidopsis thaliana]
  misc_feature (67)..(222): Homolog of NCBI NO: 30698492 NR Description: NifU1 [Oryza sativa (japonica cultivar-group)]
  misc_feature (84)..(222): Homolog of NCBI NO: 7485833 NR Description: hypothetical protein F20B18.20 - Arabidopsis >gi|4538920|emb|CAB39656.1| nitrogen fixation like protein thaliana] >gi|7269442|emb|CAB79446.1| nitrogen fixation like
  misc_feature (78)..(158): Homolog of NCBI NO: 24414813 NR Description: putative NifU-like protein [Synechococcus sp. PCC
  misc_feature (78)..(157): Homolog of NCBI NO: 33860975 NR Description: NifU-like protein [Prochlorococcus marinus subsp.

SEQ ID NO: 84624 - DNA, 851 bp, Arabidopsis thaliana
  misc_feature (1)..(851): Ceres Seq. ID no. 12676016
  misc_feature: MA Experiment ID: 108462 Result: Up-regulated in Transcription
  misc_feature: MA Experiment 108462 PARAMETER Experiment Name: At_Germinating_Seeds_cDNA_P Parameter: Age (day) Value: 2 vs. 0
  misc_feature: MA Experiment 108462 PARAMETER Experiment Name: At_Germinating_Seeds_cDNA_P Parameter: Tissue Value: Germinating Seeds
  misc_feature: MA Experiment ID: 108464 Result: Up-regulated in Transcription
  misc_feature: MA Experiment 108464 PARAMETER Experiment Name: At_Germinating_Seeds_cDNA_P Parameter: Age (day) Value: 4 vs. 0
  misc_feature: MA Experiment 108464 PARAMETER Experiment Name: At_Germinating_Seeds_cDNA_P Parameter: Tissue Value: Germinating Seeds
  misc_feature: MA Experiment ID: 108569 Result: Down-regulated in Transcription
  misc_feature: MA Experiment 108569 PARAMETER Experiment Name: At_0.001%_MeJA__cDNA_P Parameter: Timepoint (hr) Value: 6
  misc_feature: MA Experiment 108569 PARAMETER Experiment Name: At_0.001%_MeJA__cDNA_P Parameter: Tissue Value: Aerial
  misc_feature: MA Experiment 108569 PARAMETER Experiment Name: At_0.001%_MeJA__cDNA_P Parameter: Treatment Value: 0.001% MeJA vs. No Treatment
  misc_feature: MA Experiment ID: 108594 Result: Down-regulated in Transcription
  misc_feature: MA Experiment 108594 PARAMETER Experiment Name: At_Ler-rhl_Root_cDNA_P Parameter: Plant Line Value: null
  misc_feature: MA Experiment ID: 108667 Result: Down-regulated in Transcription
  misc_feature: MA Experiment 108667 PARAMETER Experiment Name: At_2mM_SA_cDNA_P Parameter: Plant Line Value: WS
  misc_feature: MA Experiment 108667 PARAMETER Experiment Name: At_2mM_SA_cDNA_P Parameter: Timepoint (hr) Value: 1
  misc_feature: MA Experiment 108667 PARAMETER Experiment Name: At_2mM_SA_cDNA_P Parameter: Treatment Value: 2mM SA vs. No Treatment
  misc_feature: MA Experiment ID: 20000030 Result: Up-regulated in Transcription
  misc_feature: MA Experiment 20000030 PARAMETER Experiment Name: At_CS6630_Roots_cDNA_P Parameter: Plant Line Value: CS6630 vs. WS
  misc_feature: MA Experiment 20000030 PARAMETER Experiment Name: At_CS6630_Roots_cDNA_P Parameter: Tissue Value: Roots
  misc_feature: MA Experiment ID: 20000111 Result: Down-regulated in Transcription
  misc_feature: MA Experiment 20000111 PARAMETER Experiment Name: At_42deg_Heat_cDNA_P Parameter: Temperature (deg C) Value: 42 vs. 22
  misc_feature: MA Experiment 20000111 PARAMETER Experiment Name: At_42deg_Heat_cDNA_P Parameter: Timepoint (hr) Value: 6
  misc_feature: MA Experiment 20000111 PARAMETER Experiment Name: At_42deg_Heat_cDNA_P Parameter: Tissue Value: Aerial
  misc_feature: MA Experiment ID: 20000113 Result: Down-regulated in Transcription
  misc_feature: MA Experiment 20000113 PARAMETER Experiment Name: At_42deg_Heat_cDNA_P Parameter: Temperature (deg C) Value: 42 vs. 22
  misc_feature: MA Experiment 20000113 PARAMETER Experiment Name: At_42deg_Heat_cDNA_P Parameter: Timepoint (hr) Value: 8
  misc_feature: MA Experiment 20000113 PARAMETER Experiment Name: At_42deg_Heat_cDNA_P Parameter: Tissue Value: Aerial
  misc_feature: MA Experiment ID: 20000144 Result: Down-regulated in Transcription
  misc_feature: MA Experiment 20000144 PARAMETER Experiment Name: At_42deg_Heat_cDNA_P Parameter: Temperature (deg C) Value: 42 vs. 22
  misc_feature: MA Experiment 20000144 PARAMETER Experiment Name: At_42deg_Heat_cDNA_P Parameter: Timepoint (hr) Value: 1
  misc_feature: MA Experiment 20000144 PARAMETER Experiment Name: At_42deg_Heat_cDNA_P Parameter: Tissue Value: Aerial
  misc_feature: MA Experiment ID: 20000171 Result: Down-regulated in Transcription
  misc_feature: MA Experiment 20000171 PARAMETER Experiment Name: At_42deg_Heat_P Parameter: Age (day) Value: 14
  misc_feature: MA Experiment 20000171 PARAMETER Experiment Name: At_42deg_Heat_P Parameter: Organism Value: A. thaliana
  misc_feature: MA Experiment 20000171 PARAMETER Experiment Name: At_42deg_Heat_P Parameter: Plant Line Value: WS
  misc_feature: MA Experiment 20000171 PARAMETER Experiment Name: At_42deg_Heat_P Parameter: Temperature (deg C) Value: 42 vs. 22
  misc_feature: MA Experiment 20000171 PARAMETER Experiment Name: At_42deg_Heat_P Parameter: Timepoint (hr) Value: 1
  misc_feature: MA Experiment 20000171 PARAMETER Experiment Name: At_42deg_Heat_P Parameter: Tissue Value: Aerial
  misc_feature: MA Experiment ID: 20000173 Result: Down-regulated in Transcription
  misc_feature: MA Experiment 20000173 PARAMETER Experiment Name: At_42deg_Heat_P Parameter: Age (day) Value: 14
  misc_feature: MA Experiment 20000173 PARAMETER Experiment Name: At_42deg_Heat_P Parameter: Organism Value: A. thaliana
  misc_feature: MA Experiment 20000173 PARAMETER Experiment Name: At_42deg_Heat_P Parameter: Plant Line Value: WS
  misc_feature: MA Experiment 20000173 PARAMETER Experiment Name: At_42deg_Heat_P Parameter: Temperature (deg C) Value: 42 vs. 22
  misc_feature: MA Experiment 20000173 PARAMETER Experiment Name: At_42deg_Heat_P Parameter: Timepoint (hr) Value: 6
  misc_feature: MA Experiment 20000173 PARAMETER Experiment Name: At_42deg_Heat_P Parameter: Tissue Value: Aerial
  misc_feature: MA Experiment ID: 20000184 Result: Down-regulated in Transcription
  misc_feature: MA Experiment 20000184 PARAMETER Experiment Name: At_Shoots__P Parameter: Age (day) Value: 7
  misc_feature: MA Experiment 20000184 PARAMETER Experiment Name: At_Shoots__P Parameter: Tissue Value: Shoots vs. Whole Plant
  misc_feature: MA Experiment ID: 20000185 Result: Down-regulated in Transcription
  misc_feature: MA Experiment 20000185 PARAMETER Experiment Name: At_Roots__P Parameter: Age (day) Value: 7 vs. 21
  misc_feature: MA Experiment 20000185 PARAMETER Experiment Name: At_Roots__P Parameter: Organism Value: A. thaliana
  misc_feature: MA Experiment 20000185 PARAMETER Experiment Name: At_Roots__P Parameter: Tissue Value: Roots vs. Whole Plant
  misc_feature: MA Experiment ID: 20000227 Result: Down-regulated in Transcription
  misc_feature: MA Experiment 20000227 PARAMETER Experiment Name: At_Root-Tips-vs-Tops_P Parameter: Tissue Value: Root Tips vs. Root Tops
  misc_feature: MA Experiment ID: 20000234 Result: Down-regulated in Transcription
  misc_feature: MA Experiment 20000234 PARAMETER Experiment Name: At_Siliques_P Parameter: Age (day) Value: 21
  misc_feature: MA Experiment 20000234 PARAMETER Experiment Name: At_Siliques_P Parameter: Organism Value: A. thaliana
  misc_feature: MA Experiment 20000234 PARAMETER Experiment Name: At_Siliques_P Parameter: Plant Line Value: WS
  misc_feature: MA Experiment 20000234 PARAMETER Experiment Name: At_Siliques_P Parameter: Tissue Value: Less Than 5mm Siliques vs. Whole Plant
  misc_feature: MA Experiment ID: 20000235 Result: Down-regulated in Transcription
  misc_feature: MA Experiment 20000235 PARAMETER Experiment Name: At_Siliques_P Parameter: Age (day) Value: 21
  misc_feature: MA Experiment 20000235 PARAMETER Experiment Name: At_Siliques_P Parameter: Organism Value: A. thaliana
  misc_feature: MA Experiment 20000235 PARAMETER Experiment Name: At_Siliques_P Parameter: Plant Line Value: WS
  misc_feature: MA Experiment 20000235 PARAMETER Experiment Name: At_Siliques_P Parameter: Tissue Value: 5-10mm Siliques vs. Whole Plant
  misc_feature: MA Experiment ID: 20000264 Result: Down-regulated in Transcription
  misc_feature: MA Experiment 20000264 PARAMETER Experiment Name: At_Open_Flower_P Parameter: Age (day) Value: 21
  misc_feature: MA Experiment 20000264 PARAMETER Experiment Name: At_Open_Flower_P Parameter: Plant Line Value: WS
  misc_feature: MA Experiment 20000264 PARAMETER Experiment Name: At_Open_Flower_P Parameter: Tissue Value: Open Flower vs. Whole Plant
  misc_feature: MA Experiment ID: 20000265 Result: Down-regulated in Transcription
  misc_feature: MA Experiment 20000265 PARAMETER Experiment Name: At_Open_Flower_P Parameter: Age (day) Value: 21
  misc_feature: MA Experiment 20000265 PARAMETER Experiment Name: At_Open_Flower_P Parameter: Plant Line Value: WS
  misc_feature: MA Experiment 20000265 PARAMETER Experiment Name: At_Open_Flower_P Parameter: Tissue Value: Closed Flower vs. Whole Plant
  misc_feature: MA Experiment ID: 20000286 Result: Down-regulated in Transcription
  misc_feature: MA Experiment 20000286 PARAMETER Experiment Name: At_Open_Flower_P Parameter: Age (day) Value: 21
  misc_feature: MA Experiment 20000286 PARAMETER Experiment Name: At_Open_Flower_P Parameter: Plant Line Value: WS
  misc_feature: MA Experiment 20000286 PARAMETER Experiment Name: At_Open_Flower_P Parameter: Tissue Value: Half Open vs. Whole Plant
  misc_feature: MA Experiment ID: 20000438 Result: Down-regulated in Transcription
  misc_feature: MA Experiment 20000438 PARAMETER Experiment Name: At_Shoots__P Parameter: Age (day) Value: 14
  misc_feature: MA Experiment 20000438 PARAMETER Experiment Name: At_Shoots__P Parameter: Tissue Value: Shoots vs. Whole Plant
  misc_feature: MA Experiment ID: 20000439 Result: Down-regulated in Transcription
  misc_feature: MA Experiment 20000439 PARAMETER Experiment Name: At_Roots__P Parameter: Age (day) Value: 14 vs. 21
  misc_feature: MA Experiment 20000439 PARAMETER Experiment Name: At_Roots__P Parameter: Organism Value: A. thaliana
  misc_feature: MA Experiment 20000439 PARAMETER Experiment Name: At_Roots__P Parameter: Tissue Value: Roots vs. Whole Plant
  misc_feature: MA Experiment ID: 20000441 Result: Up-regulated in Transcription
  misc_feature: MA Experiment 20000441 PARAMETER Experiment Name: At_1uM_BR-BRZ__P Parameter: Tissue Value: Shoot Apices
  misc_feature: MA Experiment 20000441 PARAMETER Experiment Name: At_1uM_BR-BRZ__P Parameter: Treatment Value: 1uM BR vs. No Treatment
  misc_feature: MA Experiment ID: 20000443 Result: Up-regulated in Transcription
  misc_feature: MA Experiment 20000443 PARAMETER Experiment Name: At_1uM_BR-BRZ__P Parameter: Tissue Value: Shoot Apices
  misc_feature: MA Experiment 20000443 PARAMETER Experiment Name: At_1uM_BR-BRZ__P Parameter: Treatment Value: 1uM BRZ vs. No Treatment
  misc_feature: MA Experiment ID: 20000495 Result: Down-regulated in Transcription
  misc_feature: MA Experiment 20000495 PARAMETER Experiment Name: At_Guard_Cells_P Parameter: Harvest Date Value: 8/2/2002
  misc_feature: MA Experiment 20000495 PARAMETER Experiment Name: At_Guard_Cells_P Parameter: Organism Value: A. thaliana
  misc_feature: MA Experiment 20000495 PARAMETER Experiment Name: At_Guard_Cells_P Parameter: Tissue Value: Guard Cells vs. Leaves
  misc_feature: MA Experiment ID: 20000573 Result: Down-regulated in Transcription
  misc_feature: MA Experiment 20000573 PARAMETER Experiment Name: At_100uM_ABA_Mutants__P Parameter: Organism Value: A. thaliana
  misc_feature: MA Experiment 20000573 PARAMETER Experiment Name: At_100uM_ABA_Mutants__P Parameter: Plant Line Value: CS22 vs. Ler wt
  misc_feature: MA Experiment 20000573 PARAMETER Experiment Name: At_100uM_ABA_Mutants__P Parameter: Timepoint (hr) Value: N/A
  misc_feature: MA Experiment 20000573 PARAMETER Experiment Name: At_100uM_ABA_Mutants__P Parameter: Tissue Value: Whole Plant
  misc_feature: MA Experiment 20000573 PARAMETER Experiment Name: At_100uM_ABA_Mutants__P Parameter: Treatment Value: None
  misc_feature: MA Experiment ID: 20000574 Result: Down-regulated in Transcription
  misc_feature: MA Experiment 20000574 PARAMETER Experiment Name: At_100uM_ABA_Mutants__P Parameter: Organism Value: A. thaliana
  misc_feature: MA Experiment 20000574 PARAMETER Experiment Name: At_100uM_ABA_Mutants__P Parameter: Plant Line Value: CS23 vs. Ler wt
  misc_feature: MA Experiment 20000574 PARAMETER Experiment Name: At_100uM_ABA_Mutants__P Parameter: Timepoint (hr) Value: N/A
  misc_feature: MA Experiment 20000574 PARAMETER Experiment Name: At_100uM_ABA_Mutants__P Parameter: Tissue Value: Whole Plant
  misc_feature: MA Experiment 20000574 PARAMETER Experiment Name: At_100uM_ABA_Mutants__P Parameter: Treatment Value: None
  misc_feature: MA Experiment ID: 20000794 Result: Down-regulated in Transcription
  misc_feature: MA Experiment 20000794 PARAMETER Experiment Name: At_Petals_P Parameter: Age (day) Value: 23-25 days
  misc_feature: MA Experiment 20000794 PARAMETER Experiment Name: At_Petals_P Parameter: Plant Line Value: WS
  misc_feature: MA Experiment 20000794 PARAMETER Experiment Name: At_Petals_P Parameter: Tissue Value: Petals vs. Whole plant
  misc_feature: MA Experiment ID: 20001556 Result: Down-regulated in Transcription
  misc_feature: MA Experiment 20001556 PARAMETER Experiment Name: At_Drought_Soil_Dry_P Parameter: Age (day) Value: 26
  misc_feature: MA Experiment 20001556 PARAMETER Experiment Name: At_Drought_Soil_Dry_P Parameter: Organism Value: A. thaliana
  misc_feature: MA Experiment 20001556 PARAMETER Experiment Name: At_Drought_Soil_Dry_P Parameter: Plant Line Value: WS
  misc_feature: MA Experiment 20001556 PARAMETER Experiment Name: At_Drought_Soil_Dry_P Parameter: Post Timepoint (hr) Value: None
  misc_feature: MA Experiment 20001556 PARAMETER Experiment Name: At_Drought_Soil_Dry_P Parameter: Post-Treatment Value: None
  misc_feature: MA Experiment 20001556 PARAMETER Experiment Name: At_Drought_Soil_Dry_P Parameter: Timepoint (day) Value: 12
  misc_feature: MA Experiment 20001556 PARAMETER Experiment Name: At_Drought_Soil_Dry_P Parameter: Treatment Value: Drought vs. No Drought
  misc_feature: MA Experiment ID: 20001557 Result: Down-regulated in Transcription
  misc_feature: MA Experiment 20001557 PARAMETER Experiment Name: At_Drought_Soil_Dry_P Parameter: Age (day) Value: 27
  misc_feature: MA Experiment 20001557 PARAMETER Experiment Name: At_Drought_Soil_Dry_P Parameter: Organism Value: A. thaliana
  misc_feature: MA Experiment 20001557 PARAMETER Experiment Name: At_Drought_Soil_Dry_P Parameter: Plant Line Value: WS
  misc_feature: MA Experiment 20001557 PARAMETER Experiment Name: At_Drought_Soil_Dry_P Parameter: Post Timepoint (hr) Value: 3
  misc_feature: MA Experiment 20001557 PARAMETER Experiment Name: At_Drought_Soil_Dry_P Parameter: Post-Treatment Value: Re-Water vs. No Drought
  misc_feature: MA Experiment 20001557 PARAMETER Experiment Name: At_Drought_Soil_Dry_P Parameter: Timepoint (day) Value: 13
  misc_feature: MA Experiment 20001557 PARAMETER Experiment Name: At_Drought_Soil_Dry_P Parameter: Treatment Value: Drought vs. No Drought
  misc_feature: MA Experiment ID: 20001558 Result: Down-regulated in Transcription
  misc_feature: MA Experiment 20001558 PARAMETER Experiment Name: At_Drought_Soil_Dry_P Parameter: Age (day) Value: 27
  misc_feature: MA Experiment 20001558 PARAMETER Experiment Name: At_Drought_Soil_Dry_P Parameter: Organism Value: A. thaliana
  misc_feature: MA Experiment 20001558 PARAMETER Experiment Name: At_Drought_Soil_Dry_P Parameter: Plant Line Value: WS
  misc_feature: MA Experiment 20001558 PARAMETER Experiment Name: At_Drought_Soil_Dry_P Parameter: Post Timepoint (hr) Value: 6
  misc_feature: MA Experiment 20001558 PARAMETER Experiment Name: At_Drought_Soil_Dry_P Parameter: Post-Treatment Value: Re-Water vs. No Drought
  misc_feature: MA Experiment 20001558 PARAMETER Experiment Name: At_Drought_Soil_Dry_P Parameter: Timepoint (day) Value: 13
  misc_feature: MA Experiment 20001558 PARAMETER Experiment Name: At_Drought_Soil_Dry_P Parameter: Treatment Value: Drought vs. No Drought
  misc_feature: MA Experiment ID: 20001559 Result: Down-regulated in Transcription
  misc_feature: MA Experiment 20001559 PARAMETER Experiment Name: At_Drought_Soil_Dry_P Parameter: Age (day) Value: 28
  misc_feature: MA Experiment 20001559 PARAMETER Experiment Name: At_Drought_Soil_Dry_P Parameter: Organism Value: A. thaliana
  misc_feature: MA Experiment 20001559 PARAMETER Experiment Name: At_Drought_Soil_Dry_P Parameter: Plant Line Value: WS
  misc_feature: MA Experiment 20001559 PARAMETER Experiment Name: At_Drought_Soil_Dry_P Parameter: Post Timepoint (hr) Value: 29
  misc_feature: MA Experiment 20001559 PARAMETER Experiment Name: At_Drought_Soil_Dry_P Parameter: Post-Treatment Value: Re-Water vs. No Drought
  misc_feature: MA Experiment 20001559 PARAMETER Experiment Name: At_Drought_Soil_Dry_P Parameter: Timepoint (day) Value: 14
  misc_feature: MA Experiment 20001559 PARAMETER Experiment Name: At_Drought_Soil_Dry_P Parameter: Treatment Value: Drought vs. No Drought
  misc_feature: MA Experiment ID: 20001560 Result: Down-regulated in Transcription
  misc_feature: MA Experiment 20001560 PARAMETER Experiment Name: At_Drought_Soil_Dry_P Parameter: Age (day) Value: 28
  misc_feature: MA Experiment 20001560 PARAMETER Experiment Name: At_Drought_Soil_Dry_P Parameter: Organism Value: A. thaliana
  misc_feature: MA Experiment 20001560 PARAMETER Experiment Name: At_Drought_Soil_Dry_P Parameter: Plant Line Value: WS
  misc_feature: MA Experiment 20001560 PARAMETER Experiment Name: At_Drought_Soil_Dry_P Parameter: Post Timepoint (hr) Value: None
  misc_feature: MA Experiment 20001560 PARAMETER Experiment Name: At_Drought_Soil_Dry_P Parameter: Post-Treatment Value: None
  misc_feature: MA Experiment 20001560 PARAMETER Experiment Name: At_Drought_Soil_Dry_P Parameter: Timepoint (day) Value: 14
  misc_feature: MA Experiment 20001560 PARAMETER Experiment Name: At_Drought_Soil_Dry_P Parameter: Treatment Value: Drought vs. No Drought
  misc_feature: MA Experiment ID: 20001904 Result: Down-regulated in Transcription
  misc_feature: MA Experiment 20001904 PARAMETER Experiment Name: At_Drought_Reproduction_P Parameter: Age (day) Value: 37
  misc_feature: MA Experiment 20001904 PARAMETER Experiment Name: At_Drought_Reproduction_P Parameter: Organism Value: A. thaliana
  misc_feature: MA Experiment 20001904 PARAMETER Experiment Name: At_Drought_Reproduction_P Parameter: Plant Line Value: WS
  misc_feature: MA Experiment 20001904 PARAMETER Experiment Name: At_Drought_Reproduction_P Parameter: Timepoint (day) Value: 7
  misc_feature: MA Experiment 20001904 PARAMETER Experiment Name: At_Drought_Reproduction_P Parameter: Tissue Value: Rosettes
  misc_feature: MA Experiment 20001904 PARAMETER Experiment Name: At_Drought_Reproduction_P Parameter: Treatment Value: Drought vs. No Drought
aaaaaaaaaaaaaaaacagagccacgaagaaatttacagaaaattcaaaaccatcgataaagatgggagatgtgattttgttcattgatgatacgaaatcgaaagtgagaatcacgcgttgcagaatttgccatgaagaagaagaagaaagtttcttcgaagttccatgtgcttgttcaggcaccgttaagttcgcacatagaaactgcatacaacgttggtgtaatgaaaaaggaaacacaacttgtgaaatctgtcttcaggtgtataaagatggatatacagcagttttaaaacaatcgaaattgattgaacaagaagtcacaatcagagtaaatggacgaagaagaagaagaagtagaagattagtgtctatagctgaatccgatatttctcagtgtaattctgttgctgatagaggagcttcgttttgcagatcattaacttttactctttcagtatttttgctgatgaaacatacattcgatgtgatttacggaaccgaagaatatccattctctgtatttacggtactaacattaaaggccattgggatactattgccaatgttcattataattcgaacaatctcaactattcagaaaactcttcgtcgtcgtcatcaatatcctgaatctgaagaagaagataggttgagctctgacgacgacgatgacttggaagaagaagatgaagagcaacaacaacatttggcttaaaccttcaaattaacgaacttaacgaaattttttctttctttctttctaattctttctttttttaaacgaaaagcatctatttgatgctcatggtcatttttactcacaaagtcaaataaaaaacgtaaattt

SEQ ID NO: 84625 - protein, 238 aa, Arabidopsis thaliana
  peptide (1)..(238): Ceres Seq. ID no. 12676017
  misc_feature (40)..(85): Pfam Name: Zinc finger, C3HC4 type (RING finger) Pfam Description: Zinc finger, C3HC4 type (RING finger)
  misc_feature (21)..(238): Homolog of NCBI NO: 18411826 NR Description: Expressed protein; protein id: At4g02075.1, by cDNA: gi_4741922 [Arabidopsis thaliana]
  misc_feature (21)..(238): Homolog of NCBI NO: 25518349 NR Description: hypothetical protein T14P4.10 - Arabidopsis >gi|9972376|gb|AAG10626.1|AC022521_4 Unknown protein [Arabidopsis
  misc_feature (138)..(238): Homolog of NCBI NO: 15217818 NR Description: hypothetical protein; protein id: At1g02610.1
  misc_feature (21)..(87): Homolog of NCBI NO: 15217818 NR Description: hypothetical protein; protein id: At1g02610.1
  misc_feature (29)..(236): Homolog of NCBI NO: 34905532 NR Description: B1146F03.23 [Oryza sativa (japonica
  misc_feature (37)..(230): Homolog of NCBI NO: 22325409 NR Description: similar to nucleoside triphosphatase, putative;
  misc_feature (29)..(208): Homolog of NCBI NO: 15227065 NR Description: unknown protein; protein id: At2g02960.1, by cDNA: gi_17529099, supported by cDNA: gi_20259116 [Arabidopsis >gi|25365876|pir||F84442 hypothetical protein At2g02960
  misc_feature (29)..(208): Homolog of NCBI NO: 15223693 NR Description: nucleoside triphosphatase, putative; protein id:
  misc_feature (29)..(208): Homolog of NCBI NO: 18424590 NR Description: expressed protein; protein id: At5g62460.1, by cDNA: gi_16974606 [Arabidopsis thaliana] gene_id:K19B1.7~unknown protein [Arabidopsis thaliana]
  misc_feature (29)..(208): Homolog of NCBI NO: 26451292 NR Description: unknown protein [Arabidopsis thaliana]
KKKKNRATKKFTENSKPSIKMGDVILFIDDTKSKVRITRCRICHEEEEESFFEVPCACSGTVKFAHRNCIQRWCNEKGNTTCEICLQVYKDGYTAVLKQSKLIEQEVTIRVNGRRRRRSRRLVSIAESDISQCNSVADRGASFCRSLTFTLSVFLLMKHTFDVIYGTEEYPFSVFTVLTLKAIGILLPMFIIIRTISTIQKTLRRRHQYPESEEEDRLSSDDDDDLEEEDEEQQQHLA

SEQ ID NO: 84626 - protein, 218 aa, Arabidopsis thaliana; identical to SEQ ID NO: 42033
  peptide (1)..(218): Ceres Seq. ID no. 12676018
  misc_feature (20)..(65): Pfam Name: Zinc finger, C3HC4 type (RING finger) Pfam Description: Zinc finger, C3HC4 type (RING finger)
  misc_feature (1)..(218): Homolog of NCBI NO: 18411826 NR Description: Expressed protein; protein id: At4g02075.1, by cDNA: gi_4741922 [Arabidopsis thaliana]
  misc_feature (1)..(218): Homolog of NCBI NO: 25518349 NR Description: hypothetical protein T14P4.10 - Arabidopsis >gi|9972376|gb|AAG10626.1|AC022521_4 Unknown protein [Arabidopsis
  misc_feature (118)..(218): Homolog of NCBI NO: 15217818 NR Description: hypothetical protein; protein id: At1g02610.1
  misc_feature (1)..(67): Homolog of NCBI NO: 15217818 NR Description: hypothetical protein; protein id: At1g02610.1
  misc_feature (9)..(216): Homolog of NCBI NO: 34905532 NR Description: B1146F03.23 [Oryza sativa (japonica
  misc_feature (17)..(210): Homolog of NCBI NO: 22325409 NR Description: similar to nucleoside triphosphatase, putative;
  misc_feature (9)..(188): Homolog of NCBI NO: 15227065 NR Description: unknown protein; protein id: At2g02960.1, by cDNA: gi_17529099, supported by cDNA: gi_20259116 [Arabidopsis >gi|25365876|pir||F84442 hypothetical protein At2g02960
  misc_feature (9)..(188): Homolog of NCBI NO: 15223693 NR Description: nucleoside triphosphatase, putative; protein id:
  misc_feature (9)..(188): Homolog of NCBI NO: 18424590 NR Description: expressed protein; protein id: At5g62460.1, by cDNA: gi_16974606 [Arabidopsis thaliana] gene_id:K19B1.7~unknown protein [Arabidopsis thaliana]
  misc_feature (9)..(188): Homolog of NCBI NO: 26451292 NR Description: unknown protein [Arabidopsis thaliana]

SEQ ID NO: 84627 - DNA, 1026 bp, Arabidopsis thaliana
  misc_feature (1)..(1026): Ceres Seq. ID no. 12676213
  misc_feature: MA Experiment ID: 20000171 Result: Up-regulated in Transcription
  misc_feature: MA Experiment 20000171 PARAMETER Experiment Name: At_42deg_Heat_P Parameter: Age (day) Value: 14
  misc_feature: MA Experiment 20000171 PARAMETER Experiment Name: At_42deg_Heat_P Parameter: Organism Value: A. thaliana
  misc_feature: MA Experiment 20000171 PARAMETER Experiment Name: At_42deg_Heat_P Parameter: Plant Line Value: WS
  misc_feature: MA Experiment 20000171 PARAMETER Experiment Name: At_42deg_Heat_P Parameter: Temperature (deg C) Value: 42 vs. 22
  misc_feature: MA Experiment 20000171 PARAMETER Experiment Name: At_42deg_Heat_P Parameter: Timepoint (hr) Value: 1
  misc_feature: MA Experiment 20000171 PARAMETER Experiment Name: At_42deg_Heat_P Parameter: Tissue Value: Aerial
  misc_feature: MA Experiment ID: 20000184 Result: Up-regulated in Transcription
  misc_feature: MA Experiment 20000184 PARAMETER Experiment Name: At_Shoots__P Parameter: Age (day) Value: 7
  misc_feature: MA Experiment 20000184 PARAMETER Experiment Name: At_Shoots__P Parameter: Tissue Value: Shoots vs. Whole Plant
atggcagaaacaaaaaactggtataacacaagagaagcgatagaaaaaacctctccatcgagacttgacggtatcaacttaaaggaagagacgttccaacgttggtcttacacttcattcctacaagagcttggccagagactaaacaatcctcaaaaaactatagccactgcgattgtcttgtgtcaacgattcttcactcgtcaatcactcacaaagaacgacccgaaaacagtcgccatcatctgtatgtttatagccggaaaagtcgaagggtctccaaggccggccggtgacgtcgtctttgtctcgtacagggttttattcaataaggagccgttgagagacgtgttcgagagattgaagatgactgtgttaaccggtgagaagcttgtgctctctactttagaatgtgatcttgaaatcgaacacccttataaactagtgatggattgggttaagagatcggttaagaccgaggatggtaggcggttatgtcaggctgcatttaatttcgttaatgacagtctgaggacgtcgctttgcttgcagtttgggcctagtcagatcgcatcggctgctatatatatcggtttgagcatgtgtaagatgacgttaccgtgtgatggagataaagcgtggtggcgagagtttgatgtcacgaaacgtcaattgtgggagatttgtgaccagatgcttgatctttatgaacaaaccatattggaacgtctttgttgggtttgtagtcacactaacaacattgacgaggaacatcgtgtggttgagctcgaaggagctctaatcctcatccttgttgccacgagcattaaaatttccgaagcagtccacaaacctcaagaaagactgcatacagcttctccgaaaactaacgccaaaacaagattgctaaagagacctaaccgcacccgacggcatgggagtgtcaaagatgaccagagaagccgcaacaaggccatttctacttgttgcggcttcatcccgttaattagatttttagctagttag

SEQ ID NO: 84628 - protein, 341 aa, Arabidopsis thaliana
  peptide (1)..(341): Ceres Seq. ID no. 12676214
  misc_feature (5)..(141): Pfam Name: Cyclin, N-terminal domain Pfam Description: Cyclin, N-terminal domain
  misc_feature (1)..(238): Homolog of NCBI NO: 15219592 NR Description: hypothetical protein; protein id: At1g35440.1
  misc_feature (3)..(238): Homolog of NCBI NO: 30694715 NR Description: cyclin family [Arabidopsis thaliana]
  misc_feature (3)..(238): Homolog of NCBI NO: 9759604 NR Description: contains similarity to cyclin~gene_id:K18C1.7
  misc_feature (3)..(238): Homolog of NCBI NO: 30684822 NR Description: cyclin family [Arabidopsis thaliana]
  misc_feature (3)..(238): Homolog of NCBI NO: 7486085 NR Description: hypothetical protein F24J7.161 - Arabidopsis >gi|4582488|emb|CAB40377.1| putative protein [Arabidopsis >gi|7268756|emb|CAB78962.1| putative protein [Arabidopsis
  misc_feature (3)..(237): Homolog of NCBI NO: 15217663 NR Description: putative cyclin; protein id: At1g27630.1, by cDNA: 33877., supported by cDNA: gi_12744988 [Arabidopsis >gi|5668773|gb|AAD46000.1|AC005916_12 Contains similarity to
  misc_feature (3)..(237): Homolog of NCBI NO: 21618277 NR Description: putative cyclin [Arabidopsis thaliana]
  misc_feature (7)..(230): Homolog of NCBI NO: 15235087 NR Description: putative protein; protein id: At4g19560.1
  misc_feature (7)..(244): Homolog of NCBI NO: 28574303 NR Description: Cyclin K CG15218-PA >gi|28574305|ref|NP_788083.1|
  misc_feature (7)..(238): Homolog of NCBI NO: 8980825 NR Description: cyclin K [Homo sapiens]
MAETKNWYNTREAIEKTSPSRLDGINLKEETFQRWSYTSFLQELGQRLNNPQKTIATAIVLCQRFFTRQSLTKNDPKTVAIICMFIAGKVEGSPRPAGDVVFVSYRVLFNKEPLRDVFERLKMTVLTGEKLVLSTLECDLEIEHPYKLVMDWVKRSVKTEDGRRLCQAAFNFVNDSLRTSLCLQFGPSQIASAAIYIGLSMCKMTLPCDGDKAWWREFDVTKRQLWEICDQMLDLYEQTILERLCWVCSHTNNIDEEHRVVELEGALILILVATSIKISEAVHKPQERLHTASPKTNAKTRLLKRPNRTRRHGSVKDDQRSRNKAISTCCGFIPLIRFLAS

SEQ ID NO: 84629 - protein, 258 aa, Arabidopsis thaliana
  peptide (1)..(258): Ceres Seq. ID no. 12676215
  misc_feature (1)..(58): Pfam Name: Cyclin, N-terminal domain Pfam Description: Cyclin, N-terminal domain
  misc_feature (1)..(155): Homolog of NCBI NO: 15219592 NR Description: hypothetical protein; protein id: At1g35440.1
  misc_feature (1)..(155): Homolog of NCBI NO: 30694715 NR Description: cyclin family [Arabidopsis thaliana]
  misc_feature (1)..(155): Homolog of NCBI NO: 9759604 NR Description: contains similarity to cyclin~gene_id:K18C1.7
  misc_feature (1)..(155): Homolog of NCBI NO: 30684822 NR Description: cyclin family [Arabidopsis thaliana]
  misc_feature (1)..(155): Homolog of NCBI NO: 7486085 NR Description: hypothetical protein F24J7.161 - Arabidopsis >gi|4582488|emb|CAB40377.1| putative protein [Arabidopsis >gi|7268756|emb|CAB78962.1| putative protein [Arabidopsis
  misc_feature (1)..(154): Homolog of NCBI NO: 15217663 NR Description: putative cyclin; protein id: At1g27630.1, by cDNA: 33877., supported by cDNA: gi_12744988 [Arabidopsis >gi|5668773|gb|AAD46000.1|AC005916_12 Contains similarity to
  misc_feature (1)..(154): Homolog of NCBI NO: 21618277 NR Description: putative cyclin [Arabidopsis thaliana]
  misc_feature (1)..(147): Homolog of NCBI NO: 15235087 NR Description: putative protein; protein id: At4g19560.1
  misc_feature (1)..(161): Homolog of NCBI NO: 28574303 NR Description: Cyclin K CG15218-PA >gi|28574305|ref|NP_788083.1|
  misc_feature (1)..(155): Homolog of NCBI NO: 8980825 NR Description: cyclin K [Homo sapiens]
MFIAGKVEGSPRPAGDVVFVSYRVLFNKEPLRDVFERLKMTVLTGEKLVLSTLECDLEIEHPYKLVMDWVKRSVKTEDGRRLCQAAFNFVNDSLRTSLCLQFGPSQIASAAIYIGLSMCKMTLPCDGDKAWWREFDVTKRQLWEICDQMLDLYEQTILERLCWVCSHTNNIDEEHRVVELEGALILILVATSIKISEAVHKPQERLHTASPKTNAKTRLLKRPNRTRRHGSVKDDQRSRNKAISTCCGFIPLIRFLAS

SEQ ID NO: 84630 - protein, 219 aa, Arabidopsis thaliana
  peptide (1)..(219): Ceres Seq. ID no. 12676216
  misc_feature (25)..(114): Pfam Name: Cyclin, C-terminal domain Pfam Description: Cyclin, C-terminal domain
  misc_feature (1)..(116): Homolog of NCBI NO: 15219592 NR Description: hypothetical protein; protein id: At1g35440.1
  misc_feature (1)..(116): Homolog of NCBI NO: 30694715 NR Description: cyclin family [Arabidopsis thaliana]
  misc_feature (1)..(116): Homolog of NCBI NO: 9759604 NR Description: contains similarity to cyclin~gene_id:K18C1.7
  misc_feature (1)..(116): Homolog of NCBI NO: 30684822 NR Description: cyclin family [Arabidopsis thaliana]
  misc_feature (1)..(116): Homolog of NCBI NO: 7486085 NR Description: hypothetical protein F24J7.161 - Arabidopsis >gi|4582488|emb|CAB40377.1| putative protein [Arabidopsis >gi|7268756|emb|CAB78962.1| putative protein [Arabidopsis
  misc_feature (1)..(115): Homolog of NCBI NO: 15217663 NR Description: putative cyclin; protein id: At1g27630.1, by cDNA: 33877., supported by cDNA: gi_12744988 [Arabidopsis >gi|5668773|gb|AAD46000.1|AC005916_12 Contains similarity to
  misc_feature (1)..(115): Homolog of NCBI NO: 21618277 NR Description: putative cyclin [Arabidopsis thaliana]
  misc_feature (1)..(108): Homolog of NCBI NO: 15235087 NR Description: putative protein; protein id: At4g19560.1
  misc_feature (1)..(122): Homolog of NCBI NO: 28574303 NR Description: Cyclin K CG15218-PA >gi|28574305|ref|NP_788083.1|
  misc_feature (1)..(116): Homolog of NCBI NO: 8980825 NR Description: cyclin K [Homo sapiens]
MTVLTGEKLVLSTLECDLEIEHPYKLVMDWVKRSVKTEDGRRLCQAAFNFVNDSLRTSLCLQFGPSQIASAAIYIGLSMCKMTLPCDGDKAWWREFDVTKRQLWEICDQMLDLYEQTILERLCWVCSHTNNIDEEHRVVELEGALILILVATSIKISEAVHKPQERLHTASPKTNAKTRLLKRPNRTRRHGSVKDDQRSRNKAISTCCGFIPLIRFLAS

SEQ ID NO: 84631 - DNA, 1099 bp, Arabidopsis thaliana
  misc_feature (1)..(1099): Ceres Seq. ID no. 12676217
  misc_feature: MA Experiment ID: 108435 Result: Down-regulated in Transcription
  misc_feature: MA Experiment 108435 PARAMETER Experiment Name: At_stm_Mutants_cDNA_P Parameter: Plant Line Value: wt Landsburg vs stm
  misc_feature: MA Experiment 108435 PARAMETER Experiment Name: At_stm_Mutants_cDNA_P Parameter: Tissue Value: Shoot Apical Meristem Region
  misc_feature: MA Experiment ID: 108461 Result: Up-regulated in Transcription
  misc_feature: MA Experiment 108461 PARAMETER Experiment Name: At_Germinating_Seeds_cDNA_P Parameter: Age (day) Value: 1 vs. 0
  misc_feature: MA Experiment 108461 PARAMETER Experiment Name: At_Germinating_Seeds_cDNA_P Parameter: Tissue Value: Germinating Seeds
  misc_feature: MA Experiment ID: 108462 Result: Up-regulated in Transcription
  misc_feature: MA Experiment 108462 PARAMETER Experiment Name: At_Germinating_Seeds_cDNA_P Parameter: Age (day) Value: 2 vs. 0
  misc_feature: MA Experiment 108462 PARAMETER Experiment Name: At_Germinating_Seeds_cDNA_P Parameter: Tissue Value: Germinating Seeds
  misc_feature: MA Experiment ID: 108463 Result: Up-regulated in Transcription
  misc_feature: MA Experiment 108463 PARAMETER Experiment Name: At_Germinating_Seeds_cDNA_P Parameter: Age (day) Value: 3 vs. 0
  misc_feature: MA Experiment 108463 PARAMETER Experiment Name: At_Germinating_Seeds_cDNA_P Parameter: Tissue Value: Germinating Seeds
  misc_feature: MA Experiment ID: 108464 Result: Up-regulated in Transcription
  misc_feature: MA Experiment 108464 PARAMETER Experiment Name: At_Germinating_Seeds_cDNA_P Parameter: Age (day) Value: 4 vs. 0
  misc_feature: MA Experiment 108464 PARAMETER Experiment Name: At_Germinating_Seeds_cDNA_P Parameter: Tissue Value: Germinating Seeds
  misc_feature: MA Experiment ID: 108488 Result: Up-regulated in Transcription
  misc_feature: MA Experiment ID: 108579 Result: Down-regulated in Transcription
  misc_feature: MA Experiment 108579 PARAMETER Experiment Name: At_4deg_Cold_cDNA_P Parameter: Temperature (deg C) Value: 4 vs. 22
  misc_feature: MA Experiment 108579 PARAMETER Experiment Name: At_4deg_Cold_cDNA_P Parameter: Timepoint (hr) Value: 6
  misc_feature: MA Experiment 108579 PARAMETER Experiment Name: At_4deg_Cold_cDNA_P Parameter: Tissue Value: Aerial
  misc_feature: MA Experiment ID: 108585 Result: Down-regulated in Transcription
  misc_feature: MA Experiment 108585 PARAMETER Experiment Name: At_5mM_NaNP_cDNA_P Parameter: Timepoint (hr) Value: 6
  misc_feature: MA Experiment 108585 PARAMETER Experiment Name: At_5mM_NaNP_cDNA_P Parameter: Tissue Value: Aerial
  misc_feature: MA Experiment 108585 PARAMETER Experiment Name: At_5mM_NaNP_cDNA_P Parameter: Treatment Value: null
  misc_feature: MA Experiment ID: 108595 Result: Down-regulated in Transcription
  misc_feature: MA Experiment 108595 PARAMETER Experiment Name: At_Ler-pi_Ovule_cDNA_P Parameter: Plant Line Value: null
  misc_feature: MA Experiment ID: 20000180 Result: Up-regulated in Transcription
  misc_feature: MA Experiment 20000180 PARAMETER Experiment Name: At_Germinating_Seeds_P Parameter: Age (hr) Value: 24 vs. 0
  misc_feature: MA Experiment 20000180 PARAMETER Experiment Name: At_Germinating_Seeds_P Parameter: Tissue Value: Germinating Seeds
  misc_feature: MA Experiment ID: 20000185 Result: Down-regulated in Transcription
  misc_feature: MA Experiment 20000185 PARAMETER Experiment Name: At_Roots__P Parameter: Age (day) Value: 7 vs. 21
  misc_feature: MA Experiment 20000185 PARAMETER Experiment Name: At_Roots__P Parameter: Organism Value: A. thaliana
  misc_feature: MA Experiment 20000185 PARAMETER Experiment Name: At_Roots__P Parameter: Tissue Value: Roots vs. Whole Plant
  misc_feature: MA Experiment ID: 20000286 Result: Down-regulated in Transcription
  misc_feature: MA Experiment 20000286 PARAMETER Experiment Name: At_Open_Flower_P Parameter: Age (day) Value: 21
  misc_feature: MA Experiment 20000286 PARAMETER Experiment Name: At_Open_Flower_P Parameter: Plant Line Value: WS
  misc_feature: MA Experiment 20000286 PARAMETER Experiment Name: At_Open_Flower_P Parameter: Tissue Value: Half Open vs. Whole Plant
  misc_feature: MA Experiment ID: 20000439 Result: Down-regulated in Transcription
  misc_feature: MA Experiment 20000439 PARAMETER Experiment Name: At_Roots__P Parameter: Age (day) Value: 14 vs. 21
  misc_feature: MA Experiment 20000439 PARAMETER Experiment Name: At_Roots__P Parameter: Organism Value: A. thaliana
  misc_feature: MA Experiment 20000439 PARAMETER Experiment Name: At_Roots__P Parameter: Tissue Value: Roots vs. Whole Plant
  misc_feature: MA Experiment ID: 20000794 Result: Down-regulated in Transcription
  misc_feature: MA Experiment 20000794 PARAMETER Experiment Name: At_Petals_P Parameter: Age (day) Value: 23-25 days
  misc_feature: MA Experiment 20000794 PARAMETER Experiment Name: At_Petals_P Parameter: Plant Line Value: WS
  misc_feature: MA Experiment 20000794 PARAMETER Experiment Name: At_Petals_P Parameter: Tissue Value: Petals vs. Whole plant
  misc_feature: MA Experiment ID: 20001451 Result: Up-regulated in Transcription
  misc_feature: MA Experiment 20001451 PARAMETER Experiment Name: At_Far-red-induction_P Parameter: Age (day) Value: 7
  misc_feature: MA Experiment 20001451 PARAMETER Experiment Name: At_Far-red-induction_P Parameter: Light Value: Far-red vs. White
  misc_feature: MA Experiment 20001451 PARAMETER Experiment Name: At_Far-red-induction_P Parameter: Organism Value: A. thaliana
  misc_feature: MA Experiment 20001451 PARAMETER Experiment Name: At_Far-red-induction_P Parameter: Plant Line Value: Columbia
  misc_feature: MA Experiment 20001451 PARAMETER Experiment Name: At_Far-red-induction_P Parameter: Timepoint (hr) Value: 24
  misc_feature: MA Experiment 20001451 PARAMETER Experiment Name: At_Far-red-induction_P Parameter: Tissue Value: Whole Plant
  misc_feature: MA Experiment ID: 20001557 Result: Down-regulated in Transcription
  misc_feature: MA Experiment 20001557 PARAMETER Experiment Name: At_Drought_Soil_Dry_P Parameter: Age (day) Value: 27
  misc_feature: MA Experiment 20001557 PARAMETER Experiment Name: At_Drought_Soil_Dry_P Parameter: Organism Value: A. thaliana
  misc_feature: MA Experiment 20001557 PARAMETER Experiment Name: At_Drought_Soil_Dry_P Parameter: Plant Line Value: WS
  misc_feature: MA Experiment 20001557 PARAMETER Experiment Name: At_Drought_Soil_Dry_P Parameter: Post Timepoint (hr) Value: 3
  misc_feature: MA Experiment 20001557 PARAMETER Experiment Name: At_Drought_Soil_Dry_P Parameter: Post-Treatment Value: Re-Water vs. No Drought
  misc_feature: MA Experiment 20001557 PARAMETER Experiment Name: At_Drought_Soil_Dry_P Parameter: Timepoint (day) Value: 13
  misc_feature: MA Experiment 20001557 PARAMETER Experiment Name: At_Drought_Soil_Dry_P Parameter: Treatment Value: Drought vs. No Drought
  misc_feature: MA Experiment ID: 20001905 Result: Down-regulated in Transcription
  misc_feature: MA Experiment 20001905 PARAMETER Experiment Name: At_Drought_Reproduction_P Parameter: Age (day) Value: 40
  misc_feature: MA Experiment 20001905 PARAMETER Experiment Name: At_Drought_Reproduction_P Parameter: Organism Value: A. thaliana
  misc_feature: MA Experiment 20001905 PARAMETER Experiment Name: At_Drought_Reproduction_P Parameter: Plant Line Value: WS
  misc_feature: MA Experiment 20001905 PARAMETER Experiment Name: At_Drought_Reproduction_P Parameter: Timepoint (day) Value: 10
  misc_feature: MA Experiment 20001905 PARAMETER Experiment Name: At_Drought_Reproduction_P Parameter: Tissue Value: Rosettes
  misc_feature: MA Experiment 20001905 PARAMETER Experiment Name: At_Drought_Reproduction_P Parameter: Treatment Value: Drought vs. No Drought
cttacaatggctgcatcgttagcctctctttcctccttagctaaagccggagcaccacggtcactgttcaaccgccatggcagccaccgccttcctcctccacaaatcatacctcttgcttcctctatcaagaaacatatcacgacgagcttctataggagaggaagttctctgaagaacatttatgccctcgagacctctgacggcgccattaacgtggaggtcgatgatgatgaggaagaagaagcgtgtgagcttgttaacggaacagaagtgtccgttgacggtgttgaaggttatcttttaacggcggtgaagaacaataacggaactggattgcttctactctctgatgtctttggctttcaagattcagctacacgcgatttcgcttaccgtgtggcttgcaatggctataacgttcttgtcccggacttgtttcgtggagatccatggtcgaaaaaccgaccaaagtccgaatacgaggaatggagaagaggacatgaccctaaccgtatcagacaagacactactaccttcacaaaatggatggttgaggaatttgcagcggctggaatctccaagaagctaggagtgatggggttctgttttggcggtggacgtgtggttgacgtgttagccacggatgagagcggttactttagcaccggtgtctcgttctacggtacgagaatagactcggcggtggcgggagatgtgaaagtgccagtcttgtttattgctggagatagagacccgctttgtgaagtgaagggtttgtatgaaattgaggagaagattggtgaaggttcaaaggttgttgtgtatgaaggaagaggtcacggctttgttcaccggcccgagacacccgaagatgatcgagacgctgaggaagcgtttgctctcatgagaaattggttacatcatcatttgatttgaagccaattgtttttctctactctttgtacatccaagttaaaataaaactcggattctagtaaatatccaaataaatgttacttaataatataactaatgaagaggaatgtcgagaaaaccatataaaagttcaatctctaatcaaatcatgttttccttc

SEQ ID NO: 84632 - protein, 312 aa, Arabidopsis thaliana
  peptide (1)..(312): Ceres Seq. ID no. 12676218
  misc_feature (97)..(311): Pfam Name: Dienelactone hydrolase family Pfam Description: Dienelactone hydrolase family
  misc_feature (3)..(312): Homolog of NCBI NO: 18399662 NR Description: expressed protein; protein id: At1g35420.1, by cDNA: 151718. [Arabidopsis thaliana] >gi|25403234|pir||C86475
  misc_feature (3)..(312): Homolog of NCBI NO: 21553574 NR Description: unknown [Arabidopsis thaliana]
  misc_feature (89)..(311): Homolog of NCBI NO: 20270371 NR Description: hypothetical protein BC001573 [Homo sapiens] Unknown (protein for MGC:5522) [Homo sapiens]
  misc_feature (89)..(311): Homolog of NCBI NO: 18676733 NR Description: unnamed protein product [Homo sapiens]
  misc_feature (89)..(311): Homolog of NCBI NO: 34854915 NR Description: similar to Ab2-225 [Rattus norvegicus]
  misc_feature (93)..(311): Homolog of NCBI NO: 40253303 NR Description: putative Endo-1,3;1,4-beta-D-glucanase precursor
  misc_feature (88)..(306): Homolog of NCBI NO: 18403820 NR Description: expressed protein; protein id: At3g23600.1, by cDNA: 11339., supported by cDNA: gi_17381243, supported by gi_20453364 [Arabidopsis thaliana] >gi|9294516|dbj|BAB02778.1|
  misc_feature (66)..(311): Homolog of NCBI NO: 40253306 NR Description: putative Endo-1,3;1,4-beta-D-glucanase precursor
  misc_feature (113)..(311): Homolog of NCBI NO: 18403812 NR Description: expressed protein; protein id: At3g23570.1, by cDNA: gi_13899072 [Arabidopsis thaliana]
  misc_feature (113)..(311): Homolog of NCBI NO: 24899687 NR Description: Unknown protein [Arabidopsis thaliana]
LTMAASLASLSSLAKAGAPRSLFNRHGSHRLPPPQIIPLASSIKKHITTSFYRRGSSLKNIYALETSDGAINVEVDDDEEEEACELVNGTEVSVDGVEGYLLTAVKNNNGTGLLLLSDVFGFQDSATRDFAYRVACNGYNVLVPDLFRGDPWSKNRPKSEYEEWRRGHDPNRIRQDTTTFTKWMVEEFAAAGISKKLGVMGFCFGGGRVVDVLATDESGYFSTGVSFYGTRIDSAVAGDVKVPVLFIAGDRDPLCEVKGLYEIEEKIGEGSKVVVYEGRGHGFVHRPETPEDDRDAEEAFALMRNWLHHHLI

SEQ ID NO: 84633 - protein, 310 aa, Arabidopsis thaliana
  peptide (1)..(310): Ceres Seq. ID no. 12676219
  misc_feature (95)..(309): Pfam Name: Dienelactone hydrolase family Pfam Description: Dienelactone hydrolase family
  misc_feature (1)..(310): Homolog of NCBI NO: 18399662 NR Description: expressed protein; protein id: At1g35420.1, by cDNA: 151718. [Arabidopsis thaliana] >gi|25403234|pir||C86475
  misc_feature (1)..(310): Homolog of NCBI NO: 21553574 NR Description: unknown [Arabidopsis thaliana]
  misc_feature (87)..(309): Homolog of NCBI NO: 20270371 NR Description: hypothetical protein BC001573 [Homo sapiens] Unknown (protein for MGC:5522) [Homo sapiens]
  misc_feature (87)..(309): Homolog of NCBI NO: 18676733 NR Description: unnamed protein product [Homo sapiens]
  misc_feature (87)..(309): Homolog of NCBI NO: 34854915 NR Description: similar to Ab2-225 [Rattus norvegicus]
  misc_feature (91)..(309): Homolog of NCBI NO: 40253303 NR Description: putative Endo-1,3;1,4-beta-D-glucanase precursor
  misc_feature (86)..(304): Homolog of NCBI NO: 18403820 NR Description: expressed protein; protein id: At3g23600.1, by cDNA: 11339., supported by cDNA: gi_17381243, supported by gi_20453364 [Arabidopsis thaliana] >gi|9294516|dbj|BAB02778.1|
  misc_feature (64)..(309): Homolog of NCBI NO: 40253306 NR Description: putative Endo-1,3;1,4-beta-D-glucanase precursor
  misc_feature (111)..(309): Homolog of NCBI NO: 18403812 NR Description: expressed protein; protein id: At3g23570.1, by cDNA: gi_13899072 [Arabidopsis thaliana]
  misc_feature (111)..(309): Homolog of NCBI NO: 24899687 NR Description: Unknown protein [Arabidopsis thaliana]
MAASLASLSSLAKAGAPRSLFNRHGSHRLPPPQIIPLASSIKKHITTSFYRRGSSLKNIYALETSDGAINVEVDDDEEEEACELVNGTEVSVDGVEGYLLTAVKNNNGTGLLLLSDVFGFQDSATRDFAYRVACNGYNVLVPDLFRGDPWSKNRPKSEYEEWRRGHDPNRIRQDTTTFTKWMVEEFAAAGISKKLGVMGFCFGGGRVVDVLATDESGYFSTGVSFYGTRIDSAVAGDVKVPVLFIAGDRDPLCEVKGLYEIEEKIGEGSKVVVYEGRGHGFVHRPETPEDDRDAEEAFALMRNWLHHHLI

SEQ ID NO: 84634 - DNA, 1019 bp, Arabidopsis thaliana
  misc_feature (1)..(1019): Ceres Seq. ID no. 12676277
  misc_feature: MA Experiment ID: 108462 Result: Up-regulated in Transcription
  misc_feature: MA Experiment 108462 PARAMETER Experiment Name: At_Germinating_Seeds_cDNA_P Parameter: Age (day) Value: 2 vs. 0
  misc_feature: MA Experiment 108462 PARAMETER Experiment Name: At_Germinating_Seeds_cDNA_P Parameter: Tissue Value: Germinating Seeds
  misc_feature: MA Experiment ID: 108464 Result: Up-regulated in Transcription
  misc_feature: MA Experiment 108464 PARAMETER Experiment Name: At_Germinating_Seeds_cDNA_P Parameter: Age (day) Value: 4 vs. 0
  misc_feature: MA Experiment 108464 PARAMETER Experiment Name: At_Germinating_Seeds_cDNA_P Parameter: Tissue Value: Germinating Seeds
  misc_feature: MA Experiment ID: 108488 Result: Up-regulated in Transcription
  misc_feature: MA Experiment ID: 20000111 Result: Up-regulated in Transcription
  misc_feature: MA Experiment 20000111 PARAMETER Experiment Name: At_42deg_Heat_cDNA_P Parameter: Temperature (deg C) Value: 42 vs. 22
  misc_feature: MA Experiment 20000111 PARAMETER Experiment Name: At_42deg_Heat_cDNA_P Parameter: Timepoint (hr) Value: 6
  misc_feature: MA Experiment 20000111 PARAMETER Experiment Name: At_42deg_Heat_cDNA_P Parameter: Tissue Value: Aerial
  misc_feature: MA Experiment ID: 20000314 Result: Down-regulated in Transcription
  misc_feature: MA Experiment 20000314 PARAMETER Experiment Name: At_14day_Shoots-Roots_Sub_P Parameter: Age (day) Value: 14
  misc_feature: MA Experiment 20000314 PARAMETER Experiment Name: At_14day_Shoots-Roots_Sub_P Parameter: Organism Value: A. thaliana
  misc_feature: MA Experiment 20000314 PARAMETER Experiment Name: At_14day_Shoots-Roots_Sub_P Parameter: Plant Line Value: WS
  misc_feature: MA Experiment 20000314 PARAMETER Experiment Name: At_14day_Shoots-Roots_Sub_P Parameter: Tissue Value: Roots vs. Whole Plant
  misc_feature: MA Experiment ID: 20000315 Result: Up-regulated in Transcription
  misc_feature: MA Experiment 20000315 PARAMETER Experiment Name: At_14day_Shoots-Roots_Sub_P Parameter: Age (day) Value: 14
  misc_feature: MA Experiment 20000315 PARAMETER Experiment Name: At_14day_Shoots-Roots_Sub_P Parameter: Organism Value: A. thaliana
  misc_feature: MA Experiment 20000315 PARAMETER Experiment Name: At_14day_Shoots-Roots_Sub_P Parameter: Plant Line Value: WS
  misc_feature: MA Experiment 20000315 PARAMETER Experiment Name: At_14day_Shoots-Roots_Sub_P Parameter: Tissue Value: Shoots vs. Whole Plant
  misc_feature: MA Experiment ID: 20000328 Result: Up-regulated in Transcription
  misc_feature: MA Experiment 20000328 PARAMETER Experiment Name: At_42deg_Heat_Sub_P Parameter: Age (day) Value: 14
  misc_feature: MA Experiment 20000328 PARAMETER Experiment Name: At_42deg_Heat_Sub_P Parameter: Organism Value: A. thaliana
  misc_feature: MA Experiment 20000328 PARAMETER Experiment Name: At_42deg_Heat_Sub_P Parameter: Plant Line Value: WS
  misc_feature: MA Experiment 20000328 PARAMETER Experiment Name: At_42deg_Heat_Sub_P Parameter: Temperature (deg C) Value: 42 vs. 22
  misc_feature: MA Experiment 20000328 PARAMETER Experiment Name: At_42deg_Heat_Sub_P Parameter: Timepoint (hr) Value: 6
  misc_feature: MA Experiment 20000328 PARAMETER Experiment Name: At_42deg_Heat_Sub_P Parameter: Tissue Value: Aerial
  misc_feature: MA Experiment ID: 20001807 Result: Up-regulated in Transcription
  misc_feature: MA Experiment 20001807 PARAMETER Experiment Name: At_50mM_NH4NO3_L-to-H_Sub_P Parameter: Timepoint (hr) Value: 6
  misc_feature: MA Experiment 20001807 PARAMETER Experiment Name: At_50mM_NH4NO3_L-to-H_Sub_P Parameter: Tissue Value: Leaf
  misc_feature: MA Experiment 20001807 PARAMETER Experiment Name: At_50mM_NH4NO3_L-to-H_Sub_P Parameter: Treatment Value: 50mM NH4NO3 vs 100mM Mannitol
actctcactcacaagttagtcaccaaaaaaaaaaaaaaacacaaaaagtttcaatggccgcctccacaatggctctctcctcccctgccttcgccggaaaggctgtgaacctttcccccgcggcatctgaagtcctcggaagcggccgtgtgacaatgaggaagactgttgccaagccaaagggtccatcaggcagcccatggtacggatccgaccgagtcaagtacttgggtccattctctggcgagtcaccgagctaccttaccggagagttccccggagactacggatgggacaccgctggactttcagctgatcccgagacattcgcaaggaaccgtgagctagaagttatccacagcaggtgggctatgctcggagccctaggctgcgtcttccctgagcttttggctaggaacggagtcaagttcggagaggcggtttggttcaaggccggttcacagatctttagcgatggaggactcgattacttgggaaaccctagcttggtccacgctcagagcattttggccatttgggccactcaagttatcttgatgggagctgttgaaggctacagagtcgcaggaaatgggccgttgggagaggccgaggacttgctttaccccggtggcagcttcgacccattgggtcttgctaccgacccagaggctttcgcggagttgaaggtgaaggagctcaagaacggaagattggctatgttctctatgtttggattcttcgttcaagccattgtcactggtaagggaccgatagagaaccttgctgaccatttggccgatccagtcaacaacaacgcatgggccttcgcaaccaactttgttcccggaaagtgagccaagttttatcagtttgtattttgcttttctttcagtcttttgaattcgagtgagagacatgaggagaaagagaaggttgtatgtgatggtttgagactttcagatgtaaatttgcaagactttgtatgatttgtcattaatcaaactcaattttctctc

SEQ ID NO: 84635 - protein, 284 aa, Arabidopsis thaliana
  peptide (1)..(284): Ceres Seq. ID no. 12676278
  misc_feature (82)..(251): Pfam Name: Chlorophyll A-B binding protein Pfam Description: Chlorophyll A-B binding protein
  misc_feature (18)..(284): Homolog of NCBI NO: 18397286 NR Description: photosystem II type I chlorophyll a /b binding putative; protein id: At1g29910.1, supported by cDNA: gi_17473827
  misc_feature (18)..(284): Homolog of NCBI NO: 15220615 NR Description: light-harvesting chlorophyll a/b binding protein; id: At1g29930.1, supported by cDNA: gi_15010743, supported by
  misc_feature (18)..(284): Homolog of NCBI NO: 17473828 NR Description: chlorophyll a/b-binding protein [Arabidopsis
  misc_feature (18)..(284): Homolog of NCBI NO: 18403546 NR Description: photosystem II type I chlorophyll a /b binding protein id: At2g34420.1, supported by cDNA: gi_13926259, by cDNA: gi_14517451, supported by cDNA: gi_15027898, supported
  misc_feature (18)..(284): Homolog of NCBI NO: 115778 NR Description: Chlorophyll A-B binding protein 1, chloroplast
  misc_feature (18)..(284): Homolog of NCBI NO: 18403549 NR Description: photosystem II type I chlorophyll a /b binding protein id: At2g34430.1, supported by cDNA: 23727., supported by
  misc_feature (18)..(284): Homolog of NCBI NO: 18266039 NR Description: chlorophyll a/b binding protein [Brassica
  misc_feature (18)..(284): Homolog of NCBI NO: 21592428 NR Description: putative photosystem II type I chlorophyll a b
  misc_feature (37)..(284): Homolog of NCBI NO: 12324161 NR Description: chlorophyll A-B-binding protein 2 precursor, 5'
  misc_feature (18)..(284): Homolog of NCBI NO: 115819 NR Description: Chlorophyll A-B binding protein 1B, chloroplast
SHSQVSHQKKKKTQKVSMAASTMALSSPAFAGKAVNLSPAASEVLGSGRVTMRKTVAKPKGPSGSPWYGSDRVKYLGPFSGESPSYLTGEFPGDYGWDTAGLSADPETFARNRELEVIHSRWAMLGALGCVFPELLARNGVKFGEAVWFKAGSQIFSDGGLDYLGNPSLVHAQSILAIWATQVILMGAVEGYRVAGNGPLGEAEDLLYPGGSFDPLGLATDPEAFAELKVKELKNGRLAMFSMFGFFVQAIVTGKGPIENLADHLADPVNNNAWAFATNFVPGK

SEQ ID NO: 84636 - protein, 267 aa, Arabidopsis thaliana; identical to SEQ ID NO: 21212
  peptide (1)..(267): Ceres Seq. ID no. 12676279
  misc_feature (65)..(234): Pfam Name: Chlorophyll A-B binding protein Pfam Description: Chlorophyll A-B binding protein
  misc_feature (1)..(267): Homolog of NCBI NO: 18397286 NR Description: photosystem II type I chlorophyll a /b binding putative; protein id: At1g29910.1, supported by cDNA: gi_17473827
  misc_feature (1)..(267): Homolog of NCBI NO: 15220615 NR Description: light-harvesting chlorophyll a/b binding protein; id: At1g29930.1, supported by cDNA: gi_15010743, supported by
  misc_feature (1)..(267): Homolog of NCBI NO: 17473828 NR Description: chlorophyll a/b-binding protein [Arabidopsis
  misc_feature (1)..(267): Homolog of NCBI NO: 18403546 NR Description: photosystem II type I chlorophyll a /b binding protein id: At2g34420.1, supported by cDNA: gi_13926259, by cDNA: gi_14517451, supported by cDNA: gi_15027898, supported
  misc_feature (1)..(267): Homolog of NCBI NO: 115778 NR Description: Chlorophyll A-B binding protein 1, chloroplast
  misc_feature (1)..(267): Homolog of NCBI NO: 18403549 NR Description: photosystem II type I chlorophyll a /b binding protein id: At2g34430.1, supported by cDNA: 23727., supported by
  misc_feature (1)..(267): Homolog of NCBI NO: 18266039 NR Description: chlorophyll a/b binding protein [Brassica
  misc_feature (1)..(267): Homolog of NCBI NO: 21592428 NR Description: putative photosystem II type I chlorophyll a b
  misc_feature (20)..(267): Homolog of NCBI NO: 12324161 NR Description: chlorophyll A-B-binding protein 2 precursor, 5'
  misc_feature (1)..(267): Homolog of NCBI NO: 115819 NR Description: Chlorophyll A-B binding protein 1B, chloroplast

SEQ ID NO: 84637 - protein, 262 aa, Arabidopsis thaliana; identical to SEQ ID NO: 21213
  peptide (1)..(262): Ceres Seq. ID no. 12676280
  misc_feature (60)..(229): Pfam Name: Chlorophyll A-B binding protein Pfam Description: Chlorophyll A-B binding protein
  misc_feature (1)..(262): Homolog of NCBI NO: 18397286 NR Description: photosystem II type I chlorophyll a /b binding putative; protein id: At1g29910.1, supported by cDNA: gi_17473827
  misc_feature (1)..(262): Homolog of NCBI NO: 15220615 NR Description: light-harvesting chlorophyll a/b binding protein; id: At1g29930.1, supported by cDNA: gi_15010743, supported by
  misc_feature (1)..(262): Homolog of NCBI NO: 17473828 NR Description: chlorophyll a/b-binding protein [Arabidopsis
  misc_feature (1)..(262): Homolog of NCBI NO: 18403546 NR Description: photosystem II type I chlorophyll a /b binding protein id: At2g34420.1, supported by cDNA: gi_13926259, by cDNA: gi_14517451, supported by cDNA: gi_15027898, supported
  misc_feature (1)..(262): Homolog of NCBI NO: 115778 NR Description: Chlorophyll A-B binding protein 1, chloroplast
  misc_feature (1)..(262): Homolog of NCBI NO: 18403549 NR Description: photosystem II type I chlorophyll a /b binding protein id: At2g34430.1, supported by cDNA: 23727., supported by
  misc_feature (1)..(262): Homolog of NCBI NO: 18266039 NR Description: chlorophyll a/b binding protein [Brassica
  misc_feature (1)..(262): Homolog of NCBI NO: 21592428 NR Description: putative photosystem II type I chlorophyll a b
  misc_feature (15)..(262): Homolog of NCBI NO: 12324161 NR Description: chlorophyll A-B-binding protein 2 precursor, 5'
  misc_feature (1)..(262): Homolog of NCBI NO: 115819 NR Description: Chlorophyll A-B binding protein 1B, chloroplast

SEQ ID NO: 84638 - DNA, 870 bp, Arabidopsis thaliana
  misc_feature (1)..(870): Ceres Seq. ID no. 12676281
  misc_feature: MA Experiment ID: 108462 Result: Up-regulated in Transcription
  misc_feature: MA Experiment 108462 PARAMETER Experiment Name: At_Germinating_Seeds_cDNA_P Parameter: Age (day) Value: 2 vs. 0
  misc_feature: MA Experiment 108462 PARAMETER Experiment Name: At_Germinating_Seeds_cDNA_P Parameter: Tissue Value: Germinating Seeds
  misc_feature: MA Experiment ID: 108464 Result: Up-regulated in Transcription
  misc_feature: MA Experiment 108464 PARAMETER Experiment Name: At_Germinating_Seeds_cDNA_P Parameter: Age (day) Value: 4 vs. 0
  misc_feature: MA Experiment 108464 PARAMETER Experiment Name: At_Germinating_Seeds_cDNA_P Parameter: Tissue Value: Germinating Seeds
  misc_feature: MA Experiment ID: 108488 Result: Up-regulated in Transcription
  misc_feature: MA Experiment ID: 20000111 Result: Up-regulated in Transcription
  misc_feature: MA Experiment 20000111 PARAMETER Experiment Name: At_42deg_Heat_cDNA_P Parameter: Temperature (deg C) Value: 42 vs. 22
  misc_feature: MA Experiment 20000111 PARAMETER Experiment Name: At_42deg_Heat_cDNA_P Parameter: Timepoint (hr) Value: 6
  misc_feature: MA Experiment 20000111 PARAMETER Experiment Name: At_42deg_Heat_cDNA_P Parameter: Tissue Value: Aerial
atggccgcctccacaatggctctctcctcccctgccttcgccggaaaggctgtgaacctttcccccgcggcatctgaagtcctcggaagcggccgtgtgacaatgaggaagactgttgccaagccaaagggtccatcaggcagcccatggtacggatccgaccgagtcaagtacttgggtccattctctggcgagtcaccgagctaccttaccggagagttccccggagactacggatgggacaccgctggactttcagctgatcccgagacattcgcaaggaaccgtgagctagaagttatccacagcaggtgggctatgctcggagccctaggctgcgtcttccctgagcttttggctaggaacggagtcaagttcggagaggcggtttggttcaaggccggttcacagatctttagcgatggaggactcgattacttgggaaaccctagcttggtccacgctcagagcattttggccatttgggccactcaagttatcttgatgggagctgttgaaggctacagagtcgcaggaaatgggccgttgggagaggccgaggacttgctttaccccggtggcagcttcgacccattgggtcttgctaccgacccagaggctttcgcggagttgaaggtgaaggagctcaagaacggaagattggctatgttctctatgtttggattcttcgttcaagccattgtcactggtaagggaccgatagagaaccttgctgaccatttggccgatccagtcaacaacaacgcatgggccttcgcaaccaactttgttcccggaaagtgagccaagttttatcagtttgtattttgcttttctttcagtcttttgaattcgagtgagagacatgag

SEQ ID NO: 84639 - protein, 267 aa, Arabidopsis thaliana; identical to SEQ ID NO: 21212
  peptide (1)..(267): Ceres Seq. ID no. 12676282
  misc_feature (65)..(234): Pfam Name: Chlorophyll A-B binding protein Pfam Description: Chlorophyll A-B binding protein
  misc_feature (1)..(267): Homolog of NCBI NO: 18397286 NR Description: photosystem II type I chlorophyll a /b binding putative; protein id: At1g29910.1, supported by cDNA: gi_17473827
  misc_feature (1)..(267): Homolog of NCBI NO: 15220615 NR Description: light-harvesting chlorophyll a/b binding protein; id: At1g29930.1, supported by cDNA: gi_15010743, supported by
  misc_feature (1)..(267): Homolog of NCBI NO: 17473828 NR Description: chlorophyll a/b-binding protein [Arabidopsis
  misc_feature (1)..(267): Homolog of NCBI NO: 18403546 NR Description: photosystem II type I chlorophyll a /b binding protein id: At2g34420.1, supported by cDNA: gi_13926259, by cDNA: gi_14517451, supported by cDNA: gi_15027898, supported
  misc_feature (1)..(267): Homolog of NCBI NO: 115778 NR Description: Chlorophyll A-B binding protein 1, chloroplast
  misc_feature (1)..(267): Homolog of NCBI NO: 18403549 NR Description: photosystem II type I chlorophyll a /b binding protein id: At2g34430.1, supported by cDNA: 23727., supported by
  misc_feature (1)..(267): Homolog of NCBI NO: 18266039 NR Description: chlorophyll a/b binding protein [Brassica
  misc_feature (1)..(267): Homolog of NCBI NO: 21592428 NR Description: putative photosystem II type I chlorophyll a b
  misc_feature (20)..(267): Homolog of NCBI NO: 12324161 NR Description: chlorophyll A-B-binding protein 2 precursor, 5'
  misc_feature (1)..(267): Homolog of NCBI NO: 115819 NR Description: Chlorophyll A-B binding protein 1B, chloroplast

SEQ ID NO: 84640 - protein, 262 aa, Arabidopsis thaliana; identical to SEQ ID NO: 21213
  peptide (1)..(262): Ceres Seq. ID no. 12676283
  misc_feature (60)..(229): Pfam Name: Chlorophyll A-B binding protein Pfam Description: Chlorophyll A-B binding protein
  misc_feature (1)..(262): Homolog of NCBI NO: 18397286 NR Description: photosystem II type I chlorophyll a /b binding putative; protein id: At1g29910.1, supported by cDNA: gi_17473827
  misc_feature (1)..(262): Homolog of NCBI NO: 15220615 NR Description: light-harvesting chlorophyll a/b binding protein; id: At1g29930.1, supported by cDNA: gi_15010743, supported by
  misc_feature (1)..(262): Homolog of NCBI NO: 17473828 NR Description: chlorophyll a/b-binding protein [Arabidopsis
  misc_feature (1)..(262): Homolog of NCBI NO: 18403546 NR Description: photosystem II type I chlorophyll a /b binding protein id: At2g34420.1, supported by cDNA: gi_13926259, by cDNA: gi_14517451, supported by cDNA: gi_15027898, supported
  misc_feature (1)..(262): Homolog of NCBI NO: 115778 NR Description: Chlorophyll A-B binding protein 1, chloroplast
  misc_feature (1)..(262): Homolog of NCBI NO: 18403549 NR Description: photosystem II type I chlorophyll a /b binding protein id: At2g34430.1, supported by cDNA: 23727., supported by
  misc_feature (1)..(262): Homolog of NCBI NO: 18266039 NR Description: chlorophyll a/b binding protein [Brassica
  misc_feature (1)..(262): Homolog of NCBI NO: 21592428 NR Description: putative photosystem II type I chlorophyll a b
  misc_feature (15)..(262): Homolog of NCBI NO: 12324161 NR Description: chlorophyll A-B-binding protein 2 precursor, 5'
  misc_feature (1)..(262): Homolog of NCBI NO: 115819 NR Description: Chlorophyll A-B binding protein 1B, chloroplast

SEQ ID NO: 84641 - protein, 233 aa, Arabidopsis thaliana; identical to SEQ ID NO: 21214
  peptide (1)..(233): Ceres Seq. ID no. 12676284
  misc_feature (31)..(200): Pfam Name: Chlorophyll A-B binding protein Pfam Description: Chlorophyll A-B binding protein
  misc_feature (1)..(233): Homolog of NCBI NO: 18397286 NR Description: photosystem II type I chlorophyll a /b binding putative; protein id: At1g29910.1, supported by cDNA: gi_17473827
  misc_feature (1)..(233): Homolog of NCBI NO: 15220615 NR Description: light-harvesting chlorophyll a/b binding protein; id: At1g29930.1, supported by cDNA: gi_15010743, supported by
  misc_feature (1)..(233): Homolog of NCBI NO: 17473828 NR Description: chlorophyll a/b-binding protein [Arabidopsis
  misc_feature (1)..(233): Homolog of NCBI NO: 18403546 NR Description: photosystem II type I chlorophyll a /b binding protein id: At2g34420.1, supported by cDNA: gi_13926259, by cDNA: gi_14517451, supported by cDNA: gi_15027898, supported
  misc_feature (1)..(233): Homolog of NCBI NO: 115778 NR Description: Chlorophyll A-B binding protein 1, chloroplast
  misc_feature (1)..(233): Homolog of NCBI NO: 18403549 NR Description: photosystem II type I chlorophyll a /b binding protein id: At2g34430.1, supported by cDNA: 23727., supported by
  misc_feature (1)..(233): Homolog of NCBI NO: 18266039 NR Description: chlorophyll a/b binding protein [Brassica
  misc_feature (1)..(233): Homolog of NCBI NO: 21592428 NR Description: putative photosystem II type I chlorophyll a b
  misc_feature (1)..(233): Homolog of NCBI NO: 12324161 NR Description: chlorophyll A-B-binding protein 2 precursor, 5'
  misc_feature (1)..(233): Homolog of NCBI NO: 115819 NR Description: Chlorophyll A-B binding protein 1B, chloroplast

SEQ ID NO: 84642 - DNA, 1557 bp, Arabidopsis thaliana
  misc_feature (1)..(1557): Ceres Seq. ID no. 12676299
  misc_feature: MA Experiment ID: 20000171 Result: Up-regulated in Transcription
  misc_feature: MA Experiment 20000171 PARAMETER Experiment Name: At_42deg_Heat_P Parameter: Age (day) Value: 14
  misc_feature: MA Experiment 20000171 PARAMETER Experiment Name: At_42deg_Heat_P Parameter: Organism Value: A. thaliana
  misc_feature: MA Experiment 20000171 PARAMETER Experiment Name: At_42deg_Heat_P Parameter: Plant Line Value: WS
  misc_feature: MA Experiment 20000171 PARAMETER Experiment Name: At_42deg_Heat_P Parameter: Temperature (deg C) Value: 42 vs. 22
  misc_feature: MA Experiment 20000171 PARAMETER Experiment Name: At_42deg_Heat_P Parameter: Timepoint (hr) Value: 1
  misc_feature: MA Experiment 20000171 PARAMETER Experiment Name: At_42deg_Heat_P Parameter: Tissue Value: Aerial
  misc_feature: MA Experiment ID: 20000185 Result: Up-regulated in Transcription
  misc_feature: MA Experiment 20000185 PARAMETER Experiment Name: At_Roots__P Parameter: Age (day) Value: 7 vs. 21
  misc_feature: MA Experiment 20000185 PARAMETER Experiment Name: At_Roots__P Parameter: Organism Value: A. thaliana
  misc_feature: MA Experiment 20000185 PARAMETER Experiment Name: At_Roots__P Parameter: Tissue Value: Roots vs. Whole Plant
  misc_feature: MA Experiment ID: 20000286 Result: Up-regulated in Transcription
  misc_feature: MA Experiment 20000286 PARAMETER Experiment Name: At_Open_Flower_P Parameter: Age (day) Value: 21
  misc_feature: MA Experiment 20000286 PARAMETER Experiment Name: At_Open_Flower_P Parameter: Plant Line Value: WS
  misc_feature: MA Experiment 20000286 PARAMETER Experiment Name: At_Open_Flower_P Parameter: Tissue Value: Half Open vs. Whole Plant
  misc_feature: MA Experiment ID: 20000439 Result: Up-regulated in Transcription
  misc_feature: MA Experiment 20000439 PARAMETER Experiment Name: At_Roots__P Parameter: Age (day) Value: 14 vs. 21
  misc_feature: MA Experiment 20000439 PARAMETER Experiment Name: At_Roots__P Parameter: Organism Value: A. thaliana
  misc_feature: MA Experiment 20000439 PARAMETER Experiment Name: At_Roots__P Parameter: Tissue Value: Roots vs. Whole Plant
  misc_feature: MA Experiment ID: 20000451 Result: Up-regulated in Transcription
  misc_feature: MA Experiment 20000451 PARAMETER Experiment Name: At_CS6879_Shoots-Roots_P Parameter: Age (day) Value: 14
  misc_feature: MA Experiment 20000451 PARAMETER Experiment Name: At_CS6879_Shoots-Roots_P Parameter: Organism Value: A. thaliana
  misc_feature: MA Experiment 20000451 PARAMETER Experiment Name: At_CS6879_Shoots-Roots_P Parameter: Plant Line Value: CS6879 vs. WS
  misc_feature: MA Experiment 20000451 PARAMETER Experiment Name: At_CS6879_Shoots-Roots_P Parameter: Tissue Value: Roots
acaagcactttctccctcagtctttatctccctctttctctcttctccatgtctaacatgtttagcagaattgccatgaccaactctatcgttcttcttctattttccttgactttcttagaacatggattgttgtttcaaagggtctcctctcttggcatcaactatggtcaagtcggcgacaatcttcctccaccggacaaagttctacaactcttgagttcactccatatcaataagacaagaatctatgacacaaaccctcgagtgttaacctcatttgccaattccaatatcgagctctttgtcaccgtcgaaaatgaaatgcttcccagcttagtagaccctcaacaagctctccaatgggtcactacccgtatcaaaccctactttccggccaccaagatcggtggtatcgccgtcggcaacgaactatacactgacgatgactcaagccttatagggtatcttatgcctgcaatgatgagcattcatggggctttggtccaaaccggactagacaagtacattcaagtatcgactccgaactcactatccgtccttcaagaatcttaccctccatccgccggatgttttaggccggaagtagctggcgtaatgacacagctactaggtttcttgcgtaacacgaattcccccttctggatcaacgcttacccttacttcgcttacaaggattccccaacaaagatcccattagactacgtcctcttcaaccctaaccctggaatggttgacccctataccaagtaccgctatgacaacatgctctacgctcaagtagacgctgtgatctttgccatggcgaggcttggcttcaaagacatcgaagttggggtctcggagactggatggccgtctaaaggcgatggagatgaggttggagccactgtggccaacgcagccgtttataacaaaaatattctaaggagacaacttcaaaatgaaggaacgccattgagaccaaacttgagttttgatgtttatctatttgctcttttcaatgaagaccttaaaccaggaccaacctctgagaggaattatggattgtatcagcctgatgagaccatgacttacaatgtaggtttattatcgtcgtcatcattaacatcaacatcaactacttcttcaacttctattatttccctcacttcctctgcctccacggctttaaagaagggaaagcaacggttgatgtattggacatgcgtttatttgttggccattcacatgctaattagaagatcgtactagaagcaaaaacaaattgagagagcttctaagtgtaaatagagagtccactaatgcggtccaatttttcaacgagaagaattaaattattctcgaaagtgtctcagatgattctttaaaaggggaaaaaaacactcagaaaaattgagaagggaatgcagtactgcaaagcgaatcctatgtataaaaaactgacgattcatattatagaactttatttgtatttgtcttactaacgtgttaattactttcgttgtctaaataaaaagtgactaaaattaatca

SEQ ID NO: 84643 - protein, 424 aa, Arabidopsis thaliana
  peptide (1)..(424): Ceres Seq. ID no. 12676300
  misc_feature (52)..(369): Pfam Name: Glycosyl hydrolases family 17 Pfam Description: Glycosyl hydrolases family 17
  misc_feature (17)..(424): Homolog of NCBI NO: 30691233 NR Description: glycosyl hydrolase family 17 [Arabidopsis
  misc_feature (17)..(424): Homolog of NCBI NO: 22530916 NR Description: putative beta-1,3-glucanase precursor
  misc_feature (17)..(369): Homolog of NCBI NO: 25316440 NR Description: hypothetical protein T1P2.13 - Arabidopsis
  misc_feature (31)..(424): Homolog of NCBI NO: 22328768 NR Description: glycosyl hydrolase family 17; protein id:
  misc_feature (31)..(395): Homolog of NCBI NO: 7447983 NR Description: hypothetical protein T9A21.190 - Arabidopsis
  misc_feature (29)..(369): Homolog of NCBI NO: 25316443 NR Description: CDS protein F9L11.6 [imported] - Arabidopsis
  misc_feature (29)..(369): Homolog of NCBI NO: 30692765 NR Description: glycosyl hydrolase family 17 [Arabidopsis
  misc_feature (32)..(397): Homolog of NCBI NO: 419789 NR Description: hypothetical protein - potato
  misc_feature (29)..(401): Homolog of NCBI NO: 34908492 NR Description: putative beta-1,3-glucanase [Oryza sativa
  misc_feature (51)..(370): Homolog of NCBI NO: 38346337 NR Description: OSJNBa0073L04.8 [Oryza sativa (japonica
TSTFSLSLYLPLSLFSMSNMFSRIAMTNSIVLLLFSLTFLEHGLLFQRVSSLGINYGQVGDNLPPPDKVLQLLSSLHINKTRIYDTNPRVLTSFANSNIELFVTVENEMLPSLVDPQQALQWVTTRIKPYFPATKIGGIAVGNELYTDDDSSLIGYLMPAMMSIHGALVQTGLDKYIQVSTPNSLSVLQESYPPSAGCFRPEVAGVMTQLLGFLRNTNSPFWINAYPYFAYKDSPTKIPLDYVLFNPNPGMVDPYTKYRYDNMLYAQVDAVIFAMARLGFKDIEVGVSETGWPSKGDGDEVGATVANAAVYNKNILRRQLQNEGTPLRPNLSFDVYLFALFNEDLKPGPTSERNYGLYQPDETMTYNVGLLSSSSLTSTSTTSSTSIISLTSSASTALKKGKQRLMYWTCVYLLAIHMLIRRSY

SEQ ID NO: 84644 - protein, 408 aa, Arabidopsis thaliana
  peptide (1)..(408): Ceres Seq. ID no. 12676301
  misc_feature (36)..(353): Pfam Name: Glycosyl hydrolases family 17 Pfam Description: Glycosyl hydrolases family 17
  misc_feature (1)..(408): Homolog of NCBI NO: 30691233 NR Description: glycosyl hydrolase family 17 [Arabidopsis
  misc_feature (1)..(408): Homolog of NCBI NO: 22530916 NR Description: putative beta-1,3-glucanase precursor
  misc_feature (1)..(353): Homolog of NCBI NO: 25316440 NR Description: hypothetical protein T1P2.13 - Arabidopsis
  misc_feature (15)..(408): Homolog of NCBI NO: 22328768 NR Description: glycosyl hydrolase family 17; protein id:
  misc_feature (15)..(379): Homolog of NCBI NO: 7447983 NR Description: hypothetical protein T9A21.190 - Arabidopsis
  misc_feature (13)..(353): Homolog of NCBI NO: 25316443 NR Description: CDS protein F9L11.6 [imported] - Arabidopsis
  misc_feature (13)..(353): Homolog of NCBI NO: 30692765 NR Description: glycosyl hydrolase family 17 [Arabidopsis
  misc_feature (16)..(381): Homolog of NCBI NO: 419789 NR Description: hypothetical protein - potato
  misc_feature (13)..(385): Homolog of NCBI NO: 34908492 NR Description: putative beta-1,3-glucanase [Oryza sativa
  misc_feature (35)..(354): Homolog of NCBI NO: 38346337 NR Description: OSJNBa0073L04.8 [Oryza sativa (japonica
MSNMFSRIAMTNSIVLLLFSLTFLEHGLLFQRVSSLGINYGQVGDNLPPPDKVLQLLSSLHINKTRIYDTNPRVLTSFANSNIELFVTVENEMLPSLVDPQQALQWVTTRIKPYFPATKIGGIAVGNELYTDDDSSLIGYLMPAMMSIHGALVQTGLDKYIQVSTPNSLSVLQESYPPSAGCFRPEVAGVMTQLLGFLRNTNSPFWINAYPYFAYKDSPTKIPLDYVLFNPNPGMVDPYTKYRYDNMLYAQVDAVIFAMARLGFKDIEVGVSETGWPSKGDGDEVGATVANAAVYNKNILRRQLQNEGTPLRPNLSFDVYLFALFNEDLKPGPTSERNYGLYQPDETMTYNVGLLSSSSLTSTSTTSSTSIISLTSSASTALKKGKQRLMYWTCVYLLAIHMLIRRSY

SEQ ID NO: 84645 - protein, 405 aa, Arabidopsis thaliana
  peptide (1)..(405): Ceres Seq. ID no. 12676302
  misc_feature (33)..(350): Pfam Name: Glycosyl hydrolases family 17 Pfam Description: Glycosyl hydrolases family 17
  misc_feature (1)..(405): Homolog of NCBI NO: 30691233 NR Description: glycosyl hydrolase family 17 [Arabidopsis
  misc_feature (1)..(405): Homolog of NCBI NO: 22530916 NR Description: putative beta-1,3-glucanase precursor
  misc_feature (1)..(350): Homolog of NCBI NO: 25316440 NR Description: hypothetical protein T1P2.13 - Arabidopsis
  misc_feature (12)..(405): Homolog of NCBI NO: 22328768 NR Description: glycosyl hydrolase family 17; protein id:
  misc_feature (12)..(376): Homolog of NCBI NO: 7447983 NR Description: hypothetical protein T9A21.190 - Arabidopsis
  misc_feature (10)..(350): Homolog of NCBI NO: 25316443 NR Description: CDS protein F9L11.6 [imported] - Arabidopsis
  misc_feature (10)..(350): Homolog of NCBI NO: 30692765 NR Description: glycosyl hydrolase family 17 [Arabidopsis
  misc_feature (13)..(378): Homolog of NCBI NO: 419789 NR Description: hypothetical protein - potato
  misc_feature (10)..(382): Homolog of NCBI NO: 34908492 NR Description: putative beta-1,3-glucanase [Oryza sativa
  misc_feature (32)..(351): Homolog of NCBI NO: 38346337 NR Description: OSJNBa0073L04.8 [Oryza sativa (japonica
MFSRIAMTNSIVLLLFSLTFLEHGLLFQRVSSLGINYGQVGDNLPPPDKVLQLLSSLHINKTRIYDTNPRVLTSFANSNIELFVTVENEMLPSLVDPQQALQWVTTRIKPYFPATKIGGIAVGNELYTDDDSSLIGYLMPAMMSIHGALVQTGLDKYIQVSTPNSLSVLQESYPPSAGCFRPEVAGVMTQLLGFLRNTNSPFWINAYPYFAYKDSPTKIPLDYVLFNPNPGMVDPYTKYRYDNMLYAQVDAVIFAMARLGFKDIEVGVSETGWPSKGDGDEVGATVANAAVYNKNILRRQLQNEGTPLRPNLSFDVYLFALFNEDLKPGPTSERNYGLYQPDETMTYNVGLLSSSSLTSTSTTSSTSIISLTSSASTALKKGKQRLMYWTCVYLLAIHMLIRRSY

SEQ ID NO: 84646 - DNA, 723 bp, Arabidopsis thaliana
  misc_feature (1)..(723): Ceres Seq. ID no. 12676303
  misc_feature: MA Experiment ID: 108434 Result: Up-regulated in Transcription
  misc_feature: MA Experiment 108434 PARAMETER Experiment Name: At_Root_Tips_cDNA_P Parameter: Tissue Value: Root Tips
  misc_feature: MA Experiment ID: 108462 Result: Down-regulated in Transcription
  misc_feature: MA Experiment 108462 PARAMETER Experiment Name: At_Germinating_Seeds_cDNA_P Parameter: Age (day) Value: 2 vs. 0
  misc_feature: MA Experiment 108462 PARAMETER Experiment Name: At_Germinating_Seeds_cDNA_P Parameter: Tissue Value: Germinating Seeds
  misc_feature: MA Experiment ID: 108463 Result: Down-regulated in Transcription
  misc_feature: MA Experiment 108463 PARAMETER Experiment Name: At_Germinating_Seeds_cDNA_P Parameter: Age (day) Value: 3 vs. 0
  misc_feature: MA Experiment 108463 PARAMETER Experiment Name: At_Germinating_Seeds_cDNA_P Parameter: Tissue Value: Germinating Seeds
  misc_feature: MA Experiment ID: 20000184 Result: Down-regulated in Transcription
  misc_feature: MA Experiment 20000184 PARAMETER Experiment Name: At_Shoots__P Parameter: Age (day) Value: 7
  misc_feature: MA Experiment 20000184 PARAMETER Experiment Name: At_Shoots__P Parameter: Tissue Value: Shoots vs. Whole Plant
  misc_feature: MA Experiment ID: 20000224 Result: Up-regulated in Transcription
atctgcgagttttcaataaaccaccggagtgaggaagaagcagacgacgacgacgaagatgagttcatcgactgttcgtgatttgcagagagacctagaaaacaaggctaatgatctcggcaaaatccagaaagatatcgggaagaatcatcagctgagaaagaagtatacgatccaactcggtgagaatgagctcgtgcttaaggagttagatttgctggaagaagatgctaacgtctacaaattgattggtccggtgttagtgaagcaggatttggctgaagctaatgcaaatgttcgtaaacgaattgagtacatctctgctgaattgaaacggcttgatgcaattcttcaagatatggaagaaaaacaaaacaacaagagagaaacgataatgaagttacaacaaaggctacaaactatccaggcaggaaaagcaaaggcttgattgagctactcagttgcaaccacacttgttaaaccctttccactgtgctcggccttgtctcaatggtgtcatattcagttactgagggttcttgtggtttcagtttattgggtgattgatgtctctttgtgtcactaatctttttttgttgacaactagacttaagtgtgtaacttatacatgatcttgtcgccctttatgaagttatgagtttggagatttacaaaaaaatattgtgtgtgtgcgcctaatttggtcttcatacatacttcaag

SEQ ID NO: 84647 - protein, 129 aa, Arabidopsis thaliana; identical to SEQ ID NO: 26856
  peptide (1)..(129): Ceres Seq. ID no. 12676304
  misc_feature (13)..(120): Pfam Name: KE2 family protein Pfam Description: KE2 family protein
  misc_feature (1)..(129): Homolog of NCBI NO: 30691134 NR Description: hydrophilic protein -related [Arabidopsis
  misc_feature (1)..(129): Homolog of NCBI NO: 26450257 NR Description: unknown protein [Arabidopsis thaliana]
  misc_feature (1)..(91): Homolog of NCBI NO: 25403096 NR Description: probable hydrophilic protein, 29542-30030 - Arabidopsis thaliana >gi|12324172|gb|AAG52059.1|AC022455_13
  misc_feature (9)..(129): Homolog of NCBI NO: 7657162 NR Description: HLA class II region expressed gene KE2; KE2 [Homo sapiens] >gi|6016432|sp|O15212|PFD6_HUMAN Prefoldin subunit (Protein Ke2) >gi|2648022|emb|CAB09993.1| cICF0811.5.1 (HLA class
  misc_feature (9)..(127): Homolog of NCBI NO: 6754128 NR Description: H2-K region expressed gene 2 [Mus musculus]
  misc_feature (9)..(129): Homolog of NCBI NO: 33585747 NR Description: Unknown (protein for MGC:66282) [Danio rerio]
  misc_feature (9)..(127): Homolog of NCBI NO: 27704620 NR Description: similar to H2-K region expressed gene 2 [Mus
  misc_feature (14)..(129): Homolog of NCBI NO: 17506717 NR Description: KE2 family protein (14.7 kD) [Caenorhabditis
  misc_feature (1)..(124): Homolog of NCBI NO: 24667085 NR Description: CG7770-PA [Drosophila melanogaster]
  misc_feature (1)..(124): Homolog of NCBI NO: 38048503 NR Description: similar to Drosophila melanogaster CG7770

SEQ ID NO: 84648 - DNA, 1802 bp, Arabidopsis thaliana
  misc_feature (1)..(1802): Ceres Seq. ID no. 12676349
  misc_feature: MA Experiment ID: 108473 Result: Down-regulated in Transcription
  misc_feature: MA Experiment 108473 PARAMETER Experiment Name: At_Drought_Flowers_cDNA_P Parameter: Timepoint (hr) Value: 7 d
  misc_feature: MA Experiment 108473 PARAMETER Experiment Name: At_Drought_Flowers_cDNA_P Parameter: Tissue Value: Flower
  misc_feature: MA Experiment 108473 PARAMETER Experiment Name: At_Drought_Flowers_cDNA_P Parameter: Treatment Value: Drought vs. No Drought
  misc_feature: MA Experiment ID: 108501 Result: Down-regulated in Transcription
  misc_feature: MA Experiment 108501 PARAMETER Experiment Name: At_ap2_floral_buds_cDNA_P Parameter: Plant Line Value: ap2 (Ler.)
  misc_feature: MA Experiment 108501 PARAMETER Experiment Name: At_ap2_floral_buds_cDNA_P Parameter: Tissue Value: Closed Flower
  misc_feature: MA Experiment ID: 108576 Result: Up-regulated in Transcription
  misc_feature: MA Experiment 108576 PARAMETER Experiment Name: At_42deg_Heat_cDNA_P Parameter: Temperature (deg C) Value: 42 vs. 22
  misc_feature: MA Experiment 108576 PARAMETER Experiment Name: At_42deg_Heat_cDNA_P Parameter: Timepoint (hr) Value: 1
  misc_feature: MA Experiment 108576 PARAMETER Experiment Name: At_42deg_Heat_cDNA_P Parameter: Tissue Value: Aerial
gacagtggcaaacacttgaattaaaactgtttttttactacttgtagtaaaaccatgaagcgatcatccttggtcgattcttgttcatattcgagaatatttcgcagtattttctgtctcttatccttttgtatcttcttcttgacaacgaccaatgctcaggtaatgcatagacggctctggccttggccattgtggccacggccgtatccacagccgtggccaatgaatccaccaacacctgacccatcaccaaagcctgtcgcaccacctggcccatcatcaaaacctgtcgcaccaccaggcccatctccatgcccgtcaccaccaccaaagcctcaacccaagcccccaccagcacctagcccatctccatgcccatcaccaccacctaagcctcaaccaaagccagtgccaccaccagcatgcccaccaacacctcctaaacctcaaccgaagccagcaccaccgccagaaccaaagccagcgccaccaccagcaccaaagccagtcccatgtccatcaccacctaagccaccagccccaactccaaagcctgtcccaccacatggtccacctccaaaacctgctccagcaccaacgcctgccccttccccaaaacctgccccatcaccacctaagccagagaacaaaactataccggccgtgtttttctttggcgattcagtctttgacacaggaaataacaataatctagaaacaaagataaaaagtaattatcgtccctatggtatggactttaaattcagagttgcaactggtagattcagcaatggaatggttgcttccgattatttagccaaatacatgggagtaaaagaaattgtaccggcatatttagacccgaaaatacaaccaaacgatcttcttacgggagtatcttttgcatcgggtggtgctggctacaatcctactacatccgaagcagcgaatgcaatcccaatgctggaccaactgacatatttccaagactatatagagaaagtaaataggttagtaagacaagagaagagccaatataagttggcaggtttagagaagaccaatcagctaatatccaaaggagtggcaattgtcgtcgggggaagcaatgatctgatcattacatattttggaagtggtgctcaacgactcaaaaatgacatcgactcttataccactatcattgctgattctgccgccagtttcgttttgcaattgtatggatatggagcaagacgtataggagtgatcggaacaccaccacttggatgtgtaccatcacaaagactaaagaaaaagaaaatatgcaatgaagagctaaactatgcttctcagcttttcaattctaagctcctccttattttgggtcaattgtcaaaaaccctaccaaattctacattcgtttatatggacatctacactatcatcagtcagatgctagaaactcctgcggcttatggatttgaggagacaaagaaaccgtgttgcaaaacaggattattaagcgcaggtgccctctgcaagaagtctacatcgaaaatctgtcccaatacatcgtcttacttgttttgggacggtgtgcatcctactcaaagagcttataaaactataaacaaagtacttataaaagaataccttcatgttttatctaaataatagtattacattatttatctcatgcgaaaataaagacttttgctatgtactaatgatgtagaagatgtgggcccgtttctgtgactaaaaatgtagttaagcaaacaacatttgagatagtaatgtaagatttttcttttgtg

SEQ ID NO: 84649 - protein, 534 aa, Arabidopsis thaliana
  peptide (1)..(534): Ceres Seq. ID no. 12676350
  misc_feature (205)..(524): Pfam Name: GDSL-like Lipase/Acylhydrolase Pfam Description: GDSL-like Lipase/Acylhydrolase
  misc_feature (1)..(534): Homolog of NCBI NO: 21431729 NR Description: Anter-specific proline-rich protein APG precursor
  misc_feature (1)..(534): Homolog of NCBI NO: 99694 NR Description: proline-rich protein APG - Arabidopsis thaliana
  misc_feature (1)..(509): Homolog of NCBI NO: 25511649 NR Description: T20H2.9 protein - Arabidopsis thaliana
  misc_feature (58)..(509): Homolog of NCBI NO: 15223790 NR Description: anter-specific proline-rich protein APG
  misc_feature (1)..(532): Homolog of NCBI NO: 18266041 NR Description: anther-specific proline-rich protein [Brassica
  misc_feature (85)..(532): Homolog of NCBI NO: 728868 NR Description: ANTER-SPECIFIC PROLINE-RICH PROTEIN APG (PROTEIN
  misc_feature (204)..(469): Homolog of NCBI NO: 15223790 NR Description: anter-specific proline-rich protein APG
  misc_feature (44)..(193): Homolog of NCBI NO: 15223790 NR Description: anter-specific proline-rich protein APG
  misc_feature (169)..(526): Homolog of NCBI NO: 18394825 NR Description: anter-specific proline-rich protein APG putative; protein id: At1g20120.1, supported by cDNA: 22980.
  misc_feature (95)..(117): Homolog of NCBI NO: 18394825 NR Description: anter-specific proline-rich protein APG putative; protein id: At1g20120.1, supported by cDNA: 22980.
MKRSSLVDSCSYSRIFRSIFCLLSFCIFFLTTTNAQVMHRRLWPWPLWPRPYPQPWPMNPPTPDPSPKPVAPPGPSSKPVAPPGPSPCPSPPPKPQPKPPPAPSPSPCPSPPPKPQPKPVPPPACPPTPPKPQPKPAPPPEPKPAPPPAPKPVPCPSPPKPPAPTPKPVPPHGPPPKPAPAPTPAPSPKPAPSPPKPENKTIPAVFFFGDSVFDTGNNNNLETKIKSNYRPYGMDFKFRVATGRFSNGMVASDYLAKYMGVKEIVPAYLDPKIQPNDLLTGVSFASGGAGYNPTTSEAANAIPMLDQLTYFQDYIEKVNRLVRQEKSQYKLAGLEKTNQLISKGVAIVVGGSNDLIITYFGSGAQRLKNDIDSYTTIIADSAASFVLQLYGYGARRIGVIGTPPLGCVPSQRLKKKKICNEELNYASQLFNSKLLLILGQLSKTLPNSTFVYMDIYTIISQMLETPAAYGFEETKKPCCKTGLLSAGALCKKSTSKICPNTSSYLFWDGVHPTQRAYKTINKVLIKEYLHVLSK

SEQ ID NO: 84650 - protein, 497 aa, Arabidopsis thaliana
  peptide (1)..(497): Ceres Seq. ID no. 12676351
  misc_feature (168)..(487): Pfam Name: GDSL-like Lipase/Acylhydrolase Pfam Description: GDSL-like Lipase/Acylhydrolase
  misc_feature (1)..(497): Homolog of NCBI NO: 21431729 NR Description: Anter-specific proline-rich protein APG precursor
  misc_feature (1)..(497): Homolog of NCBI NO: 99694 NR Description: proline-rich protein APG - Arabidopsis thaliana
  misc_feature (1)..(472): Homolog of NCBI NO: 25511649 NR Description: T20H2.9 protein - Arabidopsis thaliana
  misc_feature (21)..(472): Homolog of NCBI NO: 15223790 NR Description: anter-specific proline-rich protein APG
  misc_feature (1)..(495): Homolog of NCBI NO: 18266041 NR Description: anther-specific proline-rich protein [Brassica
  misc_feature (48)..(495): Homolog of NCBI NO: 728868 NR Description: ANTER-SPECIFIC PROLINE-RICH PROTEIN APG (PROTEIN
  misc_feature (167)..(432): Homolog of NCBI NO: 15223790 NR Description: anter-specific proline-rich protein APG
  misc_feature (7)..(156): Homolog of NCBI NO: 15223790 NR Description: anter-specific proline-rich protein APG
  misc_feature (132)..(489): Homolog of NCBI NO: 18394825 NR Description: anter-specific proline-rich protein APG putative; protein id: At1g20120.1, supported by cDNA: 22980.
  misc_feature (58)..(80): Homolog of NCBI NO: 18394825 NR Description: anter-specific proline-rich protein APG putative; protein id: At1g20120.1, supported by cDNA: 22980.
MHRRLWPWPLWPRPYPQPWPMNPPTPDPSPKPVAPPGPSSKPVAPPGPSPCPSPPPKPQPKPPPAPSPSPCPSPPPKPQPKPVPPPACPPTPPKPQPKPAPPPEPKPAPPPAPKPVPCPSPPKPPAPTPKPVPPHGPPPKPAPAPTPAPSPKPAPSPPKPENKTIPAVFFFGDSVFDTGNNNNLETKIKSNYRPYGMDFKFRVATGRFSNGMVASDYLAKYMGVKEIVPAYLDPKIQPNDLLTGVSFASGGAGYNPTTSEAANAIPMLDQLTYFQDYIEKVNRLVRQEKSQYKLAGLEKTNQLISKGVAIVVGGSNDLIITYFGSGAQRLKNDIDSYTTIIADSAASFVLQLYGYGARRIGVIGTPPLGCVPSQRLKKKKICNEELNYASQLFNSKLLLILGQLSKTLPNSTFVYMDIYTIISQMLETPAAYGFEETKKPCCKTGLLSAGALCKKSTSKICPNTSSYLFWDGVHPTQRAYKTINKVLIKEYLHVLSK

SEQ ID NO: 84651 - protein, 477 aa, Arabidopsis thaliana
  peptide (1)..(477): Ceres Seq. ID no. 12676352
  misc_feature (148)..(467): Pfam Name: GDSL-like Lipase/Acylhydrolase Pfam Description: GDSL-like Lipase/Acylhydrolase
  misc_feature (1)..(477): Homolog of NCBI NO: 21431729 NR Description: Anter-specific proline-rich protein APG precursor
  misc_feature (1)..(477): Homolog of NCBI NO: 99694 NR Description: proline-rich protein APG - Arabidopsis thaliana
  misc_feature (1)..(452): Homolog of NCBI NO: 25511649 NR Description: T20H2.9 protein - Arabidopsis thaliana
  misc_feature (1)..(452): Homolog of NCBI NO: 15223790 NR Description: anter-specific proline-rich protein APG
  misc_feature (1)..(475): Homolog of NCBI NO: 18266041 NR Description: anther-specific proline-rich protein [Brassica
  misc_feature (28)..(475): Homolog of NCBI NO: 728868 NR Description: ANTER-SPECIFIC PROLINE-RICH PROTEIN APG (PROTEIN
  misc_feature (147)..(412): Homolog of NCBI NO: 15223790 NR Description: anter-specific proline-rich protein APG
  misc_feature (1)..(136): Homolog of NCBI NO: 15223790 NR Description: anter-specific proline-rich protein APG
  misc_feature (112)..(469): Homolog of NCBI NO: 18394825 NR Description: anter-specific proline-rich protein APG putative; protein id: At1g20120.1, supported by cDNA: 22980.
  misc_feature (38)..(60): Homolog of NCBI NO: 18394825 NR Description: anter-specific proline-rich protein APG putative; protein id: At1g20120.1, supported by cDNA: 22980.
MNPPTPDPSPKPVAPPGPSSKPVAPPGPSPCPSPPPKPQPKPPPAPSPSPCPSPPPKPQPKPVPPPACPPTPPKPQPKPAPPPEPKPAPPPAPKPVPCPSPPKPPAPTPKPVPPHGPPPKPAPAPTPAPSPKPAPSPPKPENKTIPAVFFFGDSVFDTGNNNNLETKIKSNYRPYGMDFKFRVATGRFSNGMVASDYLAKYMGVKEIVPAYLDPKIQPNDLLTGVSFASGGAGYNPTTSEAANAIPMLDQLTYFQDYIEKVNRLVRQEKSQYKLAGLEKTNQLISKGVAIVVGGSNDLIITYFGSGAQRLKNDIDSYTTIIADSAASFVLQLYGYGARRIGVIGTPPLGCVPSQRLKKKKICNEELNYASQLFNSKLLLILGQLSKTLPNSTFVYMDIYTIISQMLETPAAYGFEETKKPCCKTGLLSAGALCKKSTSKICPNTSSYLFWDGVHPTQRAYKTINKVLIKEYLHVLSK

SEQ ID NO: 84652 - DNA, 1150 bp, Arabidopsis thaliana
  misc_feature (1)..(1150): Ceres Seq. ID no. 12676353
  misc_feature: MA Experiment ID: 20000090 Result: Down-regulated in Transcription
  misc_feature: MA Experiment ID: 20000171 Result: Down-regulated in Transcription
  misc_feature: MA Experiment 20000171 PARAMETER Experiment Name: At_42deg_Heat_P Parameter: Age (day) Value: 14
  misc_feature: MA Experiment 20000171 PARAMETER Experiment Name: At_42deg_Heat_P Parameter: Organism Value: A. thaliana
  misc_feature: MA Experiment 20000171 PARAMETER Experiment Name: At_42deg_Heat_P Parameter: Plant Line Value: WS
  misc_feature: MA Experiment 20000171 PARAMETER Experiment Name: At_42deg_Heat_P Parameter: Temperature (deg C) Value: 42 vs. 22
  misc_feature: MA Experiment 20000171 PARAMETER Experiment Name: At_42deg_Heat_P Parameter: Timepoint (hr) Value: 1
  misc_feature: MA Experiment 20000171 PARAMETER Experiment Name: At_42deg_Heat_P Parameter: Tissue Value: Aerial
  misc_feature: MA Experiment ID: 20000173 Result: Down-regulated in Transcription
  misc_feature: MA Experiment 20000173 PARAMETER Experiment Name: At_42deg_Heat_P Parameter: Age (day) Value: 14
  misc_feature: MA Experiment 20000173 PARAMETER Experiment Name: At_42deg_Heat_P Parameter: Organism Value: A. thaliana
  misc_feature: MA Experiment 20000173 PARAMETER Experiment Name: At_42deg_Heat_P Parameter: Plant Line Value: WS
  misc_feature: MA Experiment 20000173 PARAMETER Experiment Name: At_42deg_Heat_P Parameter: Temperature (deg C) Value: 42 vs. 22
  misc_feature: MA Experiment 20000173 PARAMETER Experiment Name: At_42deg_Heat_P Parameter: Timepoint (hr) Value: 6
  misc_feature: MA Experiment 20000173 PARAMETER Experiment Name: At_42deg_Heat_P Parameter: Tissue Value: Aerial
  misc_feature: MA Experiment ID: 20000182 Result: Down-regulated in Transcription
  misc_feature: MA Experiment 20000182 PARAMETER Experiment Name: At_2mM_SA_P Parameter: Age (day) Value: 14
  misc_feature: MA Experiment 20000182 PARAMETER Experiment Name: At_2mM_SA_P Parameter: Organism Value: A. thaliana
  misc_feature: MA Experiment 20000182 PARAMETER Experiment Name: At_2mM_SA_P Parameter: Plant Line Value: WS
  misc_feature: MA Experiment 20000182 PARAMETER Experiment Name: At_2mM_SA_P Parameter: Timepoint (hr) Value: 6
  misc_feature: MA Experiment 20000182 PARAMETER Experiment Name: At_2mM_SA_P Parameter: Tissue Value: Aerial
  misc_feature: MA Experiment 20000182 PARAMETER Experiment Name: At_2mM_SA_P Parameter: Treatment Value: 2mM SA vs. No Treatment
  misc_feature: MA Experiment ID: 20000184 Result: Up-regulated in Transcription
  misc_feature: MA Experiment 20000184 PARAMETER Experiment Name: At_Shoots__P Parameter: Age (day) Value: 7
  misc_feature: MA Experiment 20000184 PARAMETER Experiment Name: At_Shoots__P Parameter: Tissue Value: Shoots vs. Whole Plant
  misc_feature: MA Experiment ID: 20000227 Result: Up-regulated in Transcription
  misc_feature: MA Experiment 20000227 PARAMETER Experiment Name: At_Root-Tips-vs-Tops_P Parameter: Tissue Value: Root Tips vs. Root Tops
  misc_feature: MA Experiment ID: 20000264 Result: Up-regulated in Transcription
  misc_feature: MA Experiment 20000264 PARAMETER Experiment Name: At_Open_Flower_P Parameter: Age (day) Value: 21
  misc_feature: MA Experiment 20000264 PARAMETER Experiment Name: At_Open_Flower_P Parameter: Plant Line Value: WS
  misc_feature: MA Experiment 20000264 PARAMETER Experiment Name: At_Open_Flower_P Parameter: Tissue Value: Open Flower vs. Whole Plant
  misc_feature: MA Experiment ID: 20000265 Result: Up-regulated in Transcription
  misc_feature: MA Experiment 20000265 PARAMETER Experiment Name: At_Open_Flower_P Parameter: Age (day) Value: 21
  misc_feature: MA Experiment 20000265 PARAMETER Experiment Name: At_Open_Flower_P Parameter: Plant Line Value: WS
  misc_feature: MA Experiment 20000265 PARAMETER Experiment Name: At_Open_Flower_P Parameter: Tissue Value: Closed Flower vs. Whole Plant
  misc_feature: MA Experiment ID: 20000286 Result: Up-regulated in Transcription
  misc_feature: MA Experiment 20000286 PARAMETER Experiment Name: At_Open_Flower_P Parameter: Age (day) Value: 21
  misc_feature: MA Experiment 20000286 PARAMETER Experiment Name: At_Open_Flower_P Parameter: Plant Line Value: WS
  misc_feature: MA Experiment 20000286 PARAMETER Experiment Name: At_Open_Flower_P Parameter: Tissue Value: Half Open vs. Whole Plant
  misc_feature: MA Experiment ID: 20000438 Result: Up-regulated in Transcription
  misc_feature: MA Experiment 20000438 PARAMETER Experiment Name: At_Shoots__P Parameter: Age (day) Value: 14
  misc_feature: MA Experiment 20000438 PARAMETER Experiment Name: At_Shoots__P Parameter: Tissue Value: Shoots vs. Whole Plant
  misc_feature: MA Experiment ID: 20000443 Result: Down-regulated in Transcription
  misc_feature: MA Experiment 20000443 PARAMETER Experiment Name: At_1uM_BR-BRZ__P Parameter: Tissue Value: Shoot Apices
  misc_feature: MA Experiment 20000443 PARAMETER Experiment Name: At_1uM_BR-BRZ__P Parameter: Treatment Value: 1uM BRZ vs. No Treatment
  misc_feature: MA Experiment ID: 20000460 Result: Up-regulated in Transcription
  misc_feature: MA Experiment 20000460 PARAMETER Experiment Name: At_10percent_PEG_P Parameter: Age (day) Value: 12
  misc_feature: MA Experiment 20000460 PARAMETER Experiment Name: At_10percent_PEG_P Parameter: Organism Value: A. thaliana
  misc_feature: MA Experiment 20000460 PARAMETER Experiment Name: At_10percent_PEG_P Parameter: Plant Line Value: WS
  misc_feature: MA Experiment 20000460 PARAMETER Experiment Name: At_10percent_PEG_P Parameter: Timepoint (day) Value: 12
  misc_feature: MA Experiment 20000460 PARAMETER Experiment Name: At_10percent_PEG_P Parameter: Tissue Value: Whole Plant
  misc_feature: MA Experiment 20000460 PARAMETER Experiment Name: At_10percent_PEG_P Parameter: Treatment Value: 10percent PEG vs. No Treatment
  misc_feature: MA Experiment ID: 20000527 Result: Up-regulated in Transcription
  misc_feature: MA Experiment 20000527 PARAMETER Experiment Name: At_10percent_PEG_P Parameter: Age (day) Value: 20
  misc_feature: MA Experiment 20000527 PARAMETER Experiment Name: At_10percent_PEG_P Parameter: Organism Value: A. thaliana
  misc_feature: MA Experiment 20000527 PARAMETER Experiment Name: At_10percent_PEG_P Parameter: Plant Line Value: WS
  misc_feature: MA Experiment 20000527 PARAMETER Experiment Name: At_10percent_PEG_P Parameter: Timepoint (day) Value: 20
  misc_feature: MA Experiment 20000527 PARAMETER Experiment Name: At_10percent_PEG_P Parameter: Tissue Value: Whole Plant
  misc_feature: MA Experiment 20000527 PARAMETER Experiment Name: At_10percent_PEG_P Parameter: Treatment Value: 10percent PEG vs. No Treatment
  misc_feature: MA Experiment ID: 20000573 Result: Down-regulated in Transcription
  misc_feature: MA Experiment 20000573 PARAMETER Experiment Name: At_100uM_ABA_Mutants__P Parameter: Organism Value: A. thaliana
  misc_feature: MA Experiment 20000573 PARAMETER Experiment Name: At_100uM_ABA_Mutants__P Parameter: Plant Line Value: CS22 vs. Ler wt
  misc_feature: MA Experiment 20000573 PARAMETER Experiment Name: At_100uM_ABA_Mutants__P Parameter: Timepoint (hr) Value: N/A
  misc_feature: MA Experiment 20000573 PARAMETER Experiment Name: At_100uM_ABA_Mutants__P Parameter: Tissue Value: Whole Plant
  misc_feature: MA Experiment 20000573 PARAMETER Experiment Name: At_100uM_ABA_Mutants__P Parameter: Treatment Value: None
  misc_feature: MA Experiment ID: 20000574 Result: Down-regulated in Transcription
  misc_feature: MA Experiment 20000574 PARAMETER Experiment Name: At_100uM_ABA_Mutants__P Parameter: Organism Value: A. thaliana
  misc_feature: MA Experiment 20000574 PARAMETER Experiment Name: At_100uM_ABA_Mutants__P Parameter: Plant Line Value: CS23 vs. Ler wt
  misc_feature: MA Experiment 20000574 PARAMETER Experiment Name: At_100uM_ABA_Mutants__P Parameter: Timepoint (hr) Value: N/A
  misc_feature: MA Experiment 20000574 PARAMETER Experiment Name: At_100uM_ABA_Mutants__P Parameter: Tissue Value: Whole Plant
  misc_feature: MA Experiment 20000574 PARAMETER Experiment Name: At_100uM_ABA_Mutants__P Parameter: Treatment Value: None
  misc_feature: MA Experiment ID: 20000794 Result: Up-regulated in Transcription
  misc_feature: MA Experiment 20000794 PARAMETER Experiment Name: At_Petals_P Parameter: Age (day) Value: 23-25 days
  misc_feature: MA Experiment 20000794 PARAMETER Experiment Name: At_Petals_P Parameter: Plant Line Value: WS
  misc_feature: MA Experiment 20000794 PARAMETER Experiment Name: At_Petals_P Parameter: Tissue Value: Petals vs. Whole plant
  misc_feature: MA Experiment ID: 20001450 Result: Up-regulated in Transcription
  misc_feature: MA Experiment 20001450 PARAMETER Experiment Name: At_Far-red-induction_P Parameter: Age (day) Value: 7
  misc_feature: MA Experiment 20001450 PARAMETER Experiment Name: At_Far-red-induction_P Parameter: Light Value: Far-red vs. White
  misc_feature: MA Experiment 20001450 PARAMETER Experiment Name: At_Far-red-induction_P Parameter: Organism Value: A. thaliana
  misc_feature: MA Experiment 20001450 PARAMETER Experiment Name: At_Far-red-induction_P Parameter: Plant Line Value: Columbia
  misc_feature: MA Experiment 20001450 PARAMETER Experiment Name: At_Far-red-induction_P Parameter: Timepoint (hr) Value: 8
  misc_feature: MA Experiment 20001450 PARAMETER Experiment Name: At_Far-red-induction_P Parameter: Tissue Value: Whole Plant
  misc_feature: MA Experiment ID: 20001557 Result: Down-regulated in Transcription
  misc_feature: MA Experiment 20001557 PARAMETER Experiment Name: At_Drought_Soil_Dry_P Parameter: Age (day) Value: 27
  misc_feature: MA Experiment 20001557 PARAMETER Experiment Name: At_Drought_Soil_Dry_P Parameter: Organism Value: A. thaliana
  misc_feature: MA Experiment 20001557 PARAMETER Experiment Name: At_Drought_Soil_Dry_P Parameter: Plant Line Value: WS
  misc_feature: MA Experiment 20001557 PARAMETER Experiment Name: At_Drought_Soil_Dry_P Parameter: Post Timepoint (hr) Value: 3
  misc_feature: MA Experiment 20001557 PARAMETER Experiment Name: At_Drought_Soil_Dry_P Parameter: Post-Treatment Value: Re-Water vs. No Drought
  misc_feature: MA Experiment 20001557 PARAMETER Experiment Name: At_Drought_Soil_Dry_P Parameter: Timepoint (day) Value: 13
  misc_feature: MA Experiment 20001557 PARAMETER Experiment Name: At_Drought_Soil_Dry_P Parameter: Treatment Value: Drought vs. No Drought
atcatcatctctttcttcttccaaaagtcataatcatgtcaaagtctctagctggattggcggttttggccgctctttttattgcggttgatgcgtttaggccttctggtttaactaatggtcacgctacattctatggaggaagtgacgcttctggaacaatgggtaatttcacactttagtttcattatgatctgactctaatggatttgttcaaataacgaaattatttttgttgtttttttccaggtggagcttgtggttacggagatctttactcggcggggtacgggacaatgacggcggcgttaagcacggctctgttcaacgacggagcttcttgcggagaatgctataggataacgtgtgatcacgcggcggactcacggtggtgcttgaaaggagcttctgtggttattacagccactaacttttgcccaccaaactttgctttgcctaacaacaacggtggttggtgcaatccgccgcttaaacatttcgacatggcacaacccgcttgggaaaagatcggaatttacagaggaggaatcgttcccgtcgttttccaaagagtaagctgttacaagaaaggaggagttagattcagaataaacggaagagactacttcgagctagtgaatattcaaaatgtaggaggagcaggttctattaaatctgtatccatcaaaggatcaaagactggttggttagccatgtctcgtaactggggagctaattggcaatcgaatgcttatctagatggtcaagctctctctttctccattaccactactgatggtgctactagagtctttctcaatgttgttccttcttcttggtcttttggacagatttattcttccaacgttcagttttaagtttttttttttgttttgtatgaaatatcattggcagtggtcgcgctttgagtctgtttcttttctccctgagcgacccgccctctttgttttttttatcttatggtatgatgggtctgttaatacaaaagacccgatatgatttgagggtatatgattatatgaagtgtattgtatttgaatgtttcagactcgaaaaagattctgtagcaaaaggagttttaacacatttgtacttggttttgtttatatgaagtttgttttagtttttt

SEQ ID NO: 84653 - protein, 193 aa, Arabidopsis thaliana; identical to SEQ ID NO: 28574
  peptide (1)..(193): Ceres Seq. ID no. 12676354
  misc_feature (101)..(178): Pfam Name: Pollen allergen Pfam Description: Pollen allergen
  misc_feature (1)..(193): Homolog of NCBI NO: 15223799 NR Description: expansin, putative; protein id: At1g20190.1, by cDNA: 11011., supported by cDNA: gi_12083279 [Arabidopsis
  misc_feature (1)..(193): Homolog of NCBI NO: 21536750 NR Description: Alpha-expansin 11 precursor (At-EXP11) (AtEx11)

SEQ ID NO: 84654 - protein, 124 aa, Arabidopsis thaliana; identical to SEQ ID NO: 28575
  peptide (1)..(124): Ceres Seq. ID no. 12676355
  misc_feature (32)..(109): Pfam Name: Pollen allergen Pfam Description: Pollen allergen
  misc_feature (1)..(124): Homolog of NCBI NO: 15223799 NR Description: expansin, putative; protein id: At1g20190.1, by cDNA: 11011., supported by cDNA: gi_12083279 [Arabidopsis
  misc_feature (1)..(124): Homolog of NCBI NO: 21536750 NR Description: Alpha-expansin 11 precursor (At-EXP11) (AtEx11)

SEQ ID NO: 84655 - DNA, 1056 bp, Arabidopsis thaliana
  misc_feature (1)..(1056): Ceres Seq. ID no. 12676387
  misc_feature: MA Experiment ID: 108434 Result: Down-regulated in Transcription
  misc_feature: MA Experiment 108434 PARAMETER Experiment Name: At_Root_Tips_cDNA_P Parameter: Tissue Value: Root Tips
  misc_feature: MA Experiment ID: 108435 Result: Down-regulated in Transcription
  misc_feature: MA Experiment 108435 PARAMETER Experiment Name: At_stm_Mutants_cDNA_P Parameter: Plant Line Value: wt Landsburg vs stm
  misc_feature: MA Experiment 108435 PARAMETER Experiment Name: At_stm_Mutants_cDNA_P Parameter: Tissue Value: Shoot Apical Meristem Region
  misc_feature: MA Experiment ID: 108462 Result: Up-regulated in Transcription
  misc_feature: MA Experiment 108462 PARAMETER Experiment Name: At_Germinating_Seeds_cDNA_P Parameter: Age (day) Value: 2 vs. 0
  misc_feature: MA Experiment 108462 PARAMETER Experiment Name: At_Germinating_Seeds_cDNA_P Parameter: Tissue Value: Germinating Seeds
  misc_feature: MA Experiment ID: 108463 Result: Up-regulated in Transcription
  misc_feature: MA Experiment 108463 PARAMETER Experiment Name: At_Germinating_Seeds_cDNA_P Parameter: Age (day) Value: 3 vs. 0
  misc_feature: MA Experiment 108463 PARAMETER Experiment Name: At_Germinating_Seeds_cDNA_P Parameter: Tissue Value: Germinating Seeds
  misc_feature: MA Experiment ID: 108464 Result: Up-regulated in Transcription
  misc_feature: MA Experiment 108464 PARAMETER Experiment Name: At_Germinating_Seeds_cDNA_P Parameter: Age (day) Value: 4 vs. 0
  misc_feature: MA Experiment 108464 PARAMETER Experiment Name: At_Germinating_Seeds_cDNA_P Parameter: Tissue Value: Germinating Seeds
  misc_feature: MA Experiment ID: 108488 Result: Down-regulated in Transcription
  misc_feature: MA Experiment ID: 108561 Result: Up-regulated in Transcription
  misc_feature: MA Experiment 108561 PARAMETER Experiment Name: At_100uM_ABA_cDNA_P Parameter: Timepoint (hr) Value: 6
  misc_feature: MA Experiment 108561 PARAMETER Experiment Name: At_100uM_ABA_cDNA_P Parameter: Tissue Value: Aerial
  misc_feature: MA Experiment 108561 PARAMETER Experiment Name: At_100uM_ABA_cDNA_P Parameter: Treatment Value: 100uM ABA vs. No Treatment
  misc_feature: MA Experiment ID: 108573 Result: Up-regulated in Transcription
  misc_feature: MA Experiment 108573 PARAMETER Experiment Name: At_Drought_cDNA_P Parameter: Timepoint (hr) Value: 6
  misc_feature: MA Experiment 108573 PARAMETER Experiment Name: At_Drought_cDNA_P Parameter: Tissue Value: Aerial
  misc_feature: MA Experiment 108573 PARAMETER Experiment Name: At_Drought_cDNA_P Parameter: Treatment Value: Drought vs. No Drought
  misc_feature: MA Experiment ID: 108585 Result: Up-regulated in Transcription
  misc_feature: MA Experiment 108585 PARAMETER Experiment Name: At_5mM_NaNP_cDNA_P Parameter: Timepoint (hr) Value: 6
  misc_feature: MA Experiment 108585 PARAMETER Experiment Name: At_5mM_NaNP_cDNA_P Parameter: Tissue Value: Aerial
  misc_feature: MA Experiment 108585 PARAMETER Experiment Name: At_5mM_NaNP_cDNA_P Parameter: Treatment Value: null
  misc_feature: MA Experiment ID: 108605 Result: Up-regulated in Transcription
  misc_feature: MA Experiment 108605 PARAMETER Experiment Name: At_100uM_ABA_cDNA_P Parameter: Timepoint (hr) Value: 6
  misc_feature: MA Experiment 108605 PARAMETER Experiment Name: At_100uM_ABA_cDNA_P Parameter: Tissue Value: Aerial
  misc_feature: MA Experiment 108605 PARAMETER Experiment Name: At_100uM_ABA_cDNA_P Parameter: Treatment Value: 100uM ABA vs. No Treatment
  misc_feature: MA Experiment ID: 108607 Result: Up-regulated in Transcription
  misc_feature: MA Experiment 108607 PARAMETER Experiment Name: At_100uM_ABA_cDNA_P Parameter: Timepoint (hr) Value: 4
  misc_feature: MA Experiment 108607 PARAMETER Experiment Name: At_100uM_ABA_cDNA_P Parameter: Tissue Value: Aerial
  misc_feature: MA Experiment 108607 PARAMETER Experiment Name: At_100uM_ABA_cDNA_P Parameter: Treatment Value: 100uM ABA vs. No Treatment
  misc_feature: MA Experiment ID: 108609 Result: Up-regulated in Transcription
  misc_feature: MA Experiment 108609 PARAMETER Experiment Name: At_100uM_ABA_cDNA_P Parameter: Timepoint (hr) Value: 24
  misc_feature: MA Experiment 108609 PARAMETER Experiment Name: At_100uM_ABA_cDNA_P Parameter: Tissue Value: Aerial
  misc_feature: MA Experiment 108609 PARAMETER Experiment Name: At_100uM_ABA_cDNA_P Parameter: Treatment Value: 100uM ABA vs. No Treatment
  misc_feature: MA Experiment ID: 20000069 Result: Up-regulated in Transcription
  misc_feature: MA Experiment 20000069 PARAMETER Experiment Name: At_100uM_ABA_Mutants_cDNA_P Parameter: Plant Line Value: CS23
  misc_feature: MA Experiment 20000069 PARAMETER Experiment Name: At_100uM_ABA_Mutants_cDNA_P Parameter: Timepoint (hr) Value: 6
  misc_feature: MA Experiment 20000069 PARAMETER Experiment Name: At_100uM_ABA_Mutants_cDNA_P Parameter: Tissue Value: Aerial
  misc_feature: MA Experiment 20000069 PARAMETER Experiment Name: At_100uM_ABA_Mutants_cDNA_P Parameter: Treatment Value: 100uM ABA vs. No Treatment
  misc_feature: MA Experiment ID: 20000070 Result: Up-regulated in Transcription
  misc_feature: MA Experiment 20000070 PARAMETER Experiment Name: At_100uM_ABA_Mutants_cDNA_P Parameter: Plant Line Value: CS24
  misc_feature: MA Experiment 20000070 PARAMETER Experiment Name: At_100uM_ABA_Mutants_cDNA_P Parameter: Timepoint (hr) Value: 6
  misc_feature: MA Experiment 20000070 PARAMETER Experiment Name: At_100uM_ABA_Mutants_cDNA_P Parameter: Tissue Value: Aerial
  misc_feature: MA Experiment 20000070 PARAMETER Experiment Name: At_100uM_ABA_Mutants_cDNA_P Parameter: Treatment Value: 100uM ABA vs. No Treatment
  misc_feature: MA Experiment ID: 20000071 Result: Up-regulated in Transcription
  misc_feature: MA Experiment 20000071 PARAMETER Experiment Name: At_100uM_ABA_Mutants_cDNA_P Parameter: Plant Line Value: CS8104
  misc_feature: MA Experiment 20000071 PARAMETER Experiment Name: At_100uM_ABA_Mutants_cDNA_P Parameter: Timepoint (hr) Value: 6
  misc_feature: MA Experiment 20000071 PARAMETER Experiment Name: At_100uM_ABA_Mutants_cDNA_P Parameter: Tissue Value: Aerial
  misc_feature: MA Experiment 20000071 PARAMETER Experiment Name: At_100uM_ABA_Mutants_cDNA_P Parameter: Treatment Value: 100uM ABA vs. No Treatment
  misc_feature: MA Experiment ID: 20000088 Result: Up-regulated in Transcription
  misc_feature: MA Experiment 20000088 PARAMETER Experiment Name: At_100uM_ABA_Mutants_cDNA_P Parameter: Plant Line Value: Landsberg
  misc_feature: MA Experiment 20000088 PARAMETER Experiment Name: At_100uM_ABA_Mutants_cDNA_P Parameter: Timepoint (hr) Value: 6
  misc_feature: MA Experiment 20000088 PARAMETER Experiment Name: At_100uM_ABA_Mutants_cDNA_P Parameter: Tissue Value: Aerial
  misc_feature: MA Experiment 20000088 PARAMETER Experiment Name: At_100uM_ABA_Mutants_cDNA_P Parameter: Treatment Value: 100uM ABA vs. No Treatment
  misc_feature: MA Experiment ID: 20000111 Result: Down-regulated in Transcription
  misc_feature: MA Experiment 20000111 PARAMETER Experiment Name: At_42deg_Heat_cDNA_P Parameter: Temperature (deg C) Value: 42 vs. 22
  misc_feature: MA Experiment 20000111 PARAMETER Experiment Name: At_42deg_Heat_cDNA_P Parameter: Timepoint (hr) Value: 6
  misc_feature: MA Experiment 20000111 PARAMETER Experiment Name: At_42deg_Heat_cDNA_P Parameter: Tissue Value: Aerial
  misc_feature: MA Experiment ID: 20000166 Result: Up-regulated in Transcription
  misc_feature: MA Experiment 20000166 PARAMETER Experiment Name: At_100uM_ABA_P Parameter: Age (day) Value: 14
  misc_feature: MA Experiment 20000166 PARAMETER Experiment Name: At_100uM_ABA_P Parameter: Organism Value: A. thaliana
  misc_feature: MA Experiment 20000166 PARAMETER Experiment Name: At_100uM_ABA_P Parameter: Plant Line Value: WS
  misc_feature: MA Experiment 20000166 PARAMETER Experiment Name: At_100uM_ABA_P Parameter: Timepoint (hr) Value: 1
  misc_feature: MA Experiment 20000166 PARAMETER Experiment Name: At_100uM_ABA_P Parameter: Tissue Value: Aerial
  misc_feature: MA Experiment 20000166 PARAMETER Experiment Name: At_100uM_ABA_P Parameter: Treatment Value: 100uM ABA vs. No Treatment
  misc_feature: MA Experiment ID: 20000169 Result: Up-regulated in Transcription
  misc_feature: MA Experiment 20000169 PARAMETER Experiment Name: At_100uM_ABA_P Parameter: Age (day) Value: 14
  misc_feature: MA Experiment 20000169 PARAMETER Experiment Name: At_100uM_ABA_P Parameter: Organism Value: A. thaliana
  misc_feature: MA Experiment 20000169 PARAMETER Experiment Name: At_100uM_ABA_P Parameter: Plant Line Value: WS
  misc_feature: MA Experiment 20000169 PARAMETER Experiment Name: At_100uM_ABA_P Parameter: Timepoint (hr) Value: 6
  misc_feature: MA Experiment 20000169 PARAMETER Experiment Name: At_100uM_ABA_P Parameter: Tissue Value: Aerial
  misc_feature: MA Experiment 20000169 PARAMETER Experiment Name: At_100uM_ABA_P Parameter: Treatment Value: 100uM ABA vs. No Treatment
  misc_feature: MA Experiment ID: 20000173 Result: Down-regulated in Transcription
  misc_feature: MA Experiment 20000173 PARAMETER Experiment Name: At_42deg_Heat_P Parameter: Age (day) Value: 14
  misc_feature: MA Experiment 20000173 PARAMETER Experiment Name: At_42deg_Heat_P Parameter: Organism Value: A. thaliana
  misc_feature: MA Experiment 20000173 PARAMETER Experiment Name: At_42deg_Heat_P Parameter: Plant Line Value: WS
  misc_feature: MA Experiment 20000173 PARAMETER Experiment Name: At_42deg_Heat_P Parameter: Temperature (deg C) Value: 42 vs. 22
  misc_feature: MA Experiment 20000173 PARAMETER Experiment Name: At_42deg_Heat_P Parameter: Timepoint (hr) Value: 6
  misc_feature: MA Experiment 20000173 PARAMETER Experiment Name: At_42deg_Heat_P Parameter: Tissue Value: Aerial
  misc_feature: MA Experiment ID: 20000182 Result: Up-regulated in Transcription
  misc_feature: MA Experiment 20000182 PARAMETER Experiment Name: At_2mM_SA_P Parameter: Age (day) Value: 14
  misc_feature: MA Experiment 20000182 PARAMETER Experiment Name: At_2mM_SA_P Parameter: Organism Value: A. thaliana
  misc_feature: MA Experiment 20000182 PARAMETER Experiment Name: At_2mM_SA_P Parameter: Plant Line Value: WS
  misc_feature: MA Experiment 20000182 PARAMETER Experiment Name: At_2mM_SA_P Parameter: Timepoint (hr) Value: 6
  misc_feature: MA Experiment 20000182 PARAMETER Experiment Name: At_2mM_SA_P Parameter: Tissue Value: Aerial
  misc_feature: MA Experiment 20000182 PARAMETER Experiment Name: At_2mM_SA_P Parameter: Treatment Value: 2mM SA vs. No Treatment
  misc_feature: MA Experiment ID: 20000184 Result: Down-regulated in Transcription
  misc_feature: MA Experiment 20000184 PARAMETER Experiment Name: At_Shoots__P Parameter: Age (day) Value: 7
  misc_feature: MA Experiment 20000184 PARAMETER Experiment Name: At_Shoots__P Parameter: Tissue Value: Shoots vs. Whole Plant
  misc_feature: MA Experiment ID: 20000224 Result: Up-regulated in Transcription
  misc_feature: MA Experiment ID: 20000234 Result: Down-regulated in Transcription
  misc_feature: MA Experiment 20000234 PARAMETER Experiment Name: At_Siliques_P Parameter: Age (day) Value: 21
  misc_feature: MA Experiment 20000234 PARAMETER Experiment Name: At_Siliques_P Parameter: Organism Value: A. thaliana
  misc_feature: MA Experiment 20000234 PARAMETER Experiment Name: At_Siliques_P Parameter: Plant Line Value: WS
  misc_feature: MA Experiment 20000234 PARAMETER Experiment Name: At_Siliques_P Parameter: Tissue Value: Less Than 5mm Siliques vs. Whole Plant
  misc_feature: MA Experiment ID: 20000235 Result: Down-regulated in Transcription
  misc_feature: MA Experiment 20000235 PARAMETER Experiment Name: At_Siliques_P Parameter: Age (day) Value: 21
  misc_feature: MA Experiment 20000235 PARAMETER Experiment Name: At_Siliques_P Parameter: Organism Value: A. thaliana
  misc_feature: MA Experiment 20000235 PARAMETER Experiment Name: At_Siliques_P Parameter: Plant Line Value: WS
  misc_feature: MA Experiment 20000235 PARAMETER Experiment Name: At_Siliques_P Parameter: Tissue Value: 5-10mm Siliques vs. Whole Plant
  misc_feature: MA Experiment ID: 20000265 Result: Down-regulated in Transcription
  misc_feature: MA Experiment 20000265 PARAMETER Experiment Name: At_Open_Flower_P Parameter: Age (day) Value: 21
  misc_feature: MA Experiment 20000265 PARAMETER Experiment Name: At_Open_Flower_P Parameter: Plant Line Value: WS
  misc_feature: MA Experiment 20000265 PARAMETER Experiment Name: At_Open_Flower_P Parameter: Tissue Value: Closed Flower vs. Whole Plant
  misc_feature: MA Experiment ID: 20000267 Result: Up-regulated in Transcription
  misc_feature: MA Experiment 20000267 PARAMETER Experiment Name: At_Drought_P Parameter: Age (day) Value: 7
  misc_feature: MA Experiment 20000267 PARAMETER Experiment Name: At_Drought_P Parameter: Organism Value: A. thaliana
  misc_feature: MA Experiment 20000267 PARAMETER Experiment Name: At_Drought_P Parameter: Plant Line Value: WS
  misc_feature: MA Experiment 20000267 PARAMETER Experiment Name: At_Drought_P Parameter: Timepoint (hr) Value: 6
  misc_feature: MA Experiment 20000267 PARAMETER Experiment Name: At_Drought_P Parameter: Tissue Value: Whole Plant
  misc_feature: MA Experiment 20000267 PARAMETER Experiment Name: At_Drought_P Parameter: Treatment Value: Drought vs. No Drought
  misc_feature: MA Experiment ID: 20000286 Result: Down-regulated in Transcription
  misc_feature: MA Experiment 20000286 PARAMETER Experiment Name: At_Open_Flower_P Parameter: Age (day) Value: 21
  misc_feature: MA Experiment 20000286 PARAMETER Experiment Name: At_Open_Flower_P Parameter: Plant Line Value: WS
  misc_feature: MA Experiment 20000286 PARAMETER Experiment Name: At_Open_Flower_P Parameter: Tissue Value: Half Open vs. Whole Plant
  misc_feature: MA Experiment ID: 20000288 Result: Down-regulated in Transcription
  misc_feature: MA Experiment 20000288 PARAMETER Experiment Name: At_Drought_P Parameter: Age (day) Value: 7
  misc_feature: MA Experiment 20000288 PARAMETER Experiment Name: At_Drought_P Parameter: Organism Value: A. thaliana
  misc_feature: MA Experiment 20000288 PARAMETER Experiment Name: At_Drought_P Parameter: Plant Line Value: WS
  misc_feature: MA Experiment 20000288 PARAMETER Experiment Name: At_Drought_P Parameter: Timepoint (hr) Value: 1
  misc_feature: MA Experiment 20000288 PARAMETER Experiment Name: At_Drought_P Parameter: Tissue Value: Whole Plant
  misc_feature: MA Experiment 20000288 PARAMETER Experiment Name: At_Drought_P Parameter: Treatment Value: Drought vs. No Drought
  misc_feature: MA Experiment ID: 20000308 Result: Up-regulated in Transcription
  misc_feature: MA Experiment 20000308 PARAMETER Experiment Name: At_100mM_NaCl__P Parameter: Age (day) Value: 17
  misc_feature: MA Experiment 20000308 PARAMETER Experiment Name: At_100mM_NaCl__P Parameter: Organism Value: A. thaliana
  misc_feature: MA Experiment 20000308 PARAMETER Experiment Name: At_100mM_NaCl__P Parameter: Plant Line Value: WS
  misc_feature: MA Experiment 20000308 PARAMETER Experiment Name: At_100mM_NaCl__P Parameter: Timepoint (hr) Value: 72
  misc_feature: MA Experiment 20000308 PARAMETER Experiment Name: At_100mM_NaCl__P Parameter: Tissue Value: Whole Plant
  misc_feature: MA Experiment 20000308 PARAMETER Experiment Name: At_100mM_NaCl__P Parameter: Treatment Value: 100mM NaCl vs. No Treatment
  misc_feature: MA Experiment ID: 20000436 Result: Up-regulated in Transcription
  misc_feature: MA Experiment 20000436 PARAMETER Experiment Name: At_Drought_P Parameter: Age (day) Value: 7
  misc_feature: MA Experiment 20000436 PARAMETER Experiment Name: At_Drought_P Parameter: Organism Value: A. thaliana
  misc_feature: MA Experiment 20000436 PARAMETER Experiment Name: At_Drought_P Parameter: Plant Line Value: WS
  misc_feature: MA Experiment 20000436 PARAMETER Experiment Name: At_Drought_P Parameter: Timepoint (hr) Value: 12
  misc_feature: MA Experiment 20000436 PARAMETER Experiment Name: At_Drought_P Parameter: Tissue Value: Whole Plant
  misc_feature: MA Experiment 20000436 PARAMETER Experiment Name: At_Drought_P Parameter: Treatment Value: Drought vs. No Drought
  misc_feature: MA Experiment ID: 20000437 Result: Up-regulated in Transcription
  misc_feature: MA Experiment 20000437 PARAMETER Experiment Name: At_Drought_P Parameter: Age (day) Value: 8
  misc_feature: MA Experiment 20000437 PARAMETER Experiment Name: At_Drought_P Parameter: Organism Value: A. thaliana
  misc_feature: MA Experiment 20000437 PARAMETER Experiment Name: At_Drought_P Parameter: Plant Line Value: WS
  misc_feature: MA Experiment 20000437 PARAMETER Experiment Name: At_Drought_P Parameter: Timepoint (hr) Value: 24
  misc_feature: MA Experiment 20000437 PARAMETER Experiment Name: At_Drought_P Parameter: Tissue Value: Whole Plant
  misc_feature: MA Experiment 20000437 PARAMETER Experiment Name: At_Drought_P Parameter: Treatment Value: Drought vs. No Drought
  misc_feature: MA Experiment ID: 20000438 Result: Down-regulated in Transcription
  misc_feature: MA Experiment 20000438 PARAMETER Experiment Name: At_Shoots__P Parameter: Age (day) Value: 14
  misc_feature: MA Experiment 20000438 PARAMETER Experiment Name: At_Shoots__P Parameter: Tissue Value: Shoots vs. Whole Plant
  misc_feature: MA Experiment ID: 20000453 Result: Up-regulated in Transcription
  misc_feature: MA Experiment 20000453 PARAMETER Experiment Name: At_100uM_ABA_P Parameter: Age (day) Value: 15
  misc_feature: MA Experiment 20000453 PARAMETER Experiment Name: At_100uM_ABA_P Parameter: Organism Value: A. thaliana
  misc_feature: MA Experiment 20000453 PARAMETER Experiment Name: At_100uM_ABA_P Parameter: Plant Line Value: WS
  misc_feature: MA Experiment 20000453 PARAMETER Experiment Name: At_100uM_ABA_P Parameter: Timepoint (hr) Value: 24
  misc_feature: MA Experiment 20000453 PARAMETER Experiment Name: At_100uM_ABA_P Parameter: Tissue Value: Aerial
  misc_feature: MA Experiment 20000453 PARAMETER Experiment Name: At_100uM_ABA_P Parameter: Treatment Value: 100uM ABA vs. No Treatment
  misc_feature: MA Experiment ID: 20000455 Result: Up-regulated in Transcription
  misc_feature: MA Experiment 20000455 PARAMETER Experiment Name: At_100uM_ABA_P Parameter: Age (day) Value: 16
  misc_feature: MA Experiment 20000455 PARAMETER Experiment Name: At_100uM_ABA_P Parameter: Organism Value: A. thaliana
  misc_feature: MA Experiment 20000455 PARAMETER Experiment Name: At_100uM_ABA_P Parameter: Plant Line Value: WS
  misc_feature: MA Experiment 20000455 PARAMETER Experiment Name: At_100uM_ABA_P Parameter: Timepoint (hr) Value: 48
  misc_feature: MA Experiment 20000455 PARAMETER Experiment Name: At_100uM_ABA_P Parameter: Tissue Value: Aerial
  misc_feature: MA Experiment 20000455 PARAMETER Experiment Name: At_100uM_ABA_P Parameter: Treatment Value: 100uM ABA vs. No Treatment
  misc_feature: MA Experiment ID: 20000527 Result: Down-regulated in Transcription
  misc_feature: MA Experiment 20000527 PARAMETER Experiment Name: At_10percent_PEG_P Parameter: Age (day) Value: 20
  misc_feature: MA Experiment 20000527 PARAMETER Experiment Name: At_10percent_PEG_P Parameter: Organism Value: A. thaliana
  misc_feature: MA Experiment 20000527 PARAMETER Experiment Name: At_10percent_PEG_P Parameter: Plant Line Value: WS
  misc_feature: MA Experiment 20000527 PARAMETER Experiment Name: At_10percent_PEG_P Parameter: Timepoint (day) Value: 20
  misc_feature: MA Experiment 20000527 PARAMETER Experiment Name: At_10percent_PEG_P Parameter: Tissue Value: Whole Plant
  misc_feature: MA Experiment 20000527 PARAMETER Experiment Name: At_10percent_PEG_P Parameter: Treatment Value: 10percent PEG vs. No Treatment
  misc_feature: MA Experiment ID: 20000573 Result: Up-regulated in Transcription
  misc_feature: MA Experiment 20000573 PARAMETER Experiment Name: At_100uM_ABA_Mutants__P Parameter: Organism Value: A. thaliana
  misc_feature: MA Experiment 20000573 PARAMETER Experiment Name: At_100uM_ABA_Mutants__P Parameter: Plant Line Value: CS22 vs. Ler wt
  misc_feature: MA Experiment 20000573 PARAMETER Experiment Name: At_100uM_ABA_Mutants__P Parameter: Timepoint (hr) Value: N/A
  misc_feature: MA Experiment 20000573 PARAMETER Experiment Name: At_100uM_ABA_Mutants__P Parameter: Tissue Value: Whole Plant
  misc_feature: MA Experiment 20000573 PARAMETER Experiment Name: At_100uM_ABA_Mutants__P Parameter: Treatment Value: None
  misc_feature: MA Experiment ID: 20000574 Result: Up-regulated in Transcription
  misc_feature: MA Experiment 20000574 PARAMETER Experiment Name: At_100uM_ABA_Mutants__P Parameter: Organism Value: A. thaliana
  misc_feature: MA Experiment 20000574 PARAMETER Experiment Name: At_100uM_ABA_Mutants__P Parameter: Plant Line Value: CS23 vs. Ler wt
  misc_feature: MA Experiment 20000574 PARAMETER Experiment Name: At_100uM_ABA_Mutants__P Parameter: Timepoint (hr) Value: N/A
  misc_feature: MA Experiment 20000574 PARAMETER Experiment Name: At_100uM_ABA_Mutants__P Parameter: Tissue Value: Whole Plant
  misc_feature: MA Experiment 20000574 PARAMETER Experiment Name: At_100uM_ABA_Mutants__P Parameter: Treatment Value: None
  misc_feature: MA Experiment ID: 20000576 Result: Down-regulated in Transcription
  misc_feature: MA Experiment 20000576 PARAMETER Experiment Name: At_100uM_ABA_Mutants__P Parameter: Organism Value: A. thaliana
  misc_feature: MA Experiment 20000576 PARAMETER Experiment Name: At_100uM_ABA_Mutants__P Parameter: Plant Line Value: CS23
  misc_feature: MA Experiment 20000576 PARAMETER Experiment Name: At_100uM_ABA_Mutants__P Parameter: Timepoint (hr) Value: 6
  misc_feature: MA Experiment 20000576 PARAMETER Experiment Name: At_100uM_ABA_Mutants__P Parameter: Tissue Value: Whole Plant
  misc_feature: MA Experiment 20000576 PARAMETER Experiment Name: At_100uM_ABA_Mutants__P Parameter: Treatment Value: 1uM ABA vs. No Treatment
  misc_feature: MA Experiment ID: 20000709 Result: Up-regulated in Transcription
  misc_feature: MA Experiment 20000709 PARAMETER Experiment Name: At_15mM_NH4NO3_L-to-H_P Parameter: Age (hr) Value: 14
  misc_feature: MA Experiment 20000709 PARAMETER Experiment Name: At_15mM_NH4NO3_L-to-H_P Parameter: Organism Value: A. thaliana
  misc_feature: MA Experiment 20000709 PARAMETER Experiment Name: At_15mM_NH4NO3_L-to-H_P Parameter: Plant Line Value: WS
  misc_feature: MA Experiment 20000709 PARAMETER Experiment Name: At_15mM_NH4NO3_L-to-H_P Parameter: Timepoint (hr) Value: 4
  misc_feature: MA Experiment 20000709 PARAMETER Experiment Name: At_15mM_NH4NO3_L-to-H_P Parameter: Tissue Value: Aerial
  misc_feature: MA Experiment 20000709 PARAMETER Experiment Name: At_15mM_NH4NO3_L-to-H_P Parameter: Treatment Value: 15mM NH4NO3 vs. 30mM Mannitol
  misc_feature: MA Experiment ID: 20000794 Result: Up-regulated in Transcription
  misc_feature: MA Experiment 20000794 PARAMETER Experiment Name: At_Petals_P Parameter: Age (day) Value: 23-25 days
  misc_feature: MA Experiment 20000794 PARAMETER Experiment Name: At_Petals_P Parameter: Plant Line Value: WS
  misc_feature: MA Experiment 20000794 PARAMETER Experiment Name: At_Petals_P Parameter: Tissue Value: Petals vs. Whole plant
  misc_feature: MA Experiment ID: 20001768 Result: Up-regulated in Transcription
  misc_feature: MA Experiment 20001768 PARAMETER Experiment Name: At_Far-red-enriched-adult_P Parameter: Age (day) Value: 28
  misc_feature: MA Experiment 20001768 PARAMETER Experiment Name: At_Far-red-enriched-adult_P Parameter: Light Value: Far-red enriched vs. White
  misc_feature: MA Experiment 20001768 PARAMETER Experiment Name: At_Far-red-enriched-adult_P Parameter: Organism Value: A. thaliana
  misc_feature: MA Experiment 20001768 PARAMETER Experiment Name: At_Far-red-enriched-adult_P Parameter: Plant Line Value: Columbia
  misc_feature: MA Experiment 20001768 PARAMETER Experiment Name: At_Far-red-enriched-adult_P Parameter: Timepoint (hr) Value: 1
  misc_feature: MA Experiment 20001768 PARAMETER Experiment Name: At_Far-red-enriched-adult_P Parameter: Tissue Value: Aerial
  misc_feature: MA Experiment ID: 20001773 Result: Down-regulated in Transcription
  misc_feature: MA Experiment 20001773 PARAMETER Experiment Name: At_Far-red-enriched-adult_P Parameter: Age (day) Value: 30
  misc_feature: MA Experiment 20001773 PARAMETER Experiment Name: At_Far-red-enriched-adult_P Parameter: Light Value: Far-red enriched vs. White
  misc_feature: MA Experiment 20001773 PARAMETER Experiment Name: At_Far-red-enriched-adult_P Parameter: Organism Value: A. thaliana
  misc_feature: MA Experiment 20001773 PARAMETER Experiment Name: At_Far-red-enriched-adult_P Parameter: Plant Line Value: Columbia
  misc_feature: MA Experiment 20001773 PARAMETER Experiment Name: At_Far-red-enriched-adult_P Parameter: Timepoint (hr) Value: 48
  misc_feature: MA Experiment 20001773 PARAMETER Experiment Name: At_Far-red-enriched-adult_P Parameter: Tissue Value: Aerial
  misc_feature: MA Experiment ID: 20001774 Result: Up-regulated in Transcription
  misc_feature: MA Experiment 20001774 PARAMETER Experiment Name: At_Far-red-enriched-adult_P Parameter: Age (day) Value: 31
  misc_feature: MA Experiment 20001774 PARAMETER Experiment Name: At_Far-red-enriched-adult_P Parameter: Light Value: Far-red enriched vs. White
  misc_feature: MA Experiment 20001774 PARAMETER Experiment Name: At_Far-red-enriched-adult_P Parameter: Organism Value: A. thaliana
  misc_feature: MA Experiment 20001774 PARAMETER Experiment Name: At_Far-red-enriched-adult_P Parameter: Plant Line Value: Columbia
  misc_feature: MA Experiment 20001774 PARAMETER Experiment Name: At_Far-red-enriched-adult_P Parameter: Timepoint (hr) Value: 72
  misc_feature: MA Experiment 20001774 PARAMETER Experiment Name: At_Far-red-enriched-adult_P Parameter: Tissue Value: Aerial
  misc_feature: MA Experiment ID: 20001904 Result: Up-regulated in Transcription
  misc_feature: MA Experiment 20001904 PARAMETER Experiment Name: At_Drought_Reproduction_P Parameter: Age (day) Value: 37
  misc_feature: MA Experiment 20001904 PARAMETER Experiment Name: At_Drought_Reproduction_P Parameter: Organism Value: A. thaliana
  misc_feature: MA Experiment 20001904 PARAMETER Experiment Name: At_Drought_Reproduction_P Parameter: Plant Line Value: WS
  misc_feature: MA Experiment 20001904 PARAMETER Experiment Name: At_Drought_Reproduction_P Parameter: Timepoint (day) Value: 7
  misc_feature: MA Experiment 20001904 PARAMETER Experiment Name: At_Drought_Reproduction_P Parameter: Tissue Value: Rosettes
  misc_feature: MA Experiment 20001904 PARAMETER Experiment Name: At_Drought_Reproduction_P Parameter: Treatment Value: Drought vs. No Drought
  misc_feature: MA Experiment ID: 20001905 Result: Up-regulated in Transcription
  misc_feature: MA Experiment 20001905 PARAMETER Experiment Name: At_Drought_Reproduction_P Parameter: Age (day) Value: 40
  misc_feature: MA Experiment 20001905 PARAMETER Experiment Name: At_Drought_Reproduction_P Parameter: Organism Value: A. thaliana
  misc_feature: MA Experiment 20001905 PARAMETER Experiment Name: At_Drought_Reproduction_P Parameter: Plant Line Value: WS
  misc_feature: MA Experiment 20001905 PARAMETER Experiment Name: At_Drought_Reproduction_P Parameter: Timepoint (day) Value: 10
  misc_feature: MA Experiment 20001905 PARAMETER Experiment Name: At_Drought_Reproduction_P Parameter: Tissue Value: Rosettes
  misc_feature: MA Experiment 20001905 PARAMETER Experiment Name: At_Drought_Reproduction_P Parameter: Treatment Value: Drought vs. No Drought
  misc_feature: MA Experiment ID: 20001906 Result: Up-regulated in Transcription
  misc_feature: MA Experiment 20001906 PARAMETER Experiment Name: At_Drought_Reproduction_P Parameter: Age (day) Value: 35
  misc_feature: MA Experiment 20001906 PARAMETER Experiment Name: At_Drought_Reproduction_P Parameter: Organism Value: A. thaliana
  misc_feature: MA Experiment 20001906 PARAMETER Experiment Name: At_Drought_Reproduction_P Parameter: Plant Line Value: WS
  misc_feature: MA Experiment 20001906 PARAMETER Experiment Name: At_Drought_Reproduction_P Parameter: Timepoint (day) Value: 5
  misc_feature: MA Experiment 20001906 PARAMETER Experiment Name: At_Drought_Reproduction_P Parameter: Tissue Value: Siliques
  misc_feature: MA Experiment 20001906 PARAMETER Experiment Name: At_Drought_Reproduction_P Parameter: Treatment Value: Drought vs. No Drought
  misc_feature: MA Experiment ID: 20001908 Result: Up-regulated in Transcription
  misc_feature: MA Experiment 20001908 PARAMETER Experiment Name: At_Drought_Reproduction_P Parameter: Age (day) Value: 40
  misc_feature: MA Experiment 20001908 PARAMETER Experiment Name: At_Drought_Reproduction_P Parameter: Organism Value: A. thaliana
  misc_feature: MA Experiment 20001908 PARAMETER Experiment Name: At_Drought_Reproduction_P Parameter: Plant Line Value: WS
  misc_feature: MA Experiment 20001908 PARAMETER Experiment Name: At_Drought_Reproduction_P Parameter: Timepoint (day) Value: 10
  misc_feature: MA Experiment 20001908 PARAMETER Experiment Name: At_Drought_Reproduction_P Parameter: Tissue Value: Siliques
  misc_feature: MA Experiment 20001908 PARAMETER Experiment Name: At_Drought_Reproduction_P Parameter: Treatment Value: Drought vs. No Drought
atcgtcgtaggttgatatttaacaaggaatggcaaaggaagggggcttgggagagaactcaagatggagtcttggaggcatgaccgctcttgtcactggtggctctaaaggcatcggggaagctgtggtggaggaactagccatgttgggagcaaaagtccacacgtgtgccagagacgaaactcagcttcaagaacgcttacgtgaatggcaagcaaaagggtttcaggtcaccacttctgtctgcgacgtctcttctcgtgaccaacgagtgaaactcatggaaactgtttcctctctctaccaaggaaaactcaacatcctcgtcaacaatgtgggaacgtcaatattcaagccgaccacagagtatacagcagaagatttctcttttgtaatggctacaaatctcgagtcagctttccatctctcacagcttgcccacccattgttaaaagcctctggctcagggagcatcgtgctcatatcctctgctgctggagtcgtgcatgtcaatgttggatccatctatggagcaaccaaaggagccatgaatcagctggctagaaacttagcttgcgaatgggcgagcgacaacataaggacgaactctgtttgtccttggtatatcacaactcctttaagtaacgattttttcgatgaagagtttaagaaagaagcggtgcgtacgacaccaatggggcgtgttggagaagcaaatgaagtctcaccgcttgtggcatttctttgtcttccttcagcttcttatattactggtcagaccatttgcgttgacggcggtgccactgttaacggtttttccttcaagactatgccataaaacacatatgcatgtgtttggatcatattttcaataatttaaacttacgggttatatacatcgtcaatatgtaataaatgtaatttagatgtgtccacatgttctgtttctaagagattcttagatatttatgcttgcgtggtgaacaagagttcactctccggatggaccgcatccataatctatgaatttgggaattatattaccaatttgacggc

SEQ ID NO: 84656 - protein, 269 aa, Arabidopsis thaliana; identical to SEQ ID NO: 29594
  peptide (1)..(269): Ceres Seq. ID no. 12676388
  misc_feature (1)..(269): Homolog of NCBI NO: 15227075 NR Description: putative tropinone reductase; protein id: supported by cDNA: 14555., supported by cDNA: gi_17473659, by cDNA: gi_20148626 [Arabidopsis thaliana]
  misc_feature (104)..(269): Homolog of NCBI NO: 6457349 NR Description: short chain alcohol dehydrogenase [Arabidopsis
  misc_feature (1)..(100): Homolog of NCBI NO: 6457349 NR Description: short chain alcohol dehydrogenase [Arabidopsis
  misc_feature (10)..(266): Homolog of NCBI NO: 15227069 NR Description: putative tropinone reductase; protein id: [Arabidopsis thaliana] >gi|25283126|pir||E84694 probable
  misc_feature (1)..(266): Homolog of NCBI NO: 15227043 NR Description: putative tropinone reductase; protein id: [Arabidopsis thaliana] >gi|25283125|pir||C84693 probable
  misc_feature (1)..(269): Homolog of NCBI NO: 15227076 NR Description: putative tropinone reductase; protein id: supported by cDNA: 2618., supported by cDNA: gi_15010623, by cDNA: gi_19699255 [Arabidopsis thaliana]
  misc_feature (1)..(269): Homolog of NCBI NO: 21554716 NR Description: putative tropinone reductase [Arabidopsis
  misc_feature (1)..(266): Homolog of NCBI NO: 15227040 NR Description: putative tropinone reductase; protein id: [Arabidopsis thaliana] >gi|25283124|pir||B84693 probable
  misc_feature (1)..(264): Homolog of NCBI NO: 25283134 NR Description: probable tropinone reductase [imported] - thaliana >gi|3980398|gb|AAC95201.1| putative tropinone reductase
  misc_feature (6)..(266): Homolog of NCBI NO: 15222399 NR Description: tropinone reductase-I, putative; protein id: supported by cDNA: gi_13605590, supported by cDNA: gi_15777866 thaliana] >gi|13605591|gb|AAK32789.1|AF361621_1

SEQ ID NO: 84657 - protein, 252 aa, Arabidopsis thaliana; identical to SEQ ID NO: 29595
  peptide (1)..(252): Ceres Seq. ID no. 12676389
  misc_feature (1)..(252): Homolog of NCBI NO: 15227075 NR Description: putative tropinone reductase; protein id: supported by cDNA: 14555., supported by cDNA: gi_17473659, by cDNA: gi_20148626 [Arabidopsis thaliana]
  misc_feature (87)..(252): Homolog of NCBI NO: 6457349 NR Description: short chain alcohol dehydrogenase [Arabidopsis
  misc_feature (1)..(83): Homolog of NCBI NO: 6457349 NR Description: short chain alcohol dehydrogenase [Arabidopsis
  misc_feature (1)..(249): Homolog of NCBI NO: 15227069 NR Description: putative tropinone reductase; protein id: [Arabidopsis thaliana] >gi|25283126|pir||E84694 probable
  misc_feature (1)..(249): Homolog of NCBI NO: 15227043 NR Description: putative tropinone reductase; protein id: [Arabidopsis thaliana] >gi|25283125|pir||C84693 probable
  misc_feature (1)..(252): Homolog of NCBI NO: 15227076 NR Description: putative tropinone reductase; protein id: supported by cDNA: 2618., supported by cDNA: gi_15010623, by cDNA: gi_19699255 [Arabidopsis thaliana]
  misc_feature (1)..(252): Homolog of NCBI NO: 21554716 NR Description: putative tropinone reductase [Arabidopsis
  misc_feature (1)..(249): Homolog of NCBI NO: 15227040 NR Description: putative tropinone reductase; protein id: [Arabidopsis thaliana] >gi|25283124|pir||B84693 probable
  misc_feature (1)..(247): Homolog of NCBI NO: 25283134 NR Description: probable tropinone reductase [imported] - thaliana >gi|3980398|gb|AAC95201.1| putative tropinone reductase
  misc_feature (1)..(249): Homolog of NCBI NO: 15222399 NR Description: tropinone reductase-I, putative; protein id: supported by cDNA: gi_13605590, supported by cDNA: gi_15777866 thaliana] >gi|13605591|gb|AAK32789.1|AF361621_1

SEQ ID NO: 84658 - protein, 231 aa, Arabidopsis thaliana; identical to SEQ ID NO: 29596
  peptide (1)..(231): Ceres Seq. ID no. 12676390
  misc_feature (1)..(231): Homolog of NCBI NO: 15227075 NR Description: putative tropinone reductase; protein id: supported by cDNA: 14555., supported by cDNA: gi_17473659, by cDNA: gi_20148626 [Arabidopsis thaliana]
  misc_feature (66)..(231): Homolog of NCBI NO: 6457349 NR Description: short chain alcohol dehydrogenase [Arabidopsis
  misc_feature (1)..(62): Homolog of NCBI NO: 6457349 NR Description: short chain alcohol dehydrogenase [Arabidopsis
  misc_feature (1)..(228): Homolog of NCBI NO: 15227069 NR Description: putative tropinone reductase; protein id: [Arabidopsis thaliana] >gi|25283126|pir||E84694 probable
  misc_feature (1)..(228): Homolog of NCBI NO: 15227043 NR Description: putative tropinone reductase; protein id: [Arabidopsis thaliana] >gi|25283125|pir||C84693 probable
  misc_feature (1)..(231): Homolog of NCBI NO: 15227076 NR Description: putative tropinone reductase; protein id: supported by cDNA: 2618., supported by cDNA: gi_15010623, by cDNA: gi_19699255 [Arabidopsis thaliana]
  misc_feature (1)..(231): Homolog of NCBI NO: 21554716 NR Description: putative tropinone reductase [Arabidopsis
  misc_feature (1)..(228): Homolog of NCBI NO: 15227040 NR Description: putative tropinone reductase; protein id: [Arabidopsis thaliana] >gi|25283124|pir||B84693 probable
  misc_feature (1)..(226): Homolog of NCBI NO: 25283134 NR Description: probable tropinone reductase [imported] - thaliana >gi|3980398|gb|AAC95201.1| putative tropinone reductase
  misc_feature (1)..(228): Homolog of NCBI NO: 15222399 NR Description: tropinone reductase-I, putative; protein id: supported by cDNA: gi_13605590, supported by cDNA: gi_15777866 thaliana] >gi|13605591|gb|AAK32789.1|AF361621_1

SEQ ID NO: 84659 - DNA, 815 bp, Arabidopsis thaliana
  misc_feature (1)..(815): Ceres Seq. ID no. 12676406
  misc_feature: MA Experiment ID: 108434 Result: Down-regulated in Transcription
  misc_feature: MA Experiment 108434 PARAMETER Experiment Name: At_Root_Tips_cDNA_P Parameter: Tissue Value: Root Tips
  misc_feature: MA Experiment ID: 108462 Result: Up-regulated in Transcription
  misc_feature: MA Experiment 108462 PARAMETER Experiment Name: At_Germinating_Seeds_cDNA_P Parameter: Age (day) Value: 2 vs. 0
  misc_feature: MA Experiment 108462 PARAMETER Experiment Name: At_Germinating_Seeds_cDNA_P Parameter: Tissue Value: Germinating Seeds
  misc_feature: MA Experiment ID: 108464 Result: Up-regulated in Transcription
  misc_feature: MA Experiment 108464 PARAMETER Experiment Name: At_Germinating_Seeds_cDNA_P Parameter: Age (day) Value: 4 vs. 0
  misc_feature: MA Experiment 108464 PARAMETER Experiment Name: At_Germinating_Seeds_cDNA_P Parameter: Tissue Value: Germinating Seeds
  misc_feature: MA Experiment ID: 108574 Result: Up-regulated in Transcription
  misc_feature: MA Experiment 108574 PARAMETER Experiment Name: At_Wounding__cDNA_P Parameter: Timepoint (hr) Value: 1
  misc_feature: MA Experiment 108574 PARAMETER Experiment Name: At_Wounding__cDNA_P Parameter: Tissue Value: Aerial
  misc_feature: MA Experiment 108574 PARAMETER Experiment Name: At_Wounding__cDNA_P Parameter: Treatment Value: Wounding vs. No Wounding
  misc_feature: MA Experiment ID: 108576 Result: Up-regulated in Transcription
  misc_feature: MA Experiment 108576 PARAMETER Experiment Name: At_42deg_Heat_cDNA_P Parameter: Temperature (deg C) Value: 42 vs. 22
  misc_feature: MA Experiment 108576 PARAMETER Experiment Name: At_42deg_Heat_cDNA_P Parameter: Timepoint (hr) Value: 1
  misc_feature: MA Experiment 108576 PARAMETER Experiment Name: At_42deg_Heat_cDNA_P Parameter: Tissue Value: Aerial
  misc_feature: MA Experiment ID: 108577 Result: Up-regulated in Transcription
  misc_feature: MA Experiment 108577 PARAMETER Experiment Name: At_42deg_Heat_cDNA_P Parameter: Temperature (deg C) Value: 42 vs. 22
  misc_feature: MA Experiment 108577 PARAMETER Experiment Name: At_42deg_Heat_cDNA_P Parameter: Timepoint (hr) Value: 6
  misc_feature: MA Experiment 108577 PARAMETER Experiment Name: At_42deg_Heat_cDNA_P Parameter: Tissue Value: Aerial
  misc_feature: MA Experiment ID: 108607 Result: Up-regulated in Transcription
  misc_feature: MA Experiment 108607 PARAMETER Experiment Name: At_100uM_ABA_cDNA_P Parameter: Timepoint (hr) Value: 4
  misc_feature: MA Experiment 108607 PARAMETER Experiment Name: At_100uM_ABA_cDNA_P Parameter: Tissue Value: Aerial
  misc_feature: MA Experiment 108607 PARAMETER Experiment Name: At_100uM_ABA_cDNA_P Parameter: Treatment Value: 100uM ABA vs. No Treatment
  misc_feature: MA Experiment ID: 108608 Result: Up-regulated in Transcription
  misc_feature: MA Experiment 108608 PARAMETER Experiment Name: At_100uM_ABA_cDNA_P Parameter: Timepoint (hr) Value: 1
  misc_feature: MA Experiment 108608 PARAMETER Experiment Name: At_100uM_ABA_cDNA_P Parameter: Tissue Value: Aerial
  misc_feature: MA Experiment 108608 PARAMETER Experiment Name: At_100uM_ABA_cDNA_P Parameter: Treatment Value: 100uM ABA vs. No Treatment
  misc_feature: MA Experiment ID: 20000068 Result: Down-regulated in Transcription
  misc_feature: MA Experiment ID: 20000111 Result: Up-regulated in Transcription
  misc_feature: MA Experiment 20000111 PARAMETER Experiment Name: At_42deg_Heat_cDNA_P Parameter: Temperature (deg C) Value: 42 vs. 22
  misc_feature: MA Experiment 20000111 PARAMETER Experiment Name: At_42deg_Heat_cDNA_P Parameter: Timepoint (hr) Value: 6
  misc_feature: MA Experiment 20000111 PARAMETER Experiment Name: At_42deg_Heat_cDNA_P Parameter: Tissue Value: Aerial
  misc_feature: MA Experiment ID: 20000112 Result: Up-regulated in Transcription
  misc_feature: MA Experiment 20000112 PARAMETER Experiment Name: At_42deg_Heat_cDNA_P Parameter: Temperature (deg C) Value: 42 vs. 22
  misc_feature: MA Experiment 20000112 PARAMETER Experiment Name: At_42deg_Heat_cDNA_P Parameter: Timepoint (hr) Value: 2
  misc_feature: MA Experiment 20000112 PARAMETER Experiment Name: At_42deg_Heat_cDNA_P Parameter: Tissue Value: Aerial
  misc_feature: MA Experiment ID: 20000113 Result: Up-regulated in Transcription
  misc_feature: MA Experiment 20000113 PARAMETER Experiment Name: At_42deg_Heat_cDNA_P Parameter: Temperature (deg C) Value: 42 vs. 22
  misc_feature: MA Experiment 20000113 PARAMETER Experiment Name: At_42deg_Heat_cDNA_P Parameter: Timepoint (hr) Value: 8
  misc_feature: MA Experiment 20000113 PARAMETER Experiment Name: At_42deg_Heat_cDNA_P Parameter: Tissue Value: Aerial
  misc_feature: MA Experiment ID: 20000144 Result: Up-regulated in Transcription
  misc_feature: MA Experiment 20000144 PARAMETER Experiment Name: At_42deg_Heat_cDNA_P Parameter: Temperature (deg C) Value: 42 vs. 22
  misc_feature: MA Experiment 20000144 PARAMETER Experiment Name: At_42deg_Heat_cDNA_P Parameter: Timepoint (hr) Value: 1
  misc_feature: MA Experiment 20000144 PARAMETER Experiment Name: At_42deg_Heat_cDNA_P Parameter: Tissue Value: Aerial
aagaaacagagaaaaagagagagagacccctaatggctgagaaagaagaagtgaagcttttggggatatgggcgagcccttttagccgtcgggtcgagatggctctcaaactcaaaggcataccgtacgagtacgtggaagagatactggagaacaaaagccctttgcttcttgctcttaaccctattcacaagaaagtccctgttcttgtccacaatggtaaaaccattctcgagtctcatgtgattcttgaatacatcgatgagacttggccacaaaatccaattctccctcaagatccttatgaaagatccaaagctcgtttctttgctaaactcgtcgatgaacagattatgaacgtggggtttatatcaatggcaagagcagacgagaaaggaagagaagttttagccgagcaggtaagagaactgattatgtatctcgagaaagaacttgtcggaaaagattacttcggaggcaagactgtcggattcttggactttgtcgccggaagtttaattccgttttgtttggagagaggttgggaaggaataggattggaagtgattacagaggagaagtttccagagttcaagagatgggttaggaatttggagaaggttgagattgttaaagattgtgttccaccaagagaggaacatgtagaacacatgaactatatggcagagagagtgagatcttcttaagaaaacaaatcatgtttagttcttgatcatgcaatgtttgtatggttatgttgttgtttattttattgaatatctttgtatgttgtgtggttgagaagtgaggtttta

SEQ ID NO: 84660 - protein, 234 aa, Arabidopsis thaliana
  peptide (1)..(234): Ceres Seq. ID no. 12676407
  misc_feature (96)..(208): Pfam Name: Glutathione S-transferase, C-terminal domain Pfam Description: Glutathione S-transferase, C-terminal domain
  misc_feature (11)..(234): Homolog of NCBI NO: 15227085 NR Description: glutathione transferase (103-1A); protein id: supported by cDNA: 6528., supported by cDNA: gi_17065199,
  misc_feature (11)..(234): Homolog of NCBI NO: 15227084 NR Description: glutathione transferase, putative; protein id: supported by cDNA: gi_11096007 [Arabidopsis thaliana]
  misc_feature (11)..(234): Homolog of NCBI NO: 15227551 NR Description: glutathione transferase, putative; protein id: supported by cDNA: 38727., supported by cDNA: gi_11095999, by cDNA: gi_16226389 [Arabidopsis thaliana]
  misc_feature (11)..(234): Homolog of NCBI NO: 15227086 NR Description: glutathione transferase, putative; protein id: supported by cDNA: gi_11096005, supported by cDNA: gi_14423533
  misc_feature (11)..(234): Homolog of NCBI NO: 14423534 NR Description: putative glutathione S-transferase [Arabidopsis
  misc_feature (11)..(234): Homolog of NCBI NO: 15227550 NR Description: glutathione transferase, putative; protein id: supported by cDNA: gi_11096001, supported by cDNA: gi_20453169
  misc_feature (11)..(233): Homolog of NCBI NO: 15227087 NR Description: glutathione transferase, putative; protein id: supported by cDNA: gi_11096003 [Arabidopsis thaliana]
  misc_feature (11)..(231): Homolog of NCBI NO: 15227082 NR Description: glutathione transferase, putative; protein id: supported by cDNA: 24361., supported by cDNA: gi_11096009, by cDNA: gi_15010755 [Arabidopsis thaliana]
  misc_feature (11)..(234): Homolog of NCBI NO: 15232628 NR Description: glutathione transferase, putative; protein id: supported by cDNA: 21546. [Arabidopsis thaliana] putative glutathione transferase [Arabidopsis thaliana]
  misc_feature (17)..(227): Homolog of NCBI NO: 7595790 NR Description: glutathione S-transferase [Euphorbia esula]
ETEKKRERPLMAEKEEVKLLGIWASPFSRRVEMALKLKGIPYEYVEEILENKSPLLLALNPIHKKVPVLVHNGKTILESHVILEYIDETWPQNPILPQDPYERSKARFFAKLVDEQIMNVGFISMARADEKGREVLAEQVRELIMYLEKELVGKDYFGGKTVGFLDFVAGSLIPFCLERGWEGIGLEVITEEKFPEFKRWVRNLEKVEIVKDCVPPREEHVEHMNYMAERVRSS

SEQ ID NO: 84661 - protein, 224 aa, Arabidopsis thaliana; identical to SEQ ID NO: 27461
  peptide (1)..(224): Ceres Seq. ID no. 12676408
  misc_feature (86)..(198): Pfam Name: Glutathione S-transferase, C-terminal domain Pfam Description: Glutathione S-transferase, C-terminal domain
  misc_feature (1)..(224): Homolog of NCBI NO: 15227085 NR Description: glutathione transferase (103-1A); protein id: supported by cDNA: 6528., supported by cDNA: gi_17065199,
  misc_feature (1)..(224): Homolog of NCBI NO: 15227084 NR Description: glutathione transferase, putative; protein id: supported by cDNA: gi_11096007 [Arabidopsis thaliana]
  misc_feature (1)..(224): Homolog of NCBI NO: 15227551 NR Description: glutathione transferase, putative; protein id: supported by cDNA: 38727., supported by cDNA: gi_11095999, by cDNA: gi_16226389 [Arabidopsis thaliana]
  misc_feature (1)..(224): Homolog of NCBI NO: 15227086 NR Description: glutathione transferase, putative; protein id: supported by cDNA: gi_11096005, supported by cDNA: gi_14423533
  misc_feature (1)..(224): Homolog of NCBI NO: 14423534 NR Description: putative glutathione S-transferase [Arabidopsis
  misc_feature (1)..(224): Homolog of NCBI NO: 15227550 NR Description: glutathione transferase, putative; protein id: supported by cDNA: gi_11096001, supported by cDNA: gi_20453169
  misc_feature (1)..(223): Homolog of NCBI NO: 15227087 NR Description: glutathione transferase, putative; protein id: supported by cDNA: gi_11096003 [Arabidopsis thaliana]
  misc_feature (1)..(221): Homolog of NCBI NO: 15227082 NR Description: glutathione transferase, putative; protein id: supported by cDNA: 24361., supported by cDNA: gi_11096009, by cDNA: gi_15010755 [Arabidopsis thaliana]
  misc_feature (1)..(224): Homolog of NCBI NO: 15232628 NR Description: glutathione transferase, putative; protein id: supported by cDNA: 21546. [Arabidopsis thaliana] putative glutathione transferase [Arabidopsis thaliana]
  misc_feature (7)..(217): Homolog of NCBI NO: 7595790 NR Description: glutathione S-transferase [Euphorbia esula]

SEQ ID NO: 84662 - protein, 202 aa, Arabidopsis thaliana; identical to SEQ ID NO: 27462
  peptide (1)..(202): Ceres Seq. ID no. 12676409
  misc_feature (64)..(176): Pfam Name: Glutathione S-transferase, C-terminal domain Pfam Description: Glutathione S-transferase, C-terminal domain
  misc_feature (1)..(202): Homolog of NCBI NO: 15227085 NR Description: glutathione transferase (103-1A); protein id: supported by cDNA: 6528., supported by cDNA: gi_17065199,
  misc_feature (1)..(202): Homolog of NCBI NO: 15227084 NR Description: glutathione transferase, putative; protein id: supported by cDNA: gi_11096007 [Arabidopsis thaliana]
  misc_feature (1)..(202): Homolog of NCBI NO: 15227551 NR Description: glutathione transferase, putative; protein id: supported by cDNA: 38727., supported by cDNA: gi_11095999, by cDNA: gi_16226389 [Arabidopsis thaliana]
  misc_feature (1)..(202): Homolog of NCBI NO: 15227086 NR Description: glutathione transferase, putative; protein id: supported by cDNA: gi_11096005, supported by cDNA: gi_14423533
  misc_feature (1)..(202): Homolog of NCBI NO: 14423534 NR Description: putative glutathione S-transferase [Arabidopsis
  misc_feature (1)..(202): Homolog of NCBI NO: 15227550 NR Description: glutathione transferase, putative; protein id: supported by cDNA: gi_11096001, supported by cDNA: gi_20453169
  misc_feature (1)..(201): Homolog of NCBI NO: 15227087 NR Description: glutathione transferase, putative; protein id: supported by cDNA: gi_11096003 [Arabidopsis thaliana]
  misc_feature (1)..(199): Homolog of NCBI NO: 15227082 NR Description: glutathione transferase, putative; protein id: supported by cDNA: 24361., supported by cDNA: gi_11096009, by cDNA: gi_15010755 [Arabidopsis thaliana]
  misc_feature (1)..(202): Homolog of NCBI NO: 15232628 NR Description: glutathione transferase, putative; protein id: supported by cDNA: 21546. [Arabidopsis thaliana] putative glutathione transferase [Arabidopsis thaliana]
  misc_feature (1)..(195): Homolog of NCBI NO: 7595790 NR Description: glutathione S-transferase [Euphorbia esula]

SEQ ID NO: 84663 - DNA, 1003 bp, Arabidopsis thaliana
  misc_feature (1)..(1003): Ceres Seq. ID no. 12676410
  misc_feature: MA Experiment ID: 108434 Result: Down-regulated in Transcription
  misc_feature: MA Experiment 108434 PARAMETER Experiment Name: At_Root_Tips_cDNA_P Parameter: Tissue Value: Root Tips
  misc_feature: MA Experiment ID: 108435 Result: Down-regulated in Transcription
  misc_feature: MA Experiment 108435 PARAMETER Experiment Name: At_stm_Mutants_cDNA_P Parameter: Plant Line Value: wt Landsburg vs stm
  misc_feature: MA Experiment 108435 PARAMETER Experiment Name: At_stm_Mutants_cDNA_P Parameter: Tissue Value: Shoot Apical Meristem Region
  misc_feature: MA Experiment ID: 108461 Result: Down-regulated in Transcription
  misc_feature: MA Experiment 108461 PARAMETER Experiment Name: At_Germinating_Seeds_cDNA_P Parameter: Age (day) Value: 1 vs. 0
  misc_feature: MA Experiment 108461 PARAMETER Experiment Name: At_Germinating_Seeds_cDNA_P Parameter: Tissue Value: Germinating Seeds
  misc_feature: MA Experiment ID: 108462 Result: Up-regulated in Transcription
  misc_feature: MA Experiment 108462 PARAMETER Experiment Name: At_Germinating_Seeds_cDNA_P Parameter: Age (day) Value: 2 vs. 0
  misc_feature: MA Experiment 108462 PARAMETER Experiment Name: At_Germinating_Seeds_cDNA_P Parameter: Tissue Value: Germinating Seeds
  misc_feature: MA Experiment ID: 108463 Result: Up-regulated in Transcription
  misc_feature: MA Experiment 108463 PARAMETER Experiment Name: At_Germinating_Seeds_cDNA_P Parameter: Age (day) Value: 3 vs. 0
  misc_feature: MA Experiment 108463 PARAMETER Experiment Name: At_Germinating_Seeds_cDNA_P Parameter: Tissue Value: Germinating Seeds
  misc_feature: MA Experiment ID: 108464 Result: Up-regulated in Transcription
  misc_feature: MA Experiment 108464 PARAMETER Experiment Name: At_Germinating_Seeds_cDNA_P Parameter: Age (day) Value: 4 vs. 0
  misc_feature: MA Experiment 108464 PARAMETER Experiment Name: At_Germinating_Seeds_cDNA_P Parameter: Tissue Value: Germinating Seeds
  misc_feature: MA Experiment ID: 108572 Result: Up-regulated in Transcription
  misc_feature: MA Experiment 108572 PARAMETER Experiment Name: At_Drought_cDNA_P Parameter: Timepoint (hr) Value: 1
  misc_feature: MA Experiment 108572 PARAMETER Experiment Name: At_Drought_cDNA_P Parameter: Tissue Value: Aerial
  misc_feature: MA Experiment 108572 PARAMETER Experiment Name: At_Drought_cDNA_P Parameter: Treatment Value: Drought vs. No Drought
  misc_feature: MA Experiment ID: 108574 Result: Up-regulated in Transcription
  misc_feature: MA Experiment 108574 PARAMETER Experiment Name: At_Wounding__cDNA_P Parameter: Timepoint (hr) Value: 1
  misc_feature: MA Experiment 108574 PARAMETER Experiment Name: At_Wounding__cDNA_P Parameter: Tissue Value: Aerial
  misc_feature: MA Experiment 108574 PARAMETER Experiment Name: At_Wounding__cDNA_P Parameter: Treatment Value: Wounding vs. No Wounding
  misc_feature: MA Experiment ID: 108576 Result: Up-regulated in Transcription
  misc_feature: MA Experiment 108576 PARAMETER Experiment Name: At_42deg_Heat_cDNA_P Parameter: Temperature (deg C) Value: 42 vs. 22
  misc_feature: MA Experiment 108576 PARAMETER Experiment Name: At_42deg_Heat_cDNA_P Parameter: Timepoint (hr) Value: 1
  misc_feature: MA Experiment 108576 PARAMETER Experiment Name: At_42deg_Heat_cDNA_P Parameter: Tissue Value: Aerial
  misc_feature: MA Experiment ID: 108585 Result: Up-regulated in Transcription
  misc_feature: MA Experiment 108585 PARAMETER Experiment Name: At_5mM_NaNP_cDNA_P Parameter: Timepoint (hr) Value: 6
  misc_feature: MA Experiment 108585 PARAMETER Experiment Name: At_5mM_NaNP_cDNA_P Parameter: Tissue Value: Aerial
  misc_feature: MA Experiment 108585 PARAMETER Experiment Name: At_5mM_NaNP_cDNA_P Parameter: Treatment Value: null
  misc_feature: MA Experiment ID: 108594 Result: Down-regulated in Transcription
  misc_feature: MA Experiment 108594 PARAMETER Experiment Name: At_Ler-rhl_Root_cDNA_P Parameter: Plant Line Value: null
  misc_feature: MA Experiment ID: 108667 Result: Up-regulated in Transcription
  misc_feature: MA Experiment 108667 PARAMETER Experiment Name: At_2mM_SA_cDNA_P Parameter: Plant Line Value: WS
  misc_feature: MA Experiment 108667 PARAMETER Experiment Name: At_2mM_SA_cDNA_P Parameter: Timepoint (hr) Value: 1
  misc_feature: MA Experiment 108667 PARAMETER Experiment Name: At_2mM_SA_cDNA_P Parameter: Treatment Value: 2mM SA vs. No Treatment
  misc_feature: MA Experiment ID: 108668 Result: Up-regulated in Transcription
  misc_feature: MA Experiment 108668 PARAMETER Experiment Name: At_2mM_SA_cDNA_P Parameter: Plant Line Value: WS
  misc_feature: MA Experiment 108668 PARAMETER Experiment Name: At_2mM_SA_cDNA_P Parameter: Timepoint (hr) Value: 6
  misc_feature: MA Experiment 108668 PARAMETER Experiment Name: At_2mM_SA_cDNA_P Parameter: Treatment Value: 2mM SA vs. No Treatment
  misc_feature: MA Experiment ID: 20000070 Result: Up-regulated in Transcription
  misc_feature: MA Experiment 20000070 PARAMETER Experiment Name: At_100uM_ABA_Mutants_cDNA_P Parameter: Plant Line Value: CS24
  misc_feature: MA Experiment 20000070 PARAMETER Experiment Name: At_100uM_ABA_Mutants_cDNA_P Parameter: Timepoint (hr) Value: 6
  misc_feature: MA Experiment 20000070 PARAMETER Experiment Name: At_100uM_ABA_Mutants_cDNA_P Parameter: Tissue Value: Aerial
  misc_feature: MA Experiment 20000070 PARAMETER Experiment Name: At_100uM_ABA_Mutants_cDNA_P Parameter: Treatment Value: 100uM ABA vs. No Treatment
  misc_feature: MA Experiment ID: 20000072 Result: Up-regulated in Transcription
  misc_feature: MA Experiment 20000072 PARAMETER Experiment Name: At_100uM_ABA_Mutants_cDNA_P Parameter: Plant Line Value: CS8105
  misc_feature: MA Experiment 20000072 PARAMETER Experiment Name: At_100uM_ABA_Mutants_cDNA_P Parameter: Timepoint (hr) Value: 6
  misc_feature: MA Experiment 20000072 PARAMETER Experiment Name: At_100uM_ABA_Mutants_cDNA_P Parameter: Tissue Value: Aerial
  misc_feature: MA Experiment 20000072 PARAMETER Experiment Name: At_100uM_ABA_Mutants_cDNA_P Parameter: Treatment Value: 100uM ABA vs. No Treatment
  misc_feature: MA Experiment ID: 20000093 Result: Up-regulated in Transcription
  misc_feature: MA Experiment 20000093 PARAMETER Experiment Name: At_42deg_Heat_cDNA_P Parameter: Temperature (deg C) Value: 42 vs. 22
  misc_feature: MA Experiment 20000093 PARAMETER Experiment Name: At_42deg_Heat_cDNA_P Parameter: Timepoint (hr) Value: 0.5
  misc_feature: MA Experiment 20000093 PARAMETER Experiment Name: At_42deg_Heat_cDNA_P Parameter: Tissue Value: Aerial
  misc_feature: MA Experiment ID: 20000112 Result: Up-regulated in Transcription
  misc_feature: MA Experiment 20000112 PARAMETER Experiment Name: At_42deg_Heat_cDNA_P Parameter: Temperature (deg C) Value: 42 vs. 22
  misc_feature: MA Experiment 20000112 PARAMETER Experiment Name: At_42deg_Heat_cDNA_P Parameter: Timepoint (hr) Value: 2
  misc_feature: MA Experiment 20000112 PARAMETER Experiment Name: At_42deg_Heat_cDNA_P Parameter: Tissue Value: Aerial
  misc_feature: MA Experiment ID: 20000180 Result: Down-regulated in Transcription
  misc_feature: MA Experiment 20000180 PARAMETER Experiment Name: At_Germinating_Seeds_P Parameter: Age (hr) Value: 24 vs. 0
  misc_feature: MA Experiment 20000180 PARAMETER Experiment Name: At_Germinating_Seeds_P Parameter: Tissue Value: Germinating Seeds
  misc_feature: MA Experiment ID: 20000182 Result: Up-regulated in Transcription
  misc_feature: MA Experiment 20000182 PARAMETER Experiment Name: At_2mM_SA_P Parameter: Age (day) Value: 14
  misc_feature: MA Experiment 20000182 PARAMETER Experiment Name: At_2mM_SA_P Parameter: Organism Value: A. thaliana
  misc_feature: MA Experiment 20000182 PARAMETER Experiment Name: At_2mM_SA_P Parameter: Plant Line Value: WS
  misc_feature: MA Experiment 20000182 PARAMETER Experiment Name: At_2mM_SA_P Parameter: Timepoint (hr) Value: 6
  misc_feature: MA Experiment 20000182 PARAMETER Experiment Name: At_2mM_SA_P Parameter: Tissue Value: Aerial
  misc_feature: MA Experiment 20000182 PARAMETER Experiment Name: At_2mM_SA_P Parameter: Treatment Value: 2mM SA vs. No Treatment
  misc_feature: MA Experiment ID: 20000185 Result: Up-regulated in Transcription
  misc_feature: MA Experiment 20000185 PARAMETER Experiment Name: At_Roots__P Parameter: Age (day) Value: 7 vs. 21
  misc_feature: MA Experiment 20000185 PARAMETER Experiment Name: At_Roots__P Parameter: Organism Value: A. thaliana
  misc_feature: MA Experiment 20000185 PARAMETER Experiment Name: At_Roots__P Parameter: Tissue Value: Roots vs. Whole Plant
  misc_feature: MA Experiment ID: 20000224 Result: Up-regulated in Transcription
  misc_feature: MA Experiment ID: 20000234 Result: Down-regulated in Transcription
  misc_feature: MA Experiment 20000234 PARAMETER Experiment Name: At_Siliques_P Parameter: Age (day) Value: 21
  misc_feature: MA Experiment 20000234 PARAMETER Experiment Name: At_Siliques_P Parameter: Organism Value: A. thaliana
  misc_feature: MA Experiment 20000234 PARAMETER Experiment Name: At_Siliques_P Parameter: Plant Line Value: WS
  misc_feature: MA Experiment 20000234 PARAMETER Experiment Name: At_Siliques_P Parameter: Tissue Value: Less Than 5mm Siliques vs. Whole Plant
  misc_feature: MA Experiment ID: 20000235 Result: Down-regulated in Transcription
  misc_feature: MA Experiment 20000235 PARAMETER Experiment Name: At_Siliques_P Parameter: Age (day) Value: 21
  misc_feature: MA Experiment 20000235 PARAMETER Experiment Name: At_Siliques_P Parameter: Organism Value: A. thaliana
  misc_feature: MA Experiment 20000235 PARAMETER Experiment Name: At_Siliques_P Parameter: Plant Line Value: WS
  misc_feature: MA Experiment 20000235 PARAMETER Experiment Name: At_Siliques_P Parameter: Tissue Value: 5-10mm Siliques vs. Whole Plant
  misc_feature: MA Experiment ID: 20000456 Result: Up-regulated in Transcription
  misc_feature: MA Experiment 20000456 PARAMETER Experiment Name: At_100uM_BA_P Parameter: Age (day) Value: 14
  misc_feature: MA Experiment 20000456 PARAMETER Experiment Name: At_100uM_BA_P Parameter: Organism Value: A. thaliana
  misc_feature: MA Experiment 20000456 PARAMETER Experiment Name: At_100uM_BA_P Parameter: Plant Line Value: WS
  misc_feature: MA Experiment 20000456 PARAMETER Experiment Name: At_100uM_BA_P Parameter: Timepoint (hr) Value: 6
  misc_feature: MA Experiment 20000456 PARAMETER Experiment Name: At_100uM_BA_P Parameter: Tissue Value: Aerial
  misc_feature: MA Experiment 20000456 PARAMETER Experiment Name: At_100uM_BA_P Parameter: Treatment Value: 100uM BA vs. No Treatment
  misc_feature: MA Experiment ID: 20000527 Result: Down-regulated in Transcription
  misc_feature: MA Experiment 20000527 PARAMETER Experiment Name: At_10percent_PEG_P Parameter: Age (day) Value: 20
  misc_feature: MA Experiment 20000527 PARAMETER Experiment Name: At_10percent_PEG_P Parameter: Organism Value: A. thaliana
  misc_feature: MA Experiment 20000527 PARAMETER Experiment Name: At_10percent_PEG_P Parameter: Plant Line Value: WS
  misc_feature: MA Experiment 20000527 PARAMETER Experiment Name: At_10percent_PEG_P Parameter: Timepoint (day) Value: 20
  misc_feature: MA Experiment 20000527 PARAMETER Experiment Name: At_10percent_PEG_P Parameter: Tissue Value: Whole Plant
  misc_feature: MA Experiment 20000527 PARAMETER Experiment Name: At_10percent_PEG_P Parameter: Treatment Value: 10percent PEG vs. No Treatment
  misc_feature: MA Experiment ID: 20000709 Result: Up-regulated in Transcription
  misc_feature: MA Experiment 20000709 PARAMETER Experiment Name: At_15mM_NH4NO3_L-to-H_P Parameter: Age (hr) Value: 14
  misc_feature: MA Experiment 20000709 PARAMETER Experiment Name: At_15mM_NH4NO3_L-to-H_P Parameter: Organism Value: A. thaliana
  misc_feature: MA Experiment 20000709 PARAMETER Experiment Name: At_15mM_NH4NO3_L-to-H_P Parameter: Plant Line Value: WS
  misc_feature: MA Experiment 20000709 PARAMETER Experiment Name: At_15mM_NH4NO3_L-to-H_P Parameter: Timepoint (hr) Value: 4
  misc_feature: MA Experiment 20000709 PARAMETER Experiment Name: At_15mM_NH4NO3_L-to-H_P Parameter: Tissue Value: Aerial
  misc_feature: MA Experiment 20000709 PARAMETER Experiment Name: At_15mM_NH4NO3_L-to-H_P Parameter: Treatment Value: 15mM NH4NO3 vs. 30mM Mannitol
  misc_feature: MA Experiment ID: 20001450 Result: Down-regulated in Transcription
  misc_feature: MA Experiment 20001450 PARAMETER Experiment Name: At_Far-red-induction_P Parameter: Age (day) Value: 7
  misc_feature: MA Experiment 20001450 PARAMETER Experiment Name: At_Far-red-induction_P Parameter: Light Value: Far-red vs. White
  misc_feature: MA Experiment 20001450 PARAMETER Experiment Name: At_Far-red-induction_P Parameter: Organism Value: A. thaliana
  misc_feature: MA Experiment 20001450 PARAMETER Experiment Name: At_Far-red-induction_P Parameter: Plant Line Value: Columbia
  misc_feature: MA Experiment 20001450 PARAMETER Experiment Name: At_Far-red-induction_P Parameter: Timepoint (hr) Value: 8
  misc_feature: MA Experiment 20001450 PARAMETER Experiment Name: At_Far-red-induction_P Parameter: Tissue Value: Whole Plant
  misc_feature: MA Experiment ID: 20001451 Result: Down-regulated in Transcription
  misc_feature: MA Experiment 20001451 PARAMETER Experiment Name: At_Far-red-induction_P Parameter: Age (day) Value: 7
  misc_feature: MA Experiment 20001451 PARAMETER Experiment Name: At_Far-red-induction_P Parameter: Light Value: Far-red vs. White
  misc_feature: MA Experiment 20001451 PARAMETER Experiment Name: At_Far-red-induction_P Parameter: Organism Value: A. thaliana
  misc_feature: MA Experiment 20001451 PARAMETER Experiment Name: At_Far-red-induction_P Parameter: Plant Line Value: Columbia
  misc_feature: MA Experiment 20001451 PARAMETER Experiment Name: At_Far-red-induction_P Parameter: Timepoint (hr) Value: 24
  misc_feature: MA Experiment 20001451 PARAMETER Experiment Name: At_Far-red-induction_P Parameter: Tissue Value: Whole Plant
  misc_feature: MA Experiment ID: 20001554 Result: Down-regulated in Transcription
  misc_feature: MA Experiment 20001554 PARAMETER Experiment Name: At_Drought_Soil_Dry_P Parameter: Age (day) Value: 21
  misc_feature: MA Experiment 20001554 PARAMETER Experiment Name: At_Drought_Soil_Dry_P Parameter: Organism Value: A. thaliana
  misc_feature: MA Experiment 20001554 PARAMETER Experiment Name: At_Drought_Soil_Dry_P Parameter: Plant Line Value: WS
  misc_feature: MA Experiment 20001554 PARAMETER Experiment Name: At_Drought_Soil_Dry_P Parameter: Post Timepoint (hr) Value: None
  misc_feature: MA Experiment 20001554 PARAMETER Experiment Name: At_Drought_Soil_Dry_P Parameter: Post-Treatment Value: None
  misc_feature: MA Experiment 20001554 PARAMETER Experiment Name: At_Drought_Soil_Dry_P Parameter: Timepoint (day) Value: 7
  misc_feature: MA Experiment 20001554 PARAMETER Experiment Name: At_Drought_Soil_Dry_P Parameter: Treatment Value: Drought vs. No Drought
  misc_feature: MA Experiment ID: 20001558 Result: Up-regulated in Transcription
  misc_feature: MA Experiment 20001558 PARAMETER Experiment Name: At_Drought_Soil_Dry_P Parameter: Age (day) Value: 27
  misc_feature: MA Experiment 20001558 PARAMETER Experiment Name: At_Drought_Soil_Dry_P Parameter: Organism Value: A. thaliana
  misc_feature: MA Experiment 20001558 PARAMETER Experiment Name: At_Drought_Soil_Dry_P Parameter: Plant Line Value: WS
  misc_feature: MA Experiment 20001558 PARAMETER Experiment Name: At_Drought_Soil_Dry_P Parameter: Post Timepoint (hr) Value: 6
  misc_feature: MA Experiment 20001558 PARAMETER Experiment Name: At_Drought_Soil_Dry_P Parameter: Post-Treatment Value: Re-Water vs. No Drought
  misc_feature: MA Experiment 20001558 PARAMETER Experiment Name: At_Drought_Soil_Dry_P Parameter: Timepoint (day) Value: 13
  misc_feature: MA Experiment 20001558 PARAMETER Experiment Name: At_Drought_Soil_Dry_P Parameter: Treatment Value: Drought vs. No Drought
  misc_feature: MA Experiment ID: 20001560 Result: Up-regulated in Transcription
  misc_feature: MA Experiment 20001560 PARAMETER Experiment Name: At_Drought_Soil_Dry_P Parameter: Age (day) Value: 28
  misc_feature: MA Experiment 20001560 PARAMETER Experiment Name: At_Drought_Soil_Dry_P Parameter: Organism Value: A. thaliana
  misc_feature: MA Experiment 20001560 PARAMETER Experiment Name: At_Drought_Soil_Dry_P Parameter: Plant Line Value: WS
  misc_feature: MA Experiment 20001560 PARAMETER Experiment Name: At_Drought_Soil_Dry_P Parameter: Post Timepoint (hr) Value: None
  misc_feature: MA Experiment 20001560 PARAMETER Experiment Name: At_Drought_Soil_Dry_P Parameter: Post-Treatment Value: None
  misc_feature: MA Experiment 20001560 PARAMETER Experiment Name: At_Drought_Soil_Dry_P Parameter: Timepoint (day) Value: 14
  misc_feature: MA Experiment 20001560 PARAMETER Experiment Name: At_Drought_Soil_Dry_P Parameter: Treatment Value: Drought vs. No Drought
atttgtgtatagaatatagtaaactcaagtaatcaagcaagtaaacgaaacataaaaaagaaaagtagtgcaagaaacagaggagttagataccaaaaagtgagagatatcgaatggcggagaaagaagagagtgtgaagcttctagggttttgggcaagcccttttagtcgtcgagtcgagatggctctcaaactcaaaggcgtgccatacgaatacttggaagaagatttgcccaacaagacccctttgcttctggagctaaacccgcttcacaagaaagttccggttcttgtccacaatgacaaaatattactcgagtcacatctgattctcgaatacatcgatcagacgtggaagaacagtccaattcttcctcaagatccttacgagaaggccatggctcgattttgggccaagttcatcgatgaccagatcctaacactagggtttaggtcccttgtaaaagcagagaaaggaagagaggttgctattgaagagactcgggaactgcttatgtttcttgagaaagaagtcactggaaaagatttcttcggtggcaagacaatcggattcttggacatgatcgcaggaagtatgatcccattttgtctagctagactttggaaaggtattggaattgatatgattccagaggagaagtttccggaattaaatagatggatcaagaatttggaagaagttgaggcagtgaggggatgtattcctccaagagagaaacaaattgagcgcatgaccaaaattgcagagacaattaagtctgcctaaattaaagatacttcttgcctacgaaaatatttgatttatatgcttgcatcgttttttatttatatttttattttttaaagtttttcgaaaaatagaatgacctaatatttaagtaaaaagatcaaaaacctatttgaaagttacagcaatcaaataacgtggtgtgtctggagattgtaaaagccaagactagaaggaaataagaataaaataac

SEQ ID NO: 84664 - protein, 224 aa, Arabidopsis thaliana; identical to SEQ ID NO: 77136
  peptide (1)..(224): Ceres Seq. ID no. 12676411
  misc_feature (87)..(198): Pfam Name: Glutathione S-transferase, C-terminal domain Pfam Description: Glutathione S-transferase, C-terminal domain
  misc_feature (1)..(224): Homolog of NCBI NO: 15227551 NR Description: glutathione transferase, putative; protein id: supported by cDNA: 38727., supported by cDNA: gi_11095999, by cDNA: gi_16226389 [Arabidopsis thaliana]
  misc_feature (1)..(223): Homolog of NCBI NO: 15227550 NR Description: glutathione transferase, putative; protein id: supported by cDNA: gi_11096001, supported by cDNA: gi_20453169
  misc_feature (1)..(224): Homolog of NCBI NO: 15227086 NR Description: glutathione transferase, putative; protein id: supported by cDNA: gi_11096005, supported by cDNA: gi_14423533
  misc_feature (1)..(224): Homolog of NCBI NO: 14423534 NR Description: putative glutathione S-transferase [Arabidopsis
  misc_feature (1)..(223): Homolog of NCBI NO: 15227087 NR Description: glutathione transferase, putative; protein id: supported by cDNA: gi_11096003 [Arabidopsis thaliana]
  misc_feature (1)..(224): Homolog of NCBI NO: 15227085 NR Description: glutathione transferase (103-1A); protein id: supported by cDNA: 6528., supported by cDNA: gi_17065199,
  misc_feature (4)..(224): Homolog of NCBI NO: 15227084 NR Description: glutathione transferase, putative; protein id: supported by cDNA: gi_11096007 [Arabidopsis thaliana]
  misc_feature (1)..(224): Homolog of NCBI NO: 15227082 NR Description: glutathione transferase, putative; protein id: supported by cDNA: 24361., supported by cDNA: gi_11096009, by cDNA: gi_15010755 [Arabidopsis thaliana]

SEQ ID NO: 84665 - protein, 201 aa, Arabidopsis thaliana; identical to SEQ ID NO: 77137
  peptide (1)..(201): Ceres Seq. ID no. 12676412
  misc_feature (64)..(175): Pfam Name: Glutathione S-transferase, C-terminal domain Pfam Description: Glutathione S-transferase, C-terminal domain
  misc_feature (1)..(201): Homolog of NCBI NO: 15227551 NR Description: glutathione transferase, putative; protein id: supported by cDNA: 38727., supported by cDNA: gi_11095999, by cDNA: gi_16226389 [Arabidopsis thaliana]
  misc_feature (1)..(200): Homolog of NCBI NO: 15227550 NR Description: glutathione transferase, putative; protein id: supported by cDNA: gi_11096001, supported by cDNA: gi_20453169
  misc_feature (1)..(201): Homolog of NCBI NO: 15227086 NR Description: glutathione transferase, putative; protein id: supported by cDNA: gi_11096005, supported by cDNA: gi_14423533
  misc_feature (1)..(201): Homolog of NCBI NO: 14423534 NR Description: putative glutathione S-transferase [Arabidopsis
  misc_feature (1)..(200): Homolog of NCBI NO: 15227087 NR Description: glutathione transferase, putative; protein id: supported by cDNA: gi_11096003 [Arabidopsis thaliana]
  misc_feature (1)..(201): Homolog of NCBI NO: 15227085 NR Description: glutathione transferase (103-1A); protein id: supported by cDNA: 6528., supported by cDNA: gi_17065199,
  misc_feature (1)..(201): Homolog of NCBI NO: 15227084 NR Description: glutathione transferase, putative; protein id: supported by cDNA: gi_11096007 [Arabidopsis thaliana]
  misc_feature (1)..(201): Homolog of NCBI NO: 15227082 NR Description: glutathione transferase, putative; protein id: supported by cDNA: 24361., supported by cDNA: gi_11096009, by cDNA: gi_15010755 [Arabidopsis thaliana]

SEQ ID NO: 84666 - protein, 129 aa, Arabidopsis thaliana; identical to SEQ ID NO: 77138
  peptide (1)..(129): Ceres Seq. ID no. 12676413
  misc_feature (1)..(103): Pfam Name: Glutathione S-transferase, C-terminal domain Pfam Description: Glutathione S-transferase, C-terminal domain
  misc_feature (1)..(129): Homolog of NCBI NO: 15227551 NR Description: glutathione transferase, putative; protein id: supported by cDNA: 38727., supported by cDNA: gi_11095999, by cDNA: gi_16226389 [Arabidopsis thaliana]
  misc_feature (1)..(128): Homolog of NCBI NO: 15227550 NR Description: glutathione transferase, putative; protein id: supported by cDNA: gi_11096001, supported by cDNA: gi_20453169
  misc_feature (1)..(129): Homolog of NCBI NO: 15227086 NR Description: glutathione transferase, putative; protein id: supported by cDNA: gi_11096005, supported by cDNA: gi_14423533
  misc_feature (1)..(129): Homolog of NCBI NO: 14423534 NR Description: putative glutathione S-transferase [Arabidopsis
  misc_feature (1)..(128): Homolog of NCBI NO: 15227087 NR Description: glutathione transferase, putative; protein id: supported by cDNA: gi_11096003 [Arabidopsis thaliana]
  misc_feature (1)..(129): Homolog of NCBI NO: 15227085 NR Description: glutathione transferase (103-1A); protein id: supported by cDNA: 6528., supported by cDNA: gi_17065199,
  misc_feature (1)..(129): Homolog of NCBI NO: 15227084 NR Description: glutathione transferase, putative; protein id: supported by cDNA: gi_11096007 [Arabidopsis thaliana]
  misc_feature (1)..(129): Homolog of NCBI NO: 15227082 NR Description: glutathione transferase, putative; protein id: supported by cDNA: 24361., supported by cDNA: gi_11096009, by cDNA: gi_15010755 [Arabidopsis thaliana]

SEQ ID NO: 84667 - DNA, 1640 bp, Arabidopsis thaliana
  misc_feature (1)..(1640): Ceres Seq. ID no. 12676428
  misc_feature: MA Experiment ID: 20000166 Result: Up-regulated in Transcription
  misc_feature: MA Experiment 20000166 PARAMETER Experiment Name: At_100uM_ABA_P Parameter: Age (day) Value: 14
  misc_feature: MA Experiment 20000166 PARAMETER Experiment Name: At_100uM_ABA_P Parameter: Organism Value: A. thaliana
  misc_feature: MA Experiment 20000166 PARAMETER Experiment Name: At_100uM_ABA_P Parameter: Plant Line Value: WS
  misc_feature: MA Experiment 20000166 PARAMETER Experiment Name: At_100uM_ABA_P Parameter: Timepoint (hr) Value: 1
  misc_feature: MA Experiment 20000166 PARAMETER Experiment Name: At_100uM_ABA_P Parameter: Tissue Value: Aerial
  misc_feature: MA Experiment 20000166 PARAMETER Experiment Name: At_100uM_ABA_P Parameter: Treatment Value: 100uM ABA vs. No Treatment
  misc_feature: MA Experiment ID: 20000169 Result: Up-regulated in Transcription
  misc_feature: MA Experiment 20000169 PARAMETER Experiment Name: At_100uM_ABA_P Parameter: Age (day) Value: 14
  misc_feature: MA Experiment 20000169 PARAMETER Experiment Name: At_100uM_ABA_P Parameter: Organism Value: A. thaliana
  misc_feature: MA Experiment 20000169 PARAMETER Experiment Name: At_100uM_ABA_P Parameter: Plant Line Value: WS
  misc_feature: MA Experiment 20000169 PARAMETER Experiment Name: At_100uM_ABA_P Parameter: Timepoint (hr) Value: 6
  misc_feature: MA Experiment 20000169 PARAMETER Experiment Name: At_100uM_ABA_P Parameter: Tissue Value: Aerial
  misc_feature: MA Experiment 20000169 PARAMETER Experiment Name: At_100uM_ABA_P Parameter: Treatment Value: 100uM ABA vs. No Treatment
  misc_feature: MA Experiment ID: 20000180 Result: Up-regulated in Transcription
  misc_feature: MA Experiment 20000180 PARAMETER Experiment Name: At_Germinating_Seeds_P Parameter: Age (hr) Value: 24 vs. 0
  misc_feature: MA Experiment 20000180 PARAMETER Experiment Name: At_Germinating_Seeds_P Parameter: Tissue Value: Germinating Seeds
  misc_feature: MA Experiment ID: 20000182 Result: Up-regulated in Transcription
  misc_feature: MA Experiment 20000182 PARAMETER Experiment Name: At_2mM_SA_P Parameter: Age (day) Value: 14
  misc_feature: MA Experiment 20000182 PARAMETER Experiment Name: At_2mM_SA_P Parameter: Organism Value: A. thaliana
  misc_feature: MA Experiment 20000182 PARAMETER Experiment Name: At_2mM_SA_P Parameter: Plant Line Value: WS
  misc_feature: MA Experiment 20000182 PARAMETER Experiment Name: At_2mM_SA_P Parameter: Timepoint (hr) Value: 6
  misc_feature: MA Experiment 20000182 PARAMETER Experiment Name: At_2mM_SA_P Parameter: Tissue Value: Aerial
  misc_feature: MA Experiment 20000182 PARAMETER Experiment Name: At_2mM_SA_P Parameter: Treatment Value: 2mM SA vs. No Treatment
  misc_feature: MA Experiment ID: 20000184 Result: Down-regulated in Transcription
  misc_feature: MA Experiment 20000184 PARAMETER Experiment Name: At_Shoots__P Parameter: Age (day) Value: 7
  misc_feature: MA Experiment 20000184 PARAMETER Experiment Name: At_Shoots__P Parameter: Tissue Value: Shoots vs. Whole Plant
  misc_feature: MA Experiment ID: 20000211 Result: Up-regulated in Transcription
  misc_feature: MA Experiment 20000211 PARAMETER Experiment Name: At_0.001percent_MeJA__P Parameter: Age (day) Value: 14
  misc_feature: MA Experiment 20000211 PARAMETER Experiment Name: At_0.001percent_MeJA__P Parameter: Organism Value: A. thaliana
  misc_feature: MA Experiment 20000211 PARAMETER Experiment Name: At_0.001percent_MeJA__P Parameter: Plant Line Value: WS
  misc_feature: MA Experiment 20000211 PARAMETER Experiment Name: At_0.001percent_MeJA__P Parameter: Timepoint (hr) Value: 1
  misc_feature: MA Experiment 20000211 PARAMETER Experiment Name: At_0.001percent_MeJA__P Parameter: Tissue Value: Aerial
  misc_feature: MA Experiment 20000211 PARAMETER Experiment Name: At_0.001percent_MeJA__P Parameter: Treatment Value: 0.001percent MeJA vs. No Treatment
  misc_feature: MA Experiment ID: 20000234 Result: Down-regulated in Transcription
  misc_feature: MA Experiment 20000234 PARAMETER Experiment Name: At_Siliques_P Parameter: Age (day) Value: 21
  misc_feature: MA Experiment 20000234 PARAMETER Experiment Name: At_Siliques_P Parameter: Organism Value: A. thaliana
  misc_feature: MA Experiment 20000234 PARAMETER Experiment Name: At_Siliques_P Parameter: Plant Line Value: WS
  misc_feature: MA Experiment 20000234 PARAMETER Experiment Name: At_Siliques_P Parameter: Tissue Value: Less Than 5mm Siliques vs. Whole Plant
  misc_feature: MA Experiment ID: 20000235 Result: Down-regulated in Transcription
  misc_feature: MA Experiment 20000235 PARAMETER Experiment Name: At_Siliques_P Parameter: Age (day) Value: 21
  misc_feature: MA Experiment 20000235 PARAMETER Experiment Name: At_Siliques_P Parameter: Organism Value: A. thaliana
  misc_feature: MA Experiment 20000235 PARAMETER Experiment Name: At_Siliques_P Parameter: Plant Line Value: WS
  misc_feature: MA Experiment 20000235 PARAMETER Experiment Name: At_Siliques_P Parameter: Tissue Value: 5-10mm Siliques vs. Whole Plant
  misc_feature: MA Experiment ID: 20000436 Result: Up-regulated in Transcription
  misc_feature: MA Experiment 20000436 PARAMETER Experiment Name: At_Drought_P Parameter: Age (day) Value: 7
  misc_feature: MA Experiment 20000436 PARAMETER Experiment Name: At_Drought_P Parameter: Organism Value: A. thaliana
  misc_feature: MA Experiment 20000436 PARAMETER Experiment Name: At_Drought_P Parameter: Plant Line Value: WS
  misc_feature: MA Experiment 20000436 PARAMETER Experiment Name: At_Drought_P Parameter: Timepoint (hr) Value: 12
  misc_feature: MA Experiment 20000436 PARAMETER Experiment Name: At_Drought_P Parameter: Tissue Value: Whole Plant
  misc_feature: MA Experiment 20000436 PARAMETER Experiment Name: At_Drought_P Parameter: Treatment Value: Drought vs. No Drought
  misc_feature: MA Experiment ID: 20000437 Result: Up-regulated in Transcription
  misc_feature: MA Experiment 20000437 PARAMETER Experiment Name: At_Drought_P Parameter: Age (day) Value: 8
  misc_feature: MA Experiment 20000437 PARAMETER Experiment Name: At_Drought_P Parameter: Organism Value: A. thaliana
  misc_feature: MA Experiment 20000437 PARAMETER Experiment Name: At_Drought_P Parameter: Plant Line Value: WS
  misc_feature: MA Experiment 20000437 PARAMETER Experiment Name: At_Drought_P Parameter: Timepoint (hr) Value: 24
  misc_feature: MA Experiment 20000437 PARAMETER Experiment Name: At_Drought_P Parameter: Tissue Value: Whole Plant
  misc_feature: MA Experiment 20000437 PARAMETER Experiment Name: At_Drought_P Parameter: Treatment Value: Drought vs. No Drought
  misc_feature: MA Experiment ID: 20000438 Result: Down-regulated in Transcription
  misc_feature: MA Experiment 20000438 PARAMETER Experiment Name: At_Shoots__P Parameter: Age (day) Value: 14
  misc_feature: MA Experiment 20000438 PARAMETER Experiment Name: At_Shoots__P Parameter: Tissue Value: Shoots vs. Whole Plant
  misc_feature: MA Experiment ID: 20000453 Result: Up-regulated in Transcription
  misc_feature: MA Experiment 20000453 PARAMETER Experiment Name: At_100uM_ABA_P Parameter: Age (day) Value: 15
  misc_feature: MA Experiment 20000453 PARAMETER Experiment Name: At_100uM_ABA_P Parameter: Organism Value: A. thaliana
  misc_feature: MA Experiment 20000453 PARAMETER Experiment Name: At_100uM_ABA_P Parameter: Plant Line Value: WS
  misc_feature: MA Experiment 20000453 PARAMETER Experiment Name: At_100uM_ABA_P Parameter: Timepoint (hr) Value: 24
  misc_feature: MA Experiment 20000453 PARAMETER Experiment Name: At_100uM_ABA_P Parameter: Tissue Value: Aerial
  misc_feature: MA Experiment 20000453 PARAMETER Experiment Name: At_100uM_ABA_P Parameter: Treatment Value: 100uM ABA vs. No Treatment
  misc_feature: MA Experiment ID: 20000495 Result: Down-regulated in Transcription
  misc_feature: MA Experiment 20000495 PARAMETER Experiment Name: At_Guard_Cells_P Parameter: Harvest Date Value: 8/2/2002
  misc_feature: MA Experiment 20000495 PARAMETER Experiment Name: At_Guard_Cells_P Parameter: Organism Value: A. thaliana
  misc_feature: MA Experiment 20000495 PARAMETER Experiment Name: At_Guard_Cells_P Parameter: Tissue Value: Guard Cells vs. Leaves
  misc_feature: MA Experiment ID: 20001247 Result: Up-regulated in Transcription
  misc_feature: MA Experiment 20001247 PARAMETER Experiment Name: At_Far-red-induction_P Parameter: Age (day) Value: 7
  misc_feature: MA Experiment 20001247 PARAMETER Experiment Name: At_Far-red-induction_P Parameter: Light Value: Far-red vs. White
  misc_feature: MA Experiment 20001247 PARAMETER Experiment Name: At_Far-red-induction_P Parameter: Organism Value: A. thaliana
  misc_feature: MA Experiment 20001247 PARAMETER Experiment Name: At_Far-red-induction_P Parameter: Plant Line Value: Columbia
  misc_feature: MA Experiment 20001247 PARAMETER Experiment Name: At_Far-red-induction_P Parameter: Timepoint (hr) Value: 1
  misc_feature: MA Experiment 20001247 PARAMETER Experiment Name: At_Far-red-induction_P Parameter: Tissue Value: Whole Plant
  misc_feature: MA Experiment ID: 20001248 Result: Up-regulated in Transcription
  misc_feature: MA Experiment 20001248 PARAMETER Experiment Name: At_Far-red-induction_P Parameter: Age (day) Value: 7
  misc_feature: MA Experiment 20001248 PARAMETER Experiment Name: At_Far-red-induction_P Parameter: Light Value: Far-red vs. White
  misc_feature: MA Experiment 20001248 PARAMETER Experiment Name: At_Far-red-induction_P Parameter: Organism Value: A. thaliana
  misc_feature: MA Experiment 20001248 PARAMETER Experiment Name: At_Far-red-induction_P Parameter: Plant Line Value: Columbia
  misc_feature: MA Experiment 20001248 PARAMETER Experiment Name: At_Far-red-induction_P Parameter: Timepoint (hr) Value: 4
  misc_feature: MA Experiment 20001248 PARAMETER Experiment Name: At_Far-red-induction_P Parameter: Tissue Value: Whole Plant
  misc_feature: MA Experiment ID: 20001450 Result: Up-regulated in Transcription
  misc_feature: MA Experiment 20001450 PARAMETER Experiment Name: At_Far-red-induction_P Parameter: Age (day) Value: 7
  misc_feature: MA Experiment 20001450 PARAMETER Experiment Name: At_Far-red-induction_P Parameter: Light Value: Far-red vs. White
  misc_feature: MA Experiment 20001450 PARAMETER Experiment Name: At_Far-red-induction_P Parameter: Organism Value: A. thaliana
  misc_feature: MA Experiment 20001450 PARAMETER Experiment Name: At_Far-red-induction_P Parameter: Plant Line Value: Columbia
  misc_feature: MA Experiment 20001450 PARAMETER Experiment Name: At_Far-red-induction_P Parameter: Timepoint (hr) Value: 8
  misc_feature: MA Experiment 20001450 PARAMETER Experiment Name: At_Far-red-induction_P Parameter: Tissue Value: Whole Plant
  misc_feature: MA Experiment ID: 20001451 Result: Up-regulated in Transcription
  misc_feature: MA Experiment 20001451 PARAMETER Experiment Name: At_Far-red-induction_P Parameter: Age (day) Value: 7
  misc_feature: MA Experiment 20001451 PARAMETER Experiment Name: At_Far-red-induction_P Parameter: Light Value: Far-red vs. White
  misc_feature: MA Experiment 20001451 PARAMETER Experiment Name: At_Far-red-induction_P Parameter: Organism Value: A. thaliana
  misc_feature: MA Experiment 20001451 PARAMETER Experiment Name: At_Far-red-induction_P Parameter: Plant Line Value: Columbia
  misc_feature: MA Experiment 20001451 PARAMETER Experiment Name: At_Far-red-induction_P Parameter: Timepoint (hr) Value: 24
  misc_feature: MA Experiment 20001451 PARAMETER Experiment Name: At_Far-red-induction_P Parameter: Tissue Value: Whole Plant
  misc_feature: MA Experiment ID: 20001905 Result: Up-regulated in Transcription
  misc_feature: MA Experiment 20001905 PARAMETER Experiment Name: At_Drought_Reproduction_P Parameter: Age (day) Value: 40
  misc_feature: MA Experiment 20001905 PARAMETER Experiment Name: At_Drought_Reproduction_P Parameter: Organism Value: A. thaliana
  misc_feature: MA Experiment 20001905 PARAMETER Experiment Name: At_Drought_Reproduction_P Parameter: Plant Line Value: WS
  misc_feature: MA Experiment 20001905 PARAMETER Experiment Name: At_Drought_Reproduction_P Parameter: Timepoint (day) Value: 10
  misc_feature: MA Experiment 20001905 PARAMETER Experiment Name: At_Drought_Reproduction_P Parameter: Tissue Value: Rosettes
  misc_feature: MA Experiment 20001905 PARAMETER Experiment Name: At_Drought_Reproduction_P Parameter: Treatment Value: Drought vs. No Drought
  misc_feature: MA Experiment ID: 20001906 Result: Down-regulated in Transcription
  misc_feature: MA Experiment 20001906 PARAMETER Experiment Name: At_Drought_Reproduction_P Parameter: Age (day) Value: 35
  misc_feature: MA Experiment 20001906 PARAMETER Experiment Name: At_Drought_Reproduction_P Parameter: Organism Value: A. thaliana
  misc_feature: MA Experiment 20001906 PARAMETER Experiment Name: At_Drought_Reproduction_P Parameter: Plant Line Value: WS
  misc_feature: MA Experiment 20001906 PARAMETER Experiment Name: At_Drought_Reproduction_P Parameter: Timepoint (day) Value: 5
  misc_feature: MA Experiment 20001906 PARAMETER Experiment Name: At_Drought_Reproduction_P Parameter: Tissue Value: Siliques
  misc_feature: MA Experiment 20001906 PARAMETER Experiment Name: At_Drought_Reproduction_P Parameter: Treatment Value: Drought vs. No Drought
  misc_feature: MA Experiment ID: 20001908 Result: Down-regulated in Transcription
  misc_feature: MA Experiment 20001908 PARAMETER Experiment Name: At_Drought_Reproduction_P Parameter: Age (day) Value: 40
  misc_feature: MA Experiment 20001908 PARAMETER Experiment Name: At_Drought_Reproduction_P Parameter: Organism Value: A. thaliana
  misc_feature: MA Experiment 20001908 PARAMETER Experiment Name: At_Drought_Reproduction_P Parameter: Plant Line Value: WS
  misc_feature: MA Experiment 20001908 PARAMETER Experiment Name: At_Drought_Reproduction_P Parameter: Timepoint (day) Value: 10
  misc_feature: MA Experiment 20001908 PARAMETER Experiment Name: At_Drought_Reproduction_P Parameter: Tissue Value: Siliques
  misc_feature: MA Experiment 20001908 PARAMETER Experiment Name: At_Drought_Reproduction_P Parameter: Treatment Value: Drought vs. No Drought
attccataaaaagtaaattcacaacaaaaccaaaaaaaaaaaaagagaagaagaattagcttacgtgttcatcacatctgcattacgcgcaaacgaaacagattcaaattctccggcgaagttttcttattcatcaatcaatctctggattcatcaatcatgccagagatcgagattgccgccggcagcggcgacaacaacgacgccttattcggtaaatatgagctcggaaagcttctcggatgcggcgcattcgccaaagtcttccacgcacgtgatcgtcgtaccggccaaagcgtcgccgtgaaaatcctcaacaagaaaaaactcctcacaaatccagctctagccaacaacatcaaacgcgagatctcaatcatgagaagattatctcatccaaacatcgtcaagctccacgaagtaatggcgacaaaatcaaagatcttcttcgcaatggagtttgttaaaggaggagaactattcaacaaaatctcaaaacatggacgtcttagcgaagatttaagccggagatatttccagcaactgatctccgccgttggttattgccacgctcgcggtgtttaccaccgcgatctcaaaccagagaatctattaatagacgaaaacggaaacttaaaagtttccgatttcggtctaagcgcgttaacggatcagatccgacccgatgggttgttacataccttgtgtggtactccggcgtacgttgcgccggagattctatctaaaaaaggatatgaaggtgctaaagttgatgtatggtcttgtggaatcgtcttgttcgttctcgtcgccggttatttaccgtttaacgatccgaatgtgatgaatatgtataagaagatttataaaggagagtatcgttttcctcgttggatgtctccagatctgaaacgattcgtttctcgtcttttagatattaatcctgagactagaatcaccattgatgagattttgaaagatccttggtttgttagaggaggttttaaacagatcaagttccacgatgacgagatcgaagatcagaaagtggaatcgtcactagaagctgtgaagagtttaaacgcgtttgatttgatttcttactcgtcgggattggatttgtcgggattgtttgctggttgtagtaattcgagtggtgaatcggagaggtttttatcggaaaagtcgccggagatgttggcggaggaagtggaggggtttgcgagagaggagaatctgaggatgaagaagaagaaggaggaagagtatgggtttgagatggaggggcaaaatgggaaatttggtatcgggatttgtatttcgcggttgaatgatttgcttgtggtggtggaggcacggcggagaggtggtgatggtgattgttataaggagatgtggaatggtaaactcagggttcaacttattcgcgtttgcgatcagacgtcgtcaacaaacgcggctatttaaaagaacgctatgaagttttctaccgtgctttcaattttaaaacgccaatcgcgtttcgttggttggatttggtttctactacttttgtttcggaattaaaaacagagaaaaaataataaaaattaatgtatgtatttaaatactgtaccaaattgtaggtatctattttgtgc

SEQ ID NO: 84668 - protein, 435 aa, Arabidopsis thaliana; identical to SEQ ID NO: 40184
  peptide (1)..(435): Ceres Seq. ID no. 12676429
  misc_feature (21)..(277): Pfam Name: Protein kinase domain Pfam Description: Protein kinase domain
  misc_feature (1)..(435): Homolog of NCBI NO: 15227739 NR Description: putative protein kinase; protein id: At2g30360.1, by cDNA: gi_13448034, supported by cDNA: gi_13877672, supported cDNA: gi_16226429 [Arabidopsis thaliana] >gi|25387037|pir||E84707
  misc_feature (1)..(371): Homolog of NCBI NO: 16226430 NR Description: At2g30360/T9D9.17 [Arabidopsis thaliana]
  misc_feature (17)..(422): Homolog of NCBI NO: 30013673 NR Description: Avr9/Cf-9 rapidly elicited protein 216 [Nicotiana
  misc_feature (17)..(428): Homolog of NCBI NO: 15241067 NR Description: putative protein; protein id: At5g01820.1, by cDNA: gi_13249126, supported by cDNA: gi_13430553, supported
  misc_feature (17)..(306): Homolog of NCBI NO: 15233981 NR Description: putative protein kinase; protein id: At4g18700.1, by cDNA: gi_13249122, supported by cDNA: gi_13448040, supported cDNA: gi_16648898 [Arabidopsis thaliana] >gi|7446437|pir||T04862
  misc_feature (292)..(421): Homolog of NCBI NO: 15233981 NR Description: putative protein kinase; protein id: At4g18700.1, by cDNA: gi_13249122, supported by cDNA: gi_13448040, supported cDNA: gi_16648898 [Arabidopsis thaliana] >gi|7446437|pir||T04862
  misc_feature (1)..(300): Homolog of NCBI NO: 15218854 NR Description: protein kinase PK4, putative; protein id: supported by cDNA: gi_14334387 [Arabidopsis thaliana]
  misc_feature (12)..(292): Homolog of NCBI NO: 27549573 NR Description: calcineurin B-like-interacting protein kinase
  misc_feature (289)..(421): Homolog of NCBI NO: 27549573 NR Description: calcineurin B-like-interacting protein kinase
  misc_feature (289)..(421): Homolog of NCBI NO: 15218854 NR Description: protein kinase PK4, putative; protein id: supported by cDNA: gi_14334387 [Arabidopsis thaliana]

SEQ ID NO: 84669 - protein, 362 aa, Arabidopsis thaliana; identical to SEQ ID NO: 40185
  peptide (1)..(362): Ceres Seq. ID no. 12676430
  misc_feature (1)..(204): Pfam Name: Protein kinase domain Pfam Description: Protein kinase domain
  misc_feature (1)..(362): Homolog of NCBI NO: 15227739 NR Description: putative protein kinase; protein id: At2g30360.1, by cDNA: gi_13448034, supported by cDNA: gi_13877672, supported cDNA: gi_16226429 [Arabidopsis thaliana] >gi|25387037|pir||E84707
  misc_feature (1)..(298): Homolog of NCBI NO: 16226430 NR Description: At2g30360/T9D9.17 [Arabidopsis thaliana]
  misc_feature (1)..(349): Homolog of NCBI NO: 30013673 NR Description: Avr9/Cf-9 rapidly elicited protein 216 [Nicotiana
  misc_feature (1)..(355): Homolog of NCBI NO: 15241067 NR Description: putative protein; protein id: At5g01820.1, by cDNA: gi_13249126, supported by cDNA: gi_13430553, supported
  misc_feature (1)..(233): Homolog of NCBI NO: 15233981 NR Description: putative protein kinase; protein id: At4g18700.1, by cDNA: gi_13249122, supported by cDNA: gi_13448040, supported cDNA: gi_16648898 [Arabidopsis thaliana] >gi|7446437|pir||T04862
  misc_feature (219)..(348): Homolog of NCBI NO: 15233981 NR Description: putative protein kinase; protein id: At4g18700.1, by cDNA: gi_13249122, supported by cDNA: gi_13448040, supported cDNA: gi_16648898 [Arabidopsis thaliana] >gi|7446437|pir||T04862
  misc_feature (1)..(227): Homolog of NCBI NO: 15218854 NR Description: protein kinase PK4, putative; protein id: supported by cDNA: gi_14334387 [Arabidopsis thaliana]
  misc_feature (1)..(219): Homolog of NCBI NO: 27549573 NR Description: calcineurin B-like-interacting protein kinase
  misc_feature (216)..(348): Homolog of NCBI NO: 27549573 NR Description: calcineurin B-like-interacting protein kinase
  misc_feature (216)..(348): Homolog of NCBI NO: 15218854 NR Description: protein kinase PK4, putative; protein id: supported by cDNA: gi_14334387 [Arabidopsis thaliana]

SEQ ID NO: 84670 - protein, 347 aa, Arabidopsis thaliana; identical to SEQ ID NO: 40186
  peptide (1)..(347): Ceres Seq. ID no. 12676431
  misc_feature (1)..(189): Pfam Name: Protein kinase domain Pfam Description: Protein kinase domain
  misc_feature (1)..(347): Homolog of NCBI NO: 15227739 NR Description: putative protein kinase; protein id: At2g30360.1, by cDNA: gi_13448034, supported by cDNA: gi_13877672, supported cDNA: gi_16226429 [Arabidopsis thaliana] >gi|25387037|pir||E84707
  misc_feature (1)..(283): Homolog of NCBI NO: 16226430 NR Description: At2g30360/T9D9.17 [Arabidopsis thaliana]
  misc_feature (1)..(334): Homolog of NCBI NO: 30013673 NR Description: Avr9/Cf-9 rapidly elicited protein 216 [Nicotiana
  misc_feature (1)..(340): Homolog of NCBI NO: 15241067 NR Description: putative protein; protein id: At5g01820.1, by cDNA: gi_13249126, supported by cDNA: gi_13430553, supported
  misc_feature (1)..(218): Homolog of NCBI NO: 15233981 NR Description: putative protein kinase; protein id: At4g18700.1, by cDNA: gi_13249122, supported by cDNA: gi_13448040, supported cDNA: gi_16648898 [Arabidopsis thaliana] >gi|7446437|pir||T04862
  misc_feature (204)..(333): Homolog of NCBI NO: 15233981 NR Description: putative protein kinase; protein id: At4g18700.1, by cDNA: gi_13249122, supported by cDNA: gi_13448040, supported cDNA: gi_16648898 [Arabidopsis thaliana] >gi|7446437|pir||T04862
  misc_feature (1)..(212): Homolog of NCBI NO: 15218854 NR Description: protein kinase PK4, putative; protein id: supported by cDNA: gi_14334387 [Arabidopsis thaliana]
  misc_feature (1)..(204): Homolog of NCBI NO: 27549573 NR Description: calcineurin B-like-interacting protein kinase
  misc_feature (201)..(333): Homolog of NCBI NO: 27549573 NR Description: calcineurin B-like-interacting protein kinase
  misc_feature (201)..(333): Homolog of NCBI NO: 15218854 NR Description: protein kinase PK4, putative; protein id: supported by cDNA: gi_14334387 [Arabidopsis thaliana]

SEQ ID NO: 84671 - DNA, 1761 bp, Arabidopsis thaliana
  misc_feature (1)..(1761): Ceres Seq. ID no. 12676432
  misc_feature: MA Experiment ID: 20000173 Result: Down-regulated in Transcription
  misc_feature: MA Experiment 20000173 PARAMETER Experiment Name: At_42deg_Heat_P Parameter: Age (day) Value: 14
  misc_feature: MA Experiment 20000173 PARAMETER Experiment Name: At_42deg_Heat_P Parameter: Organism Value: A. thaliana
  misc_feature: MA Experiment 20000173 PARAMETER Experiment Name: At_42deg_Heat_P Parameter: Plant Line Value: WS
  misc_feature: MA Experiment 20000173 PARAMETER Experiment Name: At_42deg_Heat_P Parameter: Temperature (deg C) Value: 42 vs. 22
  misc_feature: MA Experiment 20000173 PARAMETER Experiment Name: At_42deg_Heat_P Parameter: Timepoint (hr) Value: 6
  misc_feature: MA Experiment 20000173 PARAMETER Experiment Name: At_42deg_Heat_P Parameter: Tissue Value: Aerial
  misc_feature: MA Experiment ID: 20000234 Result: Down-regulated in Transcription
  misc_feature: MA Experiment 20000234 PARAMETER Experiment Name: At_Siliques_P Parameter: Age (day) Value: 21
  misc_feature: MA Experiment 20000234 PARAMETER Experiment Name: At_Siliques_P Parameter: Organism Value: A. thaliana
  misc_feature: MA Experiment 20000234 PARAMETER Experiment Name: At_Siliques_P Parameter: Plant Line Value: WS
  misc_feature: MA Experiment 20000234 PARAMETER Experiment Name: At_Siliques_P Parameter: Tissue Value: Less Than 5mm Siliques vs. Whole Plant
  misc_feature: MA Experiment ID: 20000264 Result: Down-regulated in Transcription
  misc_feature: MA Experiment 20000264 PARAMETER Experiment Name: At_Open_Flower_P Parameter: Age (day) Value: 21
  misc_feature: MA Experiment 20000264 PARAMETER Experiment Name: At_Open_Flower_P Parameter: Plant Line Value: WS
  misc_feature: MA Experiment 20000264 PARAMETER Experiment Name: At_Open_Flower_P Parameter: Tissue Value: Open Flower vs. Whole Plant
  misc_feature: MA Experiment ID: 20000265 Result: Down-regulated in Transcription
  misc_feature: MA Experiment 20000265 PARAMETER Experiment Name: At_Open_Flower_P Parameter: Age (day) Value: 21
  misc_feature: MA Experiment 20000265 PARAMETER Experiment Name: At_Open_Flower_P Parameter: Plant Line Value: WS
  misc_feature: MA Experiment 20000265 PARAMETER Experiment Name: At_Open_Flower_P Parameter: Tissue Value: Closed Flower vs. Whole Plant
  misc_feature: MA Experiment ID: 20000286 Result: Down-regulated in Transcription
  misc_feature: MA Experiment 20000286 PARAMETER Experiment Name: At_Open_Flower_P Parameter: Age (day) Value: 21
  misc_feature: MA Experiment 20000286 PARAMETER Experiment Name: At_Open_Flower_P Parameter: Plant Line Value: WS
  misc_feature: MA Experiment 20000286 PARAMETER Experiment Name: At_Open_Flower_P Parameter: Tissue Value: Half Open vs. Whole Plant
  misc_feature: MA Experiment ID: 20000495 Result: Down-regulated in Transcription
  misc_feature: MA Experiment 20000495 PARAMETER Experiment Name: At_Guard_Cells_P Parameter: Harvest Date Value: 8/2/2002
  misc_feature: MA Experiment 20000495 PARAMETER Experiment Name: At_Guard_Cells_P Parameter: Organism Value: A. thaliana
  misc_feature: MA Experiment 20000495 PARAMETER Experiment Name: At_Guard_Cells_P Parameter: Tissue Value: Guard Cells vs. Leaves
  misc_feature: MA Experiment ID: 20001556 Result: Down-regulated in Transcription
  misc_feature: MA Experiment 20001556 PARAMETER Experiment Name: At_Drought_Soil_Dry_P Parameter: Age (day) Value: 26
  misc_feature: MA Experiment 20001556 PARAMETER Experiment Name: At_Drought_Soil_Dry_P Parameter: Organism Value: A. thaliana
  misc_feature: MA Experiment 20001556 PARAMETER Experiment Name: At_Drought_Soil_Dry_P Parameter: Plant Line Value: WS
  misc_feature: MA Experiment 20001556 PARAMETER Experiment Name: At_Drought_Soil_Dry_P Parameter: Post Timepoint (hr) Value: None
  misc_feature: MA Experiment 20001556 PARAMETER Experiment Name: At_Drought_Soil_Dry_P Parameter: Post-Treatment Value: None
  misc_feature: MA Experiment 20001556 PARAMETER Experiment Name: At_Drought_Soil_Dry_P Parameter: Timepoint (day) Value: 12
  misc_feature: MA Experiment 20001556 PARAMETER Experiment Name: At_Drought_Soil_Dry_P Parameter: Treatment Value: Drought vs. No Drought
  misc_feature: MA Experiment ID: 20001558 Result: Down-regulated in Transcription
  misc_feature: MA Experiment 20001558 PARAMETER Experiment Name: At_Drought_Soil_Dry_P Parameter: Age (day) Value: 27
  misc_feature: MA Experiment 20001558 PARAMETER Experiment Name: At_Drought_Soil_Dry_P Parameter: Organism Value: A. thaliana
  misc_feature: MA Experiment 20001558 PARAMETER Experiment Name: At_Drought_Soil_Dry_P Parameter: Plant Line Value: WS
  misc_feature: MA Experiment 20001558 PARAMETER Experiment Name: At_Drought_Soil_Dry_P Parameter: Post Timepoint (hr) Value: 6
  misc_feature: MA Experiment 20001558 PARAMETER Experiment Name: At_Drought_Soil_Dry_P Parameter: Post-Treatment Value: Re-Water vs. No Drought
  misc_feature: MA Experiment 20001558 PARAMETER Experiment Name: At_Drought_Soil_Dry_P Parameter: Timepoint (day) Value: 13
  misc_feature: MA Experiment 20001558 PARAMETER Experiment Name: At_Drought_Soil_Dry_P Parameter: Treatment Value: Drought vs. No Drought
  misc_feature: MA Experiment ID: 20001560 Result: Down-regulated in Transcription
  misc_feature: MA Experiment 20001560 PARAMETER Experiment Name: At_Drought_Soil_Dry_P Parameter: Age (day) Value: 28
  misc_feature: MA Experiment 20001560 PARAMETER Experiment Name: At_Drought_Soil_Dry_P Parameter: Organism Value: A. thaliana
  misc_feature: MA Experiment 20001560 PARAMETER Experiment Name: At_Drought_Soil_Dry_P Parameter: Plant Line Value: WS
  misc_feature: MA Experiment 20001560 PARAMETER Experiment Name: At_Drought_Soil_Dry_P Parameter: Post Timepoint (hr) Value: None
  misc_feature: MA Experiment 20001560 PARAMETER Experiment Name: At_Drought_Soil_Dry_P Parameter: Post-Treatment Value: None
  misc_feature: MA Experiment 20001560 PARAMETER Experiment Name: At_Drought_Soil_Dry_P Parameter: Timepoint (day) Value: 14
  misc_feature: MA Experiment 20001560 PARAMETER Experiment Name: At_Drought_Soil_Dry_P Parameter: Treatment Value: Drought vs. No Drought
ctctctactcgccaagaagtttcctttcctttgattgcacaactaatctcaaactaaaagatcttctctttaggcatacccagatctttctctctctaaagtctccacctttcacggttttttgcttctcacctgaatccaatcaatctcgccggagtgaattcaccttcctccggttgactcgtcggacttagtccgacctttcaattcgtagattctgtttacaattcactgatcgtttgattagaaatgggttacttgttcttctaagtctctctttagctgaaagtttgttgctttacgactcttcgatttacccttacttgttcaagttcttcatcaaattcgtagttatggcgataagaatcactttcacttactccacccatgttgctcggaatctcgtcgggacccgtgttggtcccggtggttactgctttgaatccttggttcgtcctagattcttctcccacaagcgtgatttcgatagatctcctcggaatcgacctgcatcgatgtatggtagcatcgcgagggagctcatcggagaaggaagtcaaagcccgcttgtgatgggtttgatctcgatattgaagtcaacgacgggtcatgagtcgtcaacgatgaatgttctgggggtttcatctttcaaggcttcttctattattccgtttcttcaagggtcgaaatggattaagaatccaccggtgattgatgacgtggataaaggaggaacagtttgtgatgatgatgatgataaggaatcgaggaatggaggaagtggatgggttaataagcttttgagtgtttgttctgaggatgctaaggctgctttcacggcggttactgtttctatcctttttagatcagctcttgcggagccaaagtcgattccttcaacgtctatgtaccctaccttggacaagggtgatcgcgttatggcggagaaggtctcatactttttcaggaagccagaggtttcagatatagtaatcttcaaggctcctccaattttgctggaatatccggaatatggctacagttccaatgatgtattcataaaaaggatagtggcaagtgaaggtgactgggttgaagttcgtgatgggaagctctttgtgaatgacattgtgcaagaagaagattttgtcttagaaccaatgtcatatgaaatggaaccaatgtttgtccccaaaggttatgtctttgtccttggtgataaccgcaacaaaagctttgactctcataactggggtccacttccaatagagaacatcgttggaagatctgtgttccggtactggccaccgagcaaagtatcagacaccatataccacgaccaagctatcacaaggggacctgttgcagtttcatgacaaaagaaagttggatttttcttaggattaaagcacaagattgtgcaaaaccagtctggtcagaattgggtagacttggaattgaaactcaaaaccgttatgatatctgcagatacatactgtatcatcgttatggatcgcatctggttcttagctgatggtcgggaagccggagatgttacgtgtacaaaaggaatggaagatgcaaagaaaaggaaacgatttactgtgattgttatgtgtgaaaaccctggacaagatactgtagtaaagccataaaggcaactgttaaacaaaagtgtgattttttgttgttatgagtttgtactatagaatcgtgtaaaacctcctttgtgttgttgtatgtaaattgggatattgttat

SEQ ID NO: 84672 - protein, 340 aa, Arabidopsis thaliana
  peptide (1)..(340): Ceres Seq. ID no. 12676433
  misc_feature (146)..(310): Pfam Name: Signal peptidase I Pfam Description: Signal peptidase I
  misc_feature (1)..(340): Homolog of NCBI NO: 30684587 NR Description: signal peptidase I -related [Arabidopsis >gi|2769566|emb|CAA71502.1| chloroplast thylakoidal processing [Arabidopsis thaliana] >gi|22135950|gb|AAM91557.1| putative
  misc_feature (91)..(340): Homolog of NCBI NO: 25408074 NR Description: probable signal peptidase I [imported] - thaliana >gi|1946373|gb|AAB63091.1| putative signal peptidase I
  misc_feature (48)..(340): Homolog of NCBI NO: 15222236 NR Description: chloroplast thylakoidal processing peptidase, protein id: At1g06870.1, supported by cDNA: 15392. [Arabidopsis
  misc_feature (48)..(340): Homolog of NCBI NO: 21553622 NR Description: chloroplast thylakoidal processing peptidase,
  misc_feature (111)..(326): Homolog of NCBI NO: 9294054 NR Description: contains similarity to signal peptidase (leader
  misc_feature (111)..(326): Homolog of NCBI NO: 30687572 NR Description: chloroplast thylakoidal processing peptidase
  misc_feature (111)..(326): Homolog of NCBI NO: 25082936 NR Description: chloroplast thylakoidal processing peptidase,
  misc_feature (140)..(318): Homolog of NCBI NO: 23042815 NR Description: hypothetical protein [Trichodesmium erythraeum
  misc_feature (155)..(321): Homolog of NCBI NO: 16329254 NR Description: leader peptidase I [Synechocystis sp. PCC 6803]
  misc_feature (163)..(318): Homolog of NCBI NO: 22297948 NR Description: signal peptidase I [Thermosynechococcus elongatus >gi|22294126|dbj|BAC07957.1| signal peptidase I
MAIRITFTYSTHVARNLVGTRVGPGGYCFESLVRPRFFSHKRDFDRSPRNRPASMYGSIARELIGEGSQSPLVMGLISILKSTTGHESSTMNVLGVSSFKASSIIPFLQGSKWIKNPPVIDDVDKGGTVCDDDDDKESRNGGSGWVNKLLSVCSEDAKAAFTAVTVSILFRSALAEPKSIPSTSMYPTLDKGDRVMAEKVSYFFRKPEVSDIVIFKAPPILLEYPEYGYSSNDVFIKRIVASEGDWVEVRDGKLFVNDIVQEEDFVLEPMSYEMEPMFVPKGYVFVLGDNRNKSFDSHNWGPLPIENIVGRSVFRYWPPSKVSDTIYHDQAITRGPVAVS

SEQ ID NO: 84673 - protein, 286 aa, Arabidopsis thaliana
  peptide (1)..(286): Ceres Seq. ID no. 12676434
  misc_feature (92)..(256): Pfam Name: Signal peptidase I Pfam Description: Signal peptidase I
  misc_feature (1)..(286): Homolog of NCBI NO: 30684587 NR Description: signal peptidase I -related [Arabidopsis >gi|2769566|emb|CAA71502.1| chloroplast thylakoidal processing [Arabidopsis thaliana] >gi|22135950|gb|AAM91557.1| putative
  misc_feature (37)..(286): Homolog of NCBI NO: 25408074 NR Description: probable signal peptidase I [imported] - thaliana >gi|1946373|gb|AAB63091.1| putative signal peptidase I
  misc_feature (1)..(286): Homolog of NCBI NO: 15222236 NR Description: chloroplast thylakoidal processing peptidase, protein id: At1g06870.1, supported by cDNA: 15392. [Arabidopsis
  misc_feature (1)..(286): Homolog of NCBI NO: 21553622 NR Description: chloroplast thylakoidal processing peptidase,
  misc_feature (57)..(272): Homolog of NCBI NO: 9294054 NR Description: contains similarity to signal peptidase (leader
  misc_feature (57)..(272): Homolog of NCBI NO: 30687572 NR Description: chloroplast thylakoidal processing peptidase
  misc_feature (57)..(272): Homolog of NCBI NO: 25082936 NR Description: chloroplast thylakoidal processing peptidase,
  misc_feature (86)..(264): Homolog of NCBI NO: 23042815 NR Description: hypothetical protein [Trichodesmium erythraeum
  misc_feature (101)..(267): Homolog of NCBI NO: 16329254 NR Description: leader peptidase I [Synechocystis sp. PCC 6803]
  misc_feature (109)..(264): Homolog of NCBI NO: 22297948 NR Description: signal peptidase I [Thermosynechococcus elongatus >gi|22294126|dbj|BAC07957.1| signal peptidase I
MYGSIARELIGEGSQSPLVMGLISILKSTTGHESSTMNVLGVSSFKASSIIPFLQGSKWIKNPPVIDDVDKGGTVCDDDDDKESRNGGSGWVNKLLSVCSEDAKAAFTAVTVSILFRSALAEPKSIPSTSMYPTLDKGDRVMAEKVSYFFRKPEVSDIVIFKAPPILLEYPEYGYSSNDVFIKRIVASEGDWVEVRDGKLFVNDIVQEEDFVLEPMSYEMEPMFVPKGYVFVLGDNRNKSFDSHNWGPLPIENIVGRSVFRYWPPSKVSDTIYHDQAITRGPVAVS

SEQ ID NO: 84674 - protein, 267 aa, Arabidopsis thaliana
  peptide (1)..(267): Ceres Seq. ID no. 12676435
  misc_feature (73)..(237): Pfam Name: Signal peptidase I Pfam Description: Signal peptidase I
  misc_feature (1)..(267): Homolog of NCBI NO: 30684587 NR Description: signal peptidase I -related [Arabidopsis >gi|2769566|emb|CAA71502.1| chloroplast thylakoidal processing [Arabidopsis thaliana] >gi|22135950|gb|AAM91557.1| putative
  misc_feature (18)..(267): Homolog of NCBI NO: 25408074 NR Description: probable signal peptidase I [imported] - thaliana >gi|1946373|gb|AAB63091.1| putative signal peptidase I
  misc_feature (1)..(267): Homolog of NCBI NO: 15222236 NR Description: chloroplast thylakoidal processing peptidase, protein id: At1g06870.1, supported by cDNA: 15392. [Arabidopsis
  misc_feature (1)..(267): Homolog of NCBI NO: 21553622 NR Description: chloroplast thylakoidal processing peptidase,
  misc_feature (38)..(253): Homolog of NCBI NO: 9294054 NR Description: contains similarity to signal peptidase (leader
  misc_feature (38)..(253): Homolog of NCBI NO: 30687572 NR Description: chloroplast thylakoidal processing peptidase
  misc_feature (38)..(253): Homolog of NCBI NO: 25082936 NR Description: chloroplast thylakoidal processing peptidase,
  misc_feature (67)..(245): Homolog of NCBI NO: 23042815 NR Description: hypothetical protein [Trichodesmium erythraeum
  misc_feature (82)..(248): Homolog of NCBI NO: 16329254 NR Description: leader peptidase I [Synechocystis sp. PCC 6803]
  misc_feature (90)..(245): Homolog of NCBI NO: 22297948 NR Description: signal peptidase I [Thermosynechococcus elongatus >gi|22294126|dbj|BAC07957.1| signal peptidase I
MGLISILKSTTGHESSTMNVLGVSSFKASSIIPFLQGSKWIKNPPVIDDVDKGGTVCDDDDDKESRNGGSGWVNKLLSVCSEDAKAAFTAVTVSILFRSALAEPKSIPSTSMYPTLDKGDRVMAEKVSYFFRKPEVSDIVIFKAPPILLEYPEYGYSSNDVFIKRIVASEGDWVEVRDGKLFVNDIVQEEDFVLEPMSYEMEPMFVPKGYVFVLGDNRNKSFDSHNWGPLPIENIVGRSVFRYWPPSKVSDTIYHDQAITRGPVAVS

SEQ ID NO: 84675 - DNA, 1479 bp, Arabidopsis thaliana
  misc_feature (1)..(1479): Ceres Seq. ID no. 12676436
  misc_feature: MA Experiment ID: 20000173 Result: Down-regulated in Transcription
  misc_feature: MA Experiment 20000173 PARAMETER Experiment Name: At_42deg_Heat_P Parameter: Age (day) Value: 14
  misc_feature: MA Experiment 20000173 PARAMETER Experiment Name: At_42deg_Heat_P Parameter: Organism Value: A. thaliana
  misc_feature: MA Experiment 20000173 PARAMETER Experiment Name: At_42deg_Heat_P Parameter: Plant Line Value: WS
  misc_feature: MA Experiment 20000173 PARAMETER Experiment Name: At_42deg_Heat_P Parameter: Temperature (deg C) Value: 42 vs. 22
  misc_feature: MA Experiment 20000173 PARAMETER Experiment Name: At_42deg_Heat_P Parameter: Timepoint (hr) Value: 6
  misc_feature: MA Experiment 20000173 PARAMETER Experiment Name: At_42deg_Heat_P Parameter: Tissue Value: Aerial
  misc_feature: MA Experiment ID: 20000185 Result: Down-regulated in Transcription
  misc_feature: MA Experiment 20000185 PARAMETER Experiment Name: At_Roots__P Parameter: Age (day) Value: 7 vs. 21
  misc_feature: MA Experiment 20000185 PARAMETER Experiment Name: At_Roots__P Parameter: Organism Value: A. thaliana
  misc_feature: MA Experiment 20000185 PARAMETER Experiment Name: At_Roots__P Parameter: Tissue Value: Roots vs. Whole Plant
  misc_feature: MA Experiment ID: 20000234 Result: Down-regulated in Transcription
  misc_feature: MA Experiment 20000234 PARAMETER Experiment Name: At_Siliques_P Parameter: Age (day) Value: 21
  misc_feature: MA Experiment 20000234 PARAMETER Experiment Name: At_Siliques_P Parameter: Organism Value: A. thaliana
  misc_feature: MA Experiment 20000234 PARAMETER Experiment Name: At_Siliques_P Parameter: Plant Line Value: WS
  misc_feature: MA Experiment 20000234 PARAMETER Experiment Name: At_Siliques_P Parameter: Tissue Value: Less Than 5mm Siliques vs. Whole Plant
  misc_feature: MA Experiment ID: 20001905 Result: Down-regulated in Transcription
  misc_feature: MA Experiment 20001905 PARAMETER Experiment Name: At_Drought_Reproduction_P Parameter: Age (day) Value: 40
  misc_feature: MA Experiment 20001905 PARAMETER Experiment Name: At_Drought_Reproduction_P Parameter: Organism Value: A. thaliana
  misc_feature: MA Experiment 20001905 PARAMETER Experiment Name: At_Drought_Reproduction_P Parameter: Plant Line Value: WS
  misc_feature: MA Experiment 20001905 PARAMETER Experiment Name: At_Drought_Reproduction_P Parameter: Timepoint (day) Value: 10
  misc_feature: MA Experiment 20001905 PARAMETER Experiment Name: At_Drought_Reproduction_P Parameter: Tissue Value: Rosettes
  misc_feature: MA Experiment 20001905 PARAMETER Experiment Name: At_Drought_Reproduction_P Parameter: Treatment Value: Drought vs. No Drought
ggtctctcccattttctgttctcttttgtattctgagtgaaagttttgttttctgggggaaaaaattagggttcttagatggaggagatagaaggaacaaacagagcagctgttgagagttgtcatagagttcttaatcttttacatagatcacagcaacaagatcatgttggttttgaaaagaatttagtatctgaaactagagaagctgtgattaggttcaagagagttgggagtttgttaagcagtagtgttggtcatgctaggtttagaagagctaagaaacttcagagtcatgtctctcaaagtctcttacttgatccatgtcaacaaaggacaacagaagttccatcatcatcttctcagaaaacaccggtactccggtctggtttccaggaattgagcttgagacaaccttcagattcactcactttagggactcgctcttttagtttaaactcaaatgctaaagctcctctccttcagcttaatcagcagacaatgcctccttcgaattatcctactttgtttccagtacaacaacaacaacaacaacaacaacaacaacaacagcaggagcagcagcagcagcagcagcagcaacagcaacagtttcatgaacggttacaagctcaccatcttcatcagcaacagcagctacagaaacatcaagctgagcttatgcttaggaaatgcaatggtgggataagtttgagtttcgataactctagttgtactccaactatgtcatccactaggtcctttgtttcttcacttagcatagatggtagtgttgctaatatagagggaaagaactccttccattttggggttcctagttcaactgatcagaattcactacattctaagaggaaatgccccttgaaaggagatgaacatggaagcttaaaatgcgggagctctagccgatgccactgcgctaagaagaggaaacatcgggttaggagatcgattagagtaccggctataagtaacaaggttgcagatatccctcctgatgattattcatggcgaaaatatggtcagaagcccatcaagggctctccttatcccagaggatattacaaatgtagtagcatgagaggttgtccagcgaggaagcatgttgagagatgtttggaagatccggcaatgcttattgttacttatgaagcagagcataaccacccgaaattgccatctcaagctataacaacttaactctcgtttatctttgcggtccagcataaaccttctcatgtatgttgttctcttttgtgcgcgatgatcggctttggggttgctgcaatgttgtgatatatggatcggggtaagtgcttttgttggggtggatttgcttgtgagagtttgctgcaattgttggattttgagctatatatggggtaaatgtaggattggtcaagactctttttctgtttctcaagtttattggtcttaatgattaaaagtttaatggtt

SEQ ID NO: 84676 - protein, 380 aa, Arabidopsis thaliana; identical to SEQ ID NO: 75997
  peptide (1)..(380): Ceres Seq. ID no. 12676437
  misc_feature (312)..(372): Pfam Name: WRKY DNA -binding domain Pfam Description: WRKY DNA -binding domain
  misc_feature (1)..(380): Homolog of NCBI NO: 18402397 NR Description: WRKY family transcription factor; protein id: supported by cDNA: gi_13507098 [Arabidopsis thaliana]
  misc_feature (192)..(380): Homolog of NCBI NO: 18396971 NR Description: WRKY family transcription factor; protein id: supported by cDNA: gi_15384222, supported by cDNA: gi_15450756 thaliana] >gi|20978793|sp|Q9SR07|WR39_ARATH Probable
  misc_feature (1)..(81): Homolog of NCBI NO: 18396971 NR Description: WRKY family transcription factor; protein id: supported by cDNA: gi_15384222, supported by cDNA: gi_15450756 thaliana] >gi|20978793|sp|Q9SR07|WR39_ARATH Probable
  misc_feature (192)..(380): Homolog of NCBI NO: 15241875 NR Description: WRKY family transcription factor; protein id: supported by cDNA: gi_16798367, supported by cDNA: gi_17064167 thaliana] >gi|17064168|gb|AAL35291.1|AF442398_1 WRKY
  misc_feature (1)..(79): Homolog of NCBI NO: 15241875 NR Description: WRKY family transcription factor; protein id: supported by cDNA: gi_16798367, supported by cDNA: gi_17064167 thaliana] >gi|17064168|gb|AAL35291.1|AF442398_1 WRKY
  misc_feature (192)..(380): Homolog of NCBI NO: 29839595 NR Description: Probable WRKY transcription factor 74 (WRKY protein 74) >gi|16798368|gb|AAL29432.1|AF426255_1 WRKY
  misc_feature (1)..(79): Homolog of NCBI NO: 29839595 NR Description: Probable WRKY transcription factor 74 (WRKY protein 74) >gi|16798368|gb|AAL29432.1|AF426255_1 WRKY
  misc_feature (1)..(376): Homolog of NCBI NO: 11993901 NR Description: somatic embryogenesis related protein [Dactylis
  misc_feature (1)..(373): Homolog of NCBI NO: 40539044 NR Description: putative somatic embryogenesis related protein
  misc_feature (10)..(370): Homolog of NCBI NO: 34897192 NR Description: putative WRKY DNA-binding protein [Oryza sativa

SEQ ID NO: 84677 - protein, 239 aa, Arabidopsis thaliana; identical to SEQ ID NO: 75998
  peptide (1)..(239): Ceres Seq. ID no. 12676438
  misc_feature (171)..(231): Pfam Name: WRKY DNA -binding domain Pfam Description: WRKY DNA -binding domain
  misc_feature (1)..(239): Homolog of NCBI NO: 18402397 NR Description: WRKY family transcription factor; protein id: supported by cDNA: gi_13507098 [Arabidopsis thaliana]
  misc_feature (51)..(239): Homolog of NCBI NO: 18396971 NR Description: WRKY family transcription factor; protein id: supported by cDNA: gi_15384222, supported by cDNA: gi_15450756 thaliana] >gi|20978793|sp|Q9SR07|WR39_ARATH Probable
  misc_feature (51)..(239): Homolog of NCBI NO: 15241875 NR Description: WRKY family transcription factor; protein id: supported by cDNA: gi_16798367, supported by cDNA: gi_17064167 thaliana] >gi|17064168|gb|AAL35291.1|AF442398_1 WRKY
  misc_feature (51)..(239): Homolog of NCBI NO: 29839595 NR Description: Probable WRKY transcription factor 74 (WRKY protein 74) >gi|16798368|gb|AAL29432.1|AF426255_1 WRKY
  misc_feature (1)..(235): Homolog of NCBI NO: 11993901 NR Description: somatic embryogenesis related protein [Dactylis
  misc_feature (1)..(232): Homolog of NCBI NO: 40539044 NR Description: putative somatic embryogenesis related protein
  misc_feature (1)..(229): Homolog of NCBI NO: 34897192 NR Description: putative WRKY DNA-binding protein [Oryza sativa
  misc_feature (3)..(229): Homolog of NCBI NO: 10798760 NR Description: WRKY transcription factor Nt-SubD48 [Nicotiana
  misc_feature (63)..(239): Homolog of NCBI NO: 7488950 NR Description: DNA-binding protein WRKY3 - parsley
  misc_feature (70)..(239): Homolog of NCBI NO: 38346908 NR Description: OSJNBb0015N08.8 [Oryza sativa (japonica

SEQ ID NO: 84678 - DNA, 1768 bp, Arabidopsis thaliana
  misc_feature (1)..(1768): Ceres Seq. ID no. 12676443
  misc_feature: MA Experiment ID: 20000180 Result: Up-regulated in Transcription
  misc_feature: MA Experiment 20000180 PARAMETER Experiment Name: At_Germinating_Seeds_P Parameter: Age (hr) Value: 24 vs. 0
  misc_feature: MA Experiment 20000180 PARAMETER Experiment Name: At_Germinating_Seeds_P Parameter: Tissue Value: Germinating Seeds
  misc_feature: MA Experiment ID: 20000185 Result: Down-regulated in Transcription
  misc_feature: MA Experiment 20000185 PARAMETER Experiment Name: At_Roots__P Parameter: Age (day) Value: 7 vs. 21
  misc_feature: MA Experiment 20000185 PARAMETER Experiment Name: At_Roots__P Parameter: Organism Value: A. thaliana
  misc_feature: MA Experiment 20000185 PARAMETER Experiment Name: At_Roots__P Parameter: Tissue Value: Roots vs. Whole Plant
  misc_feature: MA Experiment ID: 20000439 Result: Down-regulated in Transcription
  misc_feature: MA Experiment 20000439 PARAMETER Experiment Name: At_Roots__P Parameter: Age (day) Value: 14 vs. 21
  misc_feature: MA Experiment 20000439 PARAMETER Experiment Name: At_Roots__P Parameter: Organism Value: A. thaliana
  misc_feature: MA Experiment 20000439 PARAMETER Experiment Name: At_Roots__P Parameter: Tissue Value: Roots vs. Whole Plant
  misc_feature: MA Experiment ID: 20001248 Result: Down-regulated in Transcription
  misc_feature: MA Experiment 20001248 PARAMETER Experiment Name: At_Far-red-induction_P Parameter: Age (day) Value: 7
  misc_feature: MA Experiment 20001248 PARAMETER Experiment Name: At_Far-red-induction_P Parameter: Light Value: Far-red vs. White
  misc_feature: MA Experiment 20001248 PARAMETER Experiment Name: At_Far-red-induction_P Parameter: Organism Value: A. thaliana
  misc_feature: MA Experiment 20001248 PARAMETER Experiment Name: At_Far-red-induction_P Parameter: Plant Line Value: Columbia
  misc_feature: MA Experiment 20001248 PARAMETER Experiment Name: At_Far-red-induction_P Parameter: Timepoint (hr) Value: 4
  misc_feature: MA Experiment 20001248 PARAMETER Experiment Name: At_Far-red-induction_P Parameter: Tissue Value: Whole Plant
  misc_feature: MA Experiment ID: 20001450 Result: Down-regulated in Transcription
  misc_feature: MA Experiment 20001450 PARAMETER Experiment Name: At_Far-red-induction_P Parameter: Age (day) Value: 7
  misc_feature: MA Experiment 20001450 PARAMETER Experiment Name: At_Far-red-induction_P Parameter: Light Value: Far-red vs. White
  misc_feature: MA Experiment 20001450 PARAMETER Experiment Name: At_Far-red-induction_P Parameter: Organism Value: A. thaliana
  misc_feature: MA Experiment 20001450 PARAMETER Experiment Name: At_Far-red-induction_P Parameter: Plant Line Value: Columbia
  misc_feature: MA Experiment 20001450 PARAMETER Experiment Name: At_Far-red-induction_P Parameter: Timepoint (hr) Value: 8
  misc_feature: MA Experiment 20001450 PARAMETER Experiment Name: At_Far-red-induction_P Parameter: Tissue Value: Whole Plant
aaatccaaatcgttgcgttaaggtttcttcaagtttcaatctttttgcaatgaattgcccagccatgactgcttctccttcttcttcctcttcttcttcctactcaacgtttcgtcctcctcctccactcttgccacaattgagtaacgattcacaaagatctgttgttatgcactgcacaagattaccctttgaagcatttgctgctacttcatcaaaccggcttcttgggaaacattcattgcctttgagagcagctttggttacttcgaaccctttaaacatttcatcttcctcagttatctctgatgccatttcatcttcctctgttatcactgatgatgccaaaattggtgtcttgttattaaaccttggaggtcctgagactttagatgatgtacaaccctttttgtttaacctcttcgccgacccggacattatacggttgccgccggtattccagtttcttcagaagccattagcacagtttatatcagtagcaagagcacccaaaagcaaggaaggatatgcatctattggtggaggttctcctcttcgccacataactgatgcacaggctgaagaattaagaaaatgcctttgggaaaaaaatgtaccagcaaaggtatatgttggtatgcggtattggcatccattcactgaggaagccattgaacagataaaaagagatggaattacaaaactagttgttctaccactttatcctcaattttctatatcaactagtggttcaagcctaagactcttggagagaatatttcgagaggacgagtatcttgttaacatgcaacatactgttataccatcgtggtatcagcgggagggatatataaaggcaatggcaaatctaatccaaagcgagttgggaaaatttggttctcctaatcagtgcacatggcgtgcctcttgcatatgtcgaagaagccggtgatccttacaaggcagagatggaagaatgtgttgatctaatcatggaggaattagacaagagaaagataactaatgcttacactcttgcttatcagagcagagttggaccagttgaatggctgaaaccatacactgaagaagccattactgaacttggtaaaaaaggtgttgaaaatcttctggctgtacccataagttttgtgagcgagcacattgaaactctggaggagatagatgttgagtataaagagttggctttgaagtctggtatcaaaaactgggggcgagtacctgctctaggaacagaacctatgtttatatctgacttggcagatgctgttgtggaaagtcttccatacgttggtgctatggctgtctcaaaccttgaagctcgacagtcgttagttccgctcgggagtgtagaagaattattagcaacgtatgattcacagagaagggagttaccagcaccggtgacaatgtgggaatggggatggacaaaaagtgcagaaacatggaacggaagagcagcaatgttagcggtgctagcactcttggtgctcgaagtcaccaccggaaaagggtttctgcatcagtggggcatcttgccttcattataataaagataacgtatagtctttttctctatgaaaacccaatccaagaatccaaatgtgagctttcacatgtggaataaggccagctatgttattatgctctcttcttctctgttgtagaaatgttgacatttaaatacttcatactgtatcttcataaaacattaaatgttgacattttaatcggcatgctttttcgc

SEQ ID NO: 84679 - protein, 316 aa, Arabidopsis thaliana
  peptide (1)..(316): Ceres Seq. ID no. 12676444
  misc_feature (116)..(303): Pfam Name: Ferrochelatase Pfam Description: Ferrochelatase
  misc_feature (17)..(303): Homolog of NCBI NO: 15227742 NR Description: putative ferrochelatase precusor; protein id: [Arabidopsis thaliana] >gi|3913871|sp|O04921|HMZ2_ARATH
  misc_feature (17)..(303): Homolog of NCBI NO: 2623990 NR Description: ferrochelatase [Arabidopsis thaliana]
  misc_feature (20)..(303): Homolog of NCBI NO: 15147828 NR Description: ferrochelatase [Nicotiana tabacum]
  misc_feature (16)..(303): Homolog of NCBI NO: 12082085 NR Description: ferrochelatase [Cucumis sativus]
  misc_feature (76)..(303): Homolog of NCBI NO: 3913808 NR Description: Ferrochelatase II, chloroplast precursor ferro- lyase) (Heme synthetase) >gi|2429618|dbj|BAA22284.1|
  misc_feature (42)..(303): Homolog of NCBI NO: 7437212 NR Description: probable ferrochelatase (EC 4.99.1.1) - potato
  misc_feature (17)..(316): Homolog of NCBI NO: 16226931 NR Description: T9D9.20/T9D9.20 [Arabidopsis thaliana]
  misc_feature (84)..(298): Homolog of NCBI NO: 13249285 NR Description: ferrochelatase [Chlamydomonas reinhardtii]
  misc_feature (94)..(303): Homolog of NCBI NO: 1170239 NR Description: Ferrochelatase II, chloroplast precursor
  misc_feature (105)..(303): Homolog of NCBI NO: 7437214 NR Description: probable ferrochelatase (EC 4.99.1.1) - barley
NPNRCVKVSSSFNLFAMNCPAMTASPSSSSSSSYSTFRPPPPLLPQLSNDSQRSVVMHCTRLPFEAFAATSSNRLLGKHSLPLRAALVTSNPLNISSSSVISDAISSSSVITDDAKIGVLLLNLGGPETLDDVQPFLFNLFADPDIIRLPPVFQFLQKPLAQFISVARAPKSKEGYASIGGGSPLRHITDAQAEELRKCLWEKNVPAKVYVGMRYWHPFTEEAIEQIKRDGITKLVVLPLYPQFSISTSGSSLRLLERIFREDEYLVNMQHTVIPSWYQREGYIKAMANLIQSELGKFGSPNQCTWRASCICRRSR

SEQ ID NO: 84680 - protein, 300 aa, Arabidopsis thaliana
  peptide (1)..(300): Ceres Seq. ID no. 12676445
  misc_feature (100)..(287): Pfam Name: Ferrochelatase Pfam Description: Ferrochelatase
  misc_feature (1)..(287): Homolog of NCBI NO: 15227742 NR Description: putative ferrochelatase precusor; protein id: [Arabidopsis thaliana] >gi|3913871|sp|O04921|HMZ2_ARATH
  misc_feature (1)..(287): Homolog of NCBI NO: 2623990 NR Description: ferrochelatase [Arabidopsis thaliana]
  misc_feature (4)..(287): Homolog of NCBI NO: 15147828 NR Description: ferrochelatase [Nicotiana tabacum]
  misc_feature (1)..(287): Homolog of NCBI NO: 12082085 NR Description: ferrochelatase [Cucumis sativus]
  misc_feature (60)..(287): Homolog of NCBI NO: 3913808 NR Description: Ferrochelatase II, chloroplast precursor ferro- lyase) (Heme synthetase) >gi|2429618|dbj|BAA22284.1|
  misc_feature (26)..(287): Homolog of NCBI NO: 7437212 NR Description: probable ferrochelatase (EC 4.99.1.1) - potato
  misc_feature (1)..(300): Homolog of NCBI NO: 16226931 NR Description: T9D9.20/T9D9.20 [Arabidopsis thaliana]
  misc_feature (68)..(282): Homolog of NCBI NO: 13249285 NR Description: ferrochelatase [Chlamydomonas reinhardtii]
  misc_feature (78)..(287): Homolog of NCBI NO: 1170239 NR Description: Ferrochelatase II, chloroplast precursor
  misc_feature (89)..(287): Homolog of NCBI NO: 7437214 NR Description: probable ferrochelatase (EC 4.99.1.1) - barley
MNCPAMTASPSSSSSSSYSTFRPPPPLLPQLSNDSQRSVVMHCTRLPFEAFAATSSNRLLGKHSLPLRAALVTSNPLNISSSSVISDAISSSSVITDDAKIGVLLLNLGGPETLDDVQPFLFNLFADPDIIRLPPVFQFLQKPLAQFISVARAPKSKEGYASIGGGSPLRHITDAQAEELRKCLWEKNVPAKVYVGMRYWHPFTEEAIEQIKRDGITKLVVLPLYPQFSISTSGSSLRLLERIFREDEYLVNMQHTVIPSWYQREGYIKAMANLIQSELGKFGSPNQCTWRASCICRRSR

SEQ ID NO: 84681 - protein, 295 aa, Arabidopsis thaliana
  peptide (1)..(295): Ceres Seq. ID no. 12676446
  misc_feature (95)..(282): Pfam Name: Ferrochelatase Pfam Description: Ferrochelatase
  misc_feature (1)..(282): Homolog of NCBI NO: 15227742 NR Description: putative ferrochelatase precusor; protein id: [Arabidopsis thaliana] >gi|3913871|sp|O04921|HMZ2_ARATH
  misc_feature (1)..(282): Homolog of NCBI NO: 2623990 NR Description: ferrochelatase [Arabidopsis thaliana]
  misc_feature (1)..(282): Homolog of NCBI NO: 15147828 NR Description: ferrochelatase [Nicotiana tabacum]
  misc_feature (1)..(282): Homolog of NCBI NO: 12082085 NR Description: ferrochelatase [Cucumis sativus]
  misc_feature (55)..(282): Homolog of NCBI NO: 3913808 NR Description: Ferrochelatase II, chloroplast precursor ferro- lyase) (Heme synthetase) >gi|2429618|dbj|BAA22284.1|
  misc_feature (21)..(282): Homolog of NCBI NO: 7437212 NR Description: probable ferrochelatase (EC 4.99.1.1) - potato
  misc_feature (1)..(295): Homolog of NCBI NO: 16226931 NR Description: T9D9.20/T9D9.20 [Arabidopsis thaliana]
  misc_feature (63)..(277): Homolog of NCBI NO: 13249285 NR Description: ferrochelatase [Chlamydomonas reinhardtii]
  misc_feature (73)..(282): Homolog of NCBI NO: 1170239 NR Description: Ferrochelatase II, chloroplast precursor
  misc_feature (84)..(282): Homolog of NCBI NO: 7437214 NR Description: probable ferrochelatase (EC 4.99.1.1) - barley
MTASPSSSSSSSYSTFRPPPPLLPQLSNDSQRSVVMHCTRLPFEAFAATSSNRLLGKHSLPLRAALVTSNPLNISSSSVISDAISSSSVITDDAKIGVLLLNLGGPETLDDVQPFLFNLFADPDIIRLPPVFQFLQKPLAQFISVARAPKSKEGYASIGGGSPLRHITDAQAEELRKCLWEKNVPAKVYVGMRYWHPFTEEAIEQIKRDGITKLVVLPLYPQFSISTSGSSLRLLERIFREDEYLVNMQHTVIPSWYQREGYIKAMANLIQSELGKFGSPNQCTWRASCICRRSR

SEQ ID NO: 84682 - DNA, 1121 bp, Arabidopsis thaliana
  misc_feature (1)..(1121): Ceres Seq. ID no. 12676467
  misc_feature: MA Experiment ID: 108433 Result: Up-regulated in Transcription
  misc_feature: MA Experiment 108433 PARAMETER Experiment Name: At_rhl_Mutant2_cDNA_P Parameter: Age (day) Value: 7
  misc_feature: MA Experiment 108433 PARAMETER Experiment Name: At_rhl_Mutant2_cDNA_P Parameter: Organism Value: A. thaliana
  misc_feature: MA Experiment 108433 PARAMETER Experiment Name: At_rhl_Mutant2_cDNA_P Parameter: Plant Line Value: rhl Mutant vs. wt landsburg
  misc_feature: MA Experiment 108433 PARAMETER Experiment Name: At_rhl_Mutant2_cDNA_P Parameter: Tissue Value: Roots
  misc_feature: MA Experiment ID: 108434 Result: Down-regulated in Transcription
  misc_feature: MA Experiment 108434 PARAMETER Experiment Name: At_Root_Tips_cDNA_P Parameter: Tissue Value: Root Tips
  misc_feature: MA Experiment ID: 108573 Result: Up-regulated in Transcription
  misc_feature: MA Experiment 108573 PARAMETER Experiment Name: At_Drought_cDNA_P Parameter: Timepoint (hr) Value: 6
  misc_feature: MA Experiment 108573 PARAMETER Experiment Name: At_Drought_cDNA_P Parameter: Tissue Value: Aerial
  misc_feature: MA Experiment 108573 PARAMETER Experiment Name: At_Drought_cDNA_P Parameter: Treatment Value: Drought vs. No Drought
  misc_feature: MA Experiment ID: 108594 Result: Down-regulated in Transcription
  misc_feature: MA Experiment 108594 PARAMETER Experiment Name: At_Ler-rhl_Root_cDNA_P Parameter: Plant Line Value: null
  misc_feature: MA Experiment ID: 108595 Result: Down-regulated in Transcription
  misc_feature: MA Experiment 108595 PARAMETER Experiment Name: At_Ler-pi_Ovule_cDNA_P Parameter: Plant Line Value: null
  misc_feature: MA Experiment ID: 108605 Result: Up-regulated in Transcription
  misc_feature: MA Experiment 108605 PARAMETER Experiment Name: At_100uM_ABA_cDNA_P Parameter: Timepoint (hr) Value: 6
  misc_feature: MA Experiment 108605 PARAMETER Experiment Name: At_100uM_ABA_cDNA_P Parameter: Tissue Value: Aerial
  misc_feature: MA Experiment 108605 PARAMETER Experiment Name: At_100uM_ABA_cDNA_P Parameter: Treatment Value: 100uM ABA vs. No Treatment
  misc_feature: MA Experiment ID: 20000185 Result: Down-regulated in Transcription
  misc_feature: MA Experiment 20000185 PARAMETER Experiment Name: At_Roots__P Parameter: Age (day) Value: 7 vs. 21
  misc_feature: MA Experiment 20000185 PARAMETER Experiment Name: At_Roots__P Parameter: Organism Value: A. thaliana
  misc_feature: MA Experiment 20000185 PARAMETER Experiment Name: At_Roots__P Parameter: Tissue Value: Roots vs. Whole Plant
  misc_feature: MA Experiment ID: 20000437 Result: Down-regulated in Transcription
  misc_feature: MA Experiment 20000437 PARAMETER Experiment Name: At_Drought_P Parameter: Age (day) Value: 8
  misc_feature: MA Experiment 20000437 PARAMETER Experiment Name: At_Drought_P Parameter: Organism Value: A. thaliana
  misc_feature: MA Experiment 20000437 PARAMETER Experiment Name: At_Drought_P Parameter: Plant Line Value: WS
  misc_feature: MA Experiment 20000437 PARAMETER Experiment Name: At_Drought_P Parameter: Timepoint (hr) Value: 24
  misc_feature: MA Experiment 20000437 PARAMETER Experiment Name: At_Drought_P Parameter: Tissue Value: Whole Plant
  misc_feature: MA Experiment 20000437 PARAMETER Experiment Name: At_Drought_P Parameter: Treatment Value: Drought vs. No Drought
  misc_feature: MA Experiment ID: 20000439 Result: Down-regulated in Transcription
  misc_feature: MA Experiment 20000439 PARAMETER Experiment Name: At_Roots__P Parameter: Age (day) Value: 14 vs. 21
  misc_feature: MA Experiment 20000439 PARAMETER Experiment Name: At_Roots__P Parameter: Organism Value: A. thaliana
  misc_feature: MA Experiment 20000439 PARAMETER Experiment Name: At_Roots__P Parameter: Tissue Value: Roots vs. Whole Plant
  misc_feature: MA Experiment ID: 20000573 Result: Down-regulated in Transcription
  misc_feature: MA Experiment 20000573 PARAMETER Experiment Name: At_100uM_ABA_Mutants__P Parameter: Organism Value: A. thaliana
  misc_feature: MA Experiment 20000573 PARAMETER Experiment Name: At_100uM_ABA_Mutants__P Parameter: Plant Line Value: CS22 vs. Ler wt
  misc_feature: MA Experiment 20000573 PARAMETER Experiment Name: At_100uM_ABA_Mutants__P Parameter: Timepoint (hr) Value: N/A
  misc_feature: MA Experiment 20000573 PARAMETER Experiment Name: At_100uM_ABA_Mutants__P Parameter: Tissue Value: Whole Plant
  misc_feature: MA Experiment 20000573 PARAMETER Experiment Name: At_100uM_ABA_Mutants__P Parameter: Treatment Value: None
  misc_feature: MA Experiment ID: 20000574 Result: Down-regulated in Transcription
  misc_feature: MA Experiment 20000574 PARAMETER Experiment Name: At_100uM_ABA_Mutants__P Parameter: Organism Value: A. thaliana
  misc_feature: MA Experiment 20000574 PARAMETER Experiment Name: At_100uM_ABA_Mutants__P Parameter: Plant Line Value: CS23 vs. Ler wt
  misc_feature: MA Experiment 20000574 PARAMETER Experiment Name: At_100uM_ABA_Mutants__P Parameter: Timepoint (hr) Value: N/A
  misc_feature: MA Experiment 20000574 PARAMETER Experiment Name: At_100uM_ABA_Mutants__P Parameter: Tissue Value: Whole Plant
  misc_feature: MA Experiment 20000574 PARAMETER Experiment Name: At_100uM_ABA_Mutants__P Parameter: Treatment Value: None
  misc_feature: MA Experiment ID: 20000794 Result: Up-regulated in Transcription
  misc_feature: MA Experiment 20000794 PARAMETER Experiment Name: At_Petals_P Parameter: Age (day) Value: 23-25 days
  misc_feature: MA Experiment 20000794 PARAMETER Experiment Name: At_Petals_P Parameter: Plant Line Value: WS
  misc_feature: MA Experiment 20000794 PARAMETER Experiment Name: At_Petals_P Parameter: Tissue Value: Petals vs. Whole plant
  misc_feature: MA Experiment ID: 20001248 Result: Down-regulated in Transcription
  misc_feature: MA Experiment 20001248 PARAMETER Experiment Name: At_Far-red-induction_P Parameter: Age (day) Value: 7
  misc_feature: MA Experiment 20001248 PARAMETER Experiment Name: At_Far-red-induction_P Parameter: Light Value: Far-red vs. White
  misc_feature: MA Experiment 20001248 PARAMETER Experiment Name: At_Far-red-induction_P Parameter: Organism Value: A. thaliana
  misc_feature: MA Experiment 20001248 PARAMETER Experiment Name: At_Far-red-induction_P Parameter: Plant Line Value: Columbia
  misc_feature: MA Experiment 20001248 PARAMETER Experiment Name: At_Far-red-induction_P Parameter: Timepoint (hr) Value: 4
  misc_feature: MA Experiment 20001248 PARAMETER Experiment Name: At_Far-red-induction_P Parameter: Tissue Value: Whole Plant
attttttgatatgtaaaatttatcgaaaacgttccatttcaatatgtagacaaagcggagaagtatattgtggaggcggcaagcaagggagcagagctagtgttgttcccggaggggtttatcggtggctatcctcgaggttttaggttcggtttagcggttggcgttcataacgaagaagggcgtgatgagtttcggaagtaccatgcttctgctattcatgttcctggccctgaagtagcaagattggctgacgtggctaggaaaaaccatgtgtacttggtaatgggagccatagagaaggaagggtataccctctattgcacagttcttttctttagtccacagggtcagttcttgggcaagcaccgtaaactcatgcccacaagtttggaacgttgcatttggggccaaggggacggatcaaccatccccgtttacgacactcccattggaaaactcggtgctgctatttgctgggagaataggatgcccctctacagaactgcattgtacgccaaaggcattgagctttattgtgcacctactgctgatggttcgaaagaatggcaatcgtcgatgcttcacattgcgatcgaaggtggatgtttcgtcttgtcggcttgccaattctgccagcgtaaacatttccctgatcatcctgactacttgtttaccgattggtacgacgacaaagaacatgattctattgtctcccaaggtggaagtgtcattatttcacctttgggacaagttctcgccggaccaaactttgaatcagagggtctcgtcacagctgatattgatcttggtgatatagcaagagccaagttatacttcgattcggttggacattactcgagaccagatgttttacacttgaccgtaaatgagcacccgaggaaatcggttacattcgtgacgaaggtggagaaagctgaggatgactcaaacaaatagtaagagacttgaagttcgtatctgctggagttatgtcaatcgtatggagtcaagtccaaaatgttctgttgcgttttcattttatgttcaagtttatttatctttctcttcaatggtaagatctatggagtcaagtaataatggtaagacttatgttgttg

SEQ ID NO: 84683 - protein, 224 aa, Arabidopsis thaliana; identical to SEQ ID NO: 43871
  peptide (1)..(224): Ceres Seq. ID no. 12676468
  misc_feature (1)..(224): Homolog of NCBI NO: 30692067 NR Description: nitrilase 1 [Arabidopsis thaliana]
  misc_feature (1)..(224): Homolog of NCBI NO: 417381 NR Description: Nitrilase 1 >gi|99738|pir||S22398 nitrilase (EC - Arabidopsis thaliana >gi|16400|emb|CAA45041.1| nitrilase I
  misc_feature (1)..(224): Homolog of NCBI NO: 16226740 NR Description: AT3g44310/T10D17_100 [Arabidopsis thaliana]
  misc_feature (1)..(224): Homolog of NCBI NO: 15229932 NR Description: nitrilase 2; protein id: At3g44300.1, supported cDNA: 40532., supported by cDNA: gi_508732 [Arabidopsis thaliana]
  misc_feature (1)..(224): Homolog of NCBI NO: 25290266 NR Description: nitrilase (EC 3.5.5.1) 2 [imported] - Arabidopsis
  misc_feature (1)..(224): Homolog of NCBI NO: 25290267 NR Description: nitrilase (EC 3.5.5.1) 2 [imported] - Arabidopsis
  misc_feature (1)..(224): Homolog of NCBI NO: 15229936 NR Description: nitrilase 3; protein id: At3g44320.1, supported cDNA: 36242., supported by cDNA: gi_508734 [Arabidopsis thaliana]
  misc_feature (1)..(224): Homolog of NCBI NO: 21593107 NR Description: nitrilase 3 [Arabidopsis thaliana]
  misc_feature (1)..(222): Homolog of NCBI NO: 14211396 NR Description: nitrilase-like protein [Brassica napus]
  misc_feature (1)..(224): Homolog of NCBI NO: 30692072 NR Description: nitrilase 1 [Arabidopsis thaliana]

SEQ ID NO: 84684 - protein, 193 aa, Arabidopsis thaliana
  peptide (1)..(193): Ceres Seq. ID no. 12676469
  misc_feature (1)..(193): Homolog of NCBI NO: 30692067 NR Description: nitrilase 1 [Arabidopsis thaliana]
  misc_feature (1)..(193): Homolog of NCBI NO: 417381 NR Description: Nitrilase 1 >gi|99738|pir||S22398 nitrilase (EC - Arabidopsis thaliana >gi|16400|emb|CAA45041.1| nitrilase I
  misc_feature (1)..(193): Homolog of NCBI NO: 16226740 NR Description: AT3g44310/T10D17_100 [Arabidopsis thaliana]
  misc_feature (1)..(193): Homolog of NCBI NO: 15229932 NR Description: nitrilase 2; protein id: At3g44300.1, supported cDNA: 40532., supported by cDNA: gi_508732 [Arabidopsis thaliana]
  misc_feature (1)..(193): Homolog of NCBI NO: 25290266 NR Description: nitrilase (EC 3.5.5.1) 2 [imported] - Arabidopsis
  misc_feature (1)..(193): Homolog of NCBI NO: 25290267 NR Description: nitrilase (EC 3.5.5.1) 2 [imported] - Arabidopsis
  misc_feature (1)..(193): Homolog of NCBI NO: 15229936 NR Description: nitrilase 3; protein id: At3g44320.1, supported cDNA: 36242., supported by cDNA: gi_508734 [Arabidopsis thaliana]
  misc_feature (1)..(193): Homolog of NCBI NO: 21593107 NR Description: nitrilase 3 [Arabidopsis thaliana]
  misc_feature (1)..(191): Homolog of NCBI NO: 14211396 NR Description: nitrilase-like protein [Brassica napus]
  misc_feature (1)..(193): Homolog of NCBI NO: 30692072 NR Description: nitrilase 1 [Arabidopsis thaliana]
MPTSLERCIWGQGDGSTIPVYDTPIGKLGAAICWENRMPLYRTALYAKGIELYCAPTADGSKEWQSSMLHIAIEGGCFVLSACQFCQRKHFPDHPDYLFTDWYDDKEHDSIVSQGGSVIISPLGQVLAGPNFESEGLVTADIDLGDIARAKLYFDSVGHYSRPDVLHLTVNEHPRKSVTFVTKVEKAEDDSNK

SEQ ID NO: 84685 - protein, 156 aa, Arabidopsis thaliana; identical to SEQ ID NO: 40302
  peptide (1)..(156): Ceres Seq. ID no. 12676470
  misc_feature (1)..(156): Homolog of NCBI NO: 30692067 NR Description: nitrilase 1 [Arabidopsis thaliana]
  misc_feature (1)..(156): Homolog of NCBI NO: 417381 NR Description: Nitrilase 1 >gi|99738|pir||S22398 nitrilase (EC - Arabidopsis thaliana >gi|16400|emb|CAA45041.1| nitrilase I
  misc_feature (1)..(156): Homolog of NCBI NO: 16226740 NR Description: AT3g44310/T10D17_100 [Arabidopsis thaliana]
  misc_feature (1)..(156): Homolog of NCBI NO: 15229932 NR Description: nitrilase 2; protein id: At3g44300.1, supported cDNA: 40532., supported by cDNA: gi_508732 [Arabidopsis thaliana]
  misc_feature (1)..(156): Homolog of NCBI NO: 25290266 NR Description: nitrilase (EC 3.5.5.1) 2 [imported] - Arabidopsis
  misc_feature (1)..(156): Homolog of NCBI NO: 25290267 NR Description: nitrilase (EC 3.5.5.1) 2 [imported] - Arabidopsis
  misc_feature (1)..(156): Homolog of NCBI NO: 15229936 NR Description: nitrilase 3; protein id: At3g44320.1, supported cDNA: 36242., supported by cDNA: gi_508734 [Arabidopsis thaliana]
  misc_feature (1)..(156): Homolog of NCBI NO: 21593107 NR Description: nitrilase 3 [Arabidopsis thaliana]
  misc_feature (1)..(154): Homolog of NCBI NO: 14211396 NR Description: nitrilase-like protein [Brassica napus]
  misc_feature (1)..(156): Homolog of NCBI NO: 30692072 NR Description: nitrilase 1 [Arabidopsis thaliana]

SEQ ID NO: 84686 - DNA, 1002 bp, Arabidopsis thaliana
  misc_feature (1)..(1002): Ceres Seq. ID no. 12676475
  misc_feature: MA Experiment ID: 108434 Result: Up-regulated in Transcription
  misc_feature: MA Experiment 108434 PARAMETER Experiment Name: At_Root_Tips_cDNA_P Parameter: Tissue Value: Root Tips
  misc_feature: MA Experiment ID: 108435 Result: Up-regulated in Transcription
  misc_feature: MA Experiment 108435 PARAMETER Experiment Name: At_stm_Mutants_cDNA_P Parameter: Plant Line Value: wt Landsburg vs stm
  misc_feature: MA Experiment 108435 PARAMETER Experiment Name: At_stm_Mutants_cDNA_P Parameter: Tissue Value: Shoot Apical Meristem Region
  misc_feature: MA Experiment ID: 108462 Result: Down-regulated in Transcription
  misc_feature: MA Experiment 108462 PARAMETER Experiment Name: At_Germinating_Seeds_cDNA_P Parameter: Age (day) Value: 2 vs. 0
  misc_feature: MA Experiment 108462 PARAMETER Experiment Name: At_Germinating_Seeds_cDNA_P Parameter: Tissue Value: Germinating Seeds
  misc_feature: MA Experiment ID: 108463 Result: Down-regulated in Transcription
  misc_feature: MA Experiment 108463 PARAMETER Experiment Name: At_Germinating_Seeds_cDNA_P Parameter: Age (day) Value: 3 vs. 0
  misc_feature: MA Experiment 108463 PARAMETER Experiment Name: At_Germinating_Seeds_cDNA_P Parameter: Tissue Value: Germinating Seeds
  misc_feature: MA Experiment ID: 108464 Result: Down-regulated in Transcription
  misc_feature: MA Experiment 108464 PARAMETER Experiment Name: At_Germinating_Seeds_cDNA_P Parameter: Age (day) Value: 4 vs. 0
  misc_feature: MA Experiment 108464 PARAMETER Experiment Name: At_Germinating_Seeds_cDNA_P Parameter: Tissue Value: Germinating Seeds
  misc_feature: MA Experiment ID: 108489 Result: Up-regulated in Transcription
  misc_feature: MA Experiment ID: 108572 Result: Down-regulated in Transcription
  misc_feature: MA Experiment 108572 PARAMETER Experiment Name: At_Drought_cDNA_P Parameter: Timepoint (hr) Value: 1
  misc_feature: MA Experiment 108572 PARAMETER Experiment Name: At_Drought_cDNA_P Parameter: Tissue Value: Aerial
  misc_feature: MA Experiment 108572 PARAMETER Experiment Name: At_Drought_cDNA_P Parameter: Treatment Value: Drought vs. No Drought
  misc_feature: MA Experiment ID: 108573 Result: Down-regulated in Transcription
  misc_feature: MA Experiment 108573 PARAMETER Experiment Name: At_Drought_cDNA_P Parameter: Timepoint (hr) Value: 6
  misc_feature: MA Experiment 108573 PARAMETER Experiment Name: At_Drought_cDNA_P Parameter: Tissue Value: Aerial
  misc_feature: MA Experiment 108573 PARAMETER Experiment Name: At_Drought_cDNA_P Parameter: Treatment Value: Drought vs. No Drought
  misc_feature: MA Experiment ID: 108585 Result: Down-regulated in Transcription
  misc_feature: MA Experiment 108585 PARAMETER Experiment Name: At_5mM_NaNP_cDNA_P Parameter: Timepoint (hr) Value: 6
  misc_feature: MA Experiment 108585 PARAMETER Experiment Name: At_5mM_NaNP_cDNA_P Parameter: Tissue Value: Aerial
  misc_feature: MA Experiment 108585 PARAMETER Experiment Name: At_5mM_NaNP_cDNA_P Parameter: Treatment Value: null
  misc_feature: MA Experiment ID: 108609 Result: Down-regulated in Transcription
  misc_feature: MA Experiment 108609 PARAMETER Experiment Name: At_100uM_ABA_cDNA_P Parameter: Timepoint (hr) Value: 24
  misc_feature: MA Experiment 108609 PARAMETER Experiment Name: At_100uM_ABA_cDNA_P Parameter: Tissue Value: Aerial
  misc_feature: MA Experiment 108609 PARAMETER Experiment Name: At_100uM_ABA_cDNA_P Parameter: Treatment Value: 100uM ABA vs. No Treatment
  misc_feature: MA Experiment ID: 20000089 Result: Up-regulated in Transcription
  misc_feature: MA Experiment ID: 20000180 Result: Down-regulated in Transcription
  misc_feature: MA Experiment 20000180 PARAMETER Experiment Name: At_Germinating_Seeds_P Parameter: Age (hr) Value: 24 vs. 0
  misc_feature: MA Experiment 20000180 PARAMETER Experiment Name: At_Germinating_Seeds_P Parameter: Tissue Value: Germinating Seeds
  misc_feature: MA Experiment ID: 20000227 Result: Up-regulated in Transcription
  misc_feature: MA Experiment 20000227 PARAMETER Experiment Name: At_Root-Tips-vs-Tops_P Parameter: Tissue Value: Root Tips vs. Root Tops
  misc_feature: MA Experiment ID: 20000234 Result: Up-regulated in Transcription
  misc_feature: MA Experiment 20000234 PARAMETER Experiment Name: At_Siliques_P Parameter: Age (day) Value: 21
  misc_feature: MA Experiment 20000234 PARAMETER Experiment Name: At_Siliques_P Parameter: Organism Value: A. thaliana
  misc_feature: MA Experiment 20000234 PARAMETER Experiment Name: At_Siliques_P Parameter: Plant Line Value: WS
  misc_feature: MA Experiment 20000234 PARAMETER Experiment Name: At_Siliques_P Parameter: Tissue Value: Less Than 5mm Siliques vs. Whole Plant
  misc_feature: MA Experiment ID: 20000264 Result: Up-regulated in Transcription
  misc_feature: MA Experiment 20000264 PARAMETER Experiment Name: At_Open_Flower_P Parameter: Age (day) Value: 21
  misc_feature: MA Experiment 20000264 PARAMETER Experiment Name: At_Open_Flower_P Parameter: Plant Line Value: WS
  misc_feature: MA Experiment 20000264 PARAMETER Experiment Name: At_Open_Flower_P Parameter: Tissue Value: Open Flower vs. Whole Plant
  misc_feature: MA Experiment ID: 20000436 Result: Down-regulated in Transcription
  misc_feature: MA Experiment 20000436 PARAMETER Experiment Name: At_Drought_P Parameter: Age (day) Value: 7
  misc_feature: MA Experiment 20000436 PARAMETER Experiment Name: At_Drought_P Parameter: Organism Value: A. thaliana
  misc_feature: MA Experiment 20000436 PARAMETER Experiment Name: At_Drought_P Parameter: Plant Line Value: WS
  misc_feature: MA Experiment 20000436 PARAMETER Experiment Name: At_Drought_P Parameter: Timepoint (hr) Value: 12
  misc_feature: MA Experiment 20000436 PARAMETER Experiment Name: At_Drought_P Parameter: Tissue Value: Whole Plant
  misc_feature: MA Experiment 20000436 PARAMETER Experiment Name: At_Drought_P Parameter: Treatment Value: Drought vs. No Drought
  misc_feature: MA Experiment ID: 20000437 Result: Down-regulated in Transcription
  misc_feature: MA Experiment 20000437 PARAMETER Experiment Name: At_Drought_P Parameter: Age (day) Value: 8
  misc_feature: MA Experiment 20000437 PARAMETER Experiment Name: At_Drought_P Parameter: Organism Value: A. thaliana
  misc_feature: MA Experiment 20000437 PARAMETER Experiment Name: At_Drought_P Parameter: Plant Line Value: WS
  misc_feature: MA Experiment 20000437 PARAMETER Experiment Name: At_Drought_P Parameter: Timepoint (hr) Value: 24
  misc_feature: MA Experiment 20000437 PARAMETER Experiment Name: At_Drought_P Parameter: Tissue Value: Whole Plant
  misc_feature: MA Experiment 20000437 PARAMETER Experiment Name: At_Drought_P Parameter: Treatment Value: Drought vs. No Drought
  misc_feature: MA Experiment ID: 20000453 Result: Down-regulated in Transcription
  misc_feature: MA Experiment 20000453 PARAMETER Experiment Name: At_100uM_ABA_P Parameter: Age (day) Value: 15
  misc_feature: MA Experiment 20000453 PARAMETER Experiment Name: At_100uM_ABA_P Parameter: Organism Value: A. thaliana
  misc_feature: MA Experiment 20000453 PARAMETER Experiment Name: At_100uM_ABA_P Parameter: Plant Line Value: WS
  misc_feature: MA Experiment 20000453 PARAMETER Experiment Name: At_100uM_ABA_P Parameter: Timepoint (hr) Value: 24
  misc_feature: MA Experiment 20000453 PARAMETER Experiment Name: At_100uM_ABA_P Parameter: Tissue Value: Aerial
  misc_feature: MA Experiment 20000453 PARAMETER Experiment Name: At_100uM_ABA_P Parameter: Treatment Value: 100uM ABA vs. No Treatment
  misc_feature: MA Experiment ID: 20000456 Result: Up-regulated in Transcription
  misc_feature: MA Experiment 20000456 PARAMETER Experiment Name: At_100uM_BA_P Parameter: Age (day) Value: 14
  misc_feature: MA Experiment 20000456 PARAMETER Experiment Name: At_100uM_BA_P Parameter: Organism Value: A. thaliana
  misc_feature: MA Experiment 20000456 PARAMETER Experiment Name: At_100uM_BA_P Parameter: Plant Line Value: WS
  misc_feature: MA Experiment 20000456 PARAMETER Experiment Name: At_100uM_BA_P Parameter: Timepoint (hr) Value: 6
  misc_feature: MA Experiment 20000456 PARAMETER Experiment Name: At_100uM_BA_P Parameter: Tissue Value: Aerial
  misc_feature: MA Experiment 20000456 PARAMETER Experiment Name: At_100uM_BA_P Parameter: Treatment Value: 100uM BA vs. No Treatment
  misc_feature: MA Experiment ID: 20000709 Result: Up-regulated in Transcription
  misc_feature: MA Experiment 20000709 PARAMETER Experiment Name: At_15mM_NH4NO3_L-to-H_P Parameter: Age (hr) Value: 14
  misc_feature: MA Experiment 20000709 PARAMETER Experiment Name: At_15mM_NH4NO3_L-to-H_P Parameter: Organism Value: A. thaliana
  misc_feature: MA Experiment 20000709 PARAMETER Experiment Name: At_15mM_NH4NO3_L-to-H_P Parameter: Plant Line Value: WS
  misc_feature: MA Experiment 20000709 PARAMETER Experiment Name: At_15mM_NH4NO3_L-to-H_P Parameter: Timepoint (hr) Value: 4
  misc_feature: MA Experiment 20000709 PARAMETER Experiment Name: At_15mM_NH4NO3_L-to-H_P Parameter: Tissue Value: Aerial
  misc_feature: MA Experiment 20000709 PARAMETER Experiment Name: At_15mM_NH4NO3_L-to-H_P Parameter: Treatment Value: 15mM NH4NO3 vs. 30mM Mannitol
  misc_feature: MA Experiment ID: 20000794 Result: Down-regulated in Transcription
  misc_feature: MA Experiment 20000794 PARAMETER Experiment Name: At_Petals_P Parameter: Age (day) Value: 23-25 days
  misc_feature: MA Experiment 20000794 PARAMETER Experiment Name: At_Petals_P Parameter: Plant Line Value: WS
  misc_feature: MA Experiment 20000794 PARAMETER Experiment Name: At_Petals_P Parameter: Tissue Value: Petals vs. Whole plant
  misc_feature: MA Experiment ID: 20001247 Result: Down-regulated in Transcription
  misc_feature: MA Experiment 20001247 PARAMETER Experiment Name: At_Far-red-induction_P Parameter: Age (day) Value: 7
  misc_feature: MA Experiment 20001247 PARAMETER Experiment Name: At_Far-red-induction_P Parameter: Light Value: Far-red vs. White
  misc_feature: MA Experiment 20001247 PARAMETER Experiment Name: At_Far-red-induction_P Parameter: Organism Value: A. thaliana
  misc_feature: MA Experiment 20001247 PARAMETER Experiment Name: At_Far-red-induction_P Parameter: Plant Line Value: Columbia
  misc_feature: MA Experiment 20001247 PARAMETER Experiment Name: At_Far-red-induction_P Parameter: Timepoint (hr) Value: 1
  misc_feature: MA Experiment 20001247 PARAMETER Experiment Name: At_Far-red-induction_P Parameter: Tissue Value: Whole Plant
  misc_feature: MA Experiment ID: 20001450 Result: Down-regulated in Transcription
  misc_feature: MA Experiment 20001450 PARAMETER Experiment Name: At_Far-red-induction_P Parameter: Age (day) Value: 7
  misc_feature: MA Experiment 20001450 PARAMETER Experiment Name: At_Far-red-induction_P Parameter: Light Value: Far-red vs. White
  misc_feature: MA Experiment 20001450 PARAMETER Experiment Name: At_Far-red-induction_P Parameter: Organism Value: A. thaliana
  misc_feature: MA Experiment 20001450 PARAMETER Experiment Name: At_Far-red-induction_P Parameter: Plant Line Value: Columbia
  misc_feature: MA Experiment 20001450 PARAMETER Experiment Name: At_Far-red-induction_P Parameter: Timepoint (hr) Value: 8
  misc_feature: MA Experiment 20001450 PARAMETER Experiment Name: At_Far-red-induction_P Parameter: Tissue Value: Whole Plant
  misc_feature: MA Experiment ID: 20001458 Result: Up-regulated in Transcription
  misc_feature: MA Experiment 20001458 PARAMETER Experiment Name: At_50mM_NH4NO3_L-to-H_P Parameter: Age (day) Value: Undefined
  misc_feature: MA Experiment 20001458 PARAMETER Experiment Name: At_50mM_NH4NO3_L-to-H_P Parameter: Organism Value: Undefined
  misc_feature: MA Experiment 20001458 PARAMETER Experiment Name: At_50mM_NH4NO3_L-to-H_P Parameter: Plant Line Value: Undefined
  misc_feature: MA Experiment 20001458 PARAMETER Experiment Name: At_50mM_NH4NO3_L-to-H_P Parameter: Timepoint (hr) Value: 2
  misc_feature: MA Experiment 20001458 PARAMETER Experiment Name: At_50mM_NH4NO3_L-to-H_P Parameter: Tissue Value: Siliques
  misc_feature: MA Experiment 20001458 PARAMETER Experiment Name: At_50mM_NH4NO3_L-to-H_P Parameter: Treatment Value: 50mM NH4NO3 vs. 100mM Manitol
  misc_feature: MA Experiment ID: 20001556 Result: Up-regulated in Transcription
  misc_feature: MA Experiment 20001556 PARAMETER Experiment Name: At_Drought_Soil_Dry_P Parameter: Age (day) Value: 26
  misc_feature: MA Experiment 20001556 PARAMETER Experiment Name: At_Drought_Soil_Dry_P Parameter: Organism Value: A. thaliana
  misc_feature: MA Experiment 20001556 PARAMETER Experiment Name: At_Drought_Soil_Dry_P Parameter: Plant Line Value: WS
  misc_feature: MA Experiment 20001556 PARAMETER Experiment Name: At_Drought_Soil_Dry_P Parameter: Post Timepoint (hr) Value: None
  misc_feature: MA Experiment 20001556 PARAMETER Experiment Name: At_Drought_Soil_Dry_P Parameter: Post-Treatment Value: None
  misc_feature: MA Experiment 20001556 PARAMETER Experiment Name: At_Drought_Soil_Dry_P Parameter: Timepoint (day) Value: 12
  misc_feature: MA Experiment 20001556 PARAMETER Experiment Name: At_Drought_Soil_Dry_P Parameter: Treatment Value: Drought vs. No Drought
  misc_feature: MA Experiment ID: 20001557 Result: Up-regulated in Transcription
  misc_feature: MA Experiment 20001557 PARAMETER Experiment Name: At_Drought_Soil_Dry_P Parameter: Age (day) Value: 27
  misc_feature: MA Experiment 20001557 PARAMETER Experiment Name: At_Drought_Soil_Dry_P Parameter: Organism Value: A. thaliana
  misc_feature: MA Experiment 20001557 PARAMETER Experiment Name: At_Drought_Soil_Dry_P Parameter: Plant Line Value: WS
  misc_feature: MA Experiment 20001557 PARAMETER Experiment Name: At_Drought_Soil_Dry_P Parameter: Post Timepoint (hr) Value: 3
  misc_feature: MA Experiment 20001557 PARAMETER Experiment Name: At_Drought_Soil_Dry_P Parameter: Post-Treatment Value: Re-Water vs. No Drought
  misc_feature: MA Experiment 20001557 PARAMETER Experiment Name: At_Drought_Soil_Dry_P Parameter: Timepoint (day) Value: 13
  misc_feature: MA Experiment 20001557 PARAMETER Experiment Name: At_Drought_Soil_Dry_P Parameter: Treatment Value: Drought vs. No Drought
  misc_feature: MA Experiment ID: 20001558 Result: Up-regulated in Transcription
  misc_feature: MA Experiment 20001558 PARAMETER Experiment Name: At_Drought_Soil_Dry_P Parameter: Age (day) Value: 27
  misc_feature: MA Experiment 20001558 PARAMETER Experiment Name: At_Drought_Soil_Dry_P Parameter: Organism Value: A. thaliana
  misc_feature: MA Experiment 20001558 PARAMETER Experiment Name: At_Drought_Soil_Dry_P Parameter: Plant Line Value: WS
  misc_feature: MA Experiment 20001558 PARAMETER Experiment Name: At_Drought_Soil_Dry_P Parameter: Post Timepoint (hr) Value: 6
  misc_feature: MA Experiment 20001558 PARAMETER Experiment Name: At_Drought_Soil_Dry_P Parameter: Post-Treatment Value: Re-Water vs. No Drought
  misc_feature: MA Experiment 20001558 PARAMETER Experiment Name: At_Drought_Soil_Dry_P Parameter: Timepoint (day) Value: 13
  misc_feature: MA Experiment 20001558 PARAMETER Experiment Name: At_Drought_Soil_Dry_P Parameter: Treatment Value: Drought vs. No Drought
  misc_feature: MA Experiment ID: 20001560 Result: Up-regulated in Transcription
  misc_feature: MA Experiment 20001560 PARAMETER Experiment Name: At_Drought_Soil_Dry_P Parameter: Age (day) Value: 28
  misc_feature: MA Experiment 20001560 PARAMETER Experiment Name: At_Drought_Soil_Dry_P Parameter: Organism Value: A. thaliana
  misc_feature: MA Experiment 20001560 PARAMETER Experiment Name: At_Drought_Soil_Dry_P Parameter: Plant Line Value: WS
  misc_feature: MA Experiment 20001560 PARAMETER Experiment Name: At_Drought_Soil_Dry_P Parameter: Post Timepoint (hr) Value: None
  misc_feature: MA Experiment 20001560 PARAMETER Experiment Name: At_Drought_Soil_Dry_P Parameter: Post-Treatment Value: None
  misc_feature: MA Experiment 20001560 PARAMETER Experiment Name: At_Drought_Soil_Dry_P Parameter: Timepoint (day) Value: 14
  misc_feature: MA Experiment 20001560 PARAMETER Experiment Name: At_Drought_Soil_Dry_P Parameter: Treatment Value: Drought vs. No Drought
  misc_feature: MA Experiment ID: 20001756 Result: Up-regulated in Transcription
  misc_feature: MA Experiment 20001756 PARAMETER Experiment Name: At_50mM_NH4NO3_L-to-H_P Parameter: Timepoint (hr) Value: 4
  misc_feature: MA Experiment 20001756 PARAMETER Experiment Name: At_50mM_NH4NO3_L-to-H_P Parameter: Tissue Value: Leaf
  misc_feature: MA Experiment 20001756 PARAMETER Experiment Name: At_50mM_NH4NO3_L-to-H_P Parameter: Treatment Value: 50mM NH4NO3 vs 100mM Mannitol
  misc_feature: MA Experiment ID: 20001757 Result: Up-regulated in Transcription
  misc_feature: MA Experiment 20001757 PARAMETER Experiment Name: At_50mM_NH4NO3_L-to-H_P Parameter: Timepoint (hr) Value: 6
  misc_feature: MA Experiment 20001757 PARAMETER Experiment Name: At_50mM_NH4NO3_L-to-H_P Parameter: Tissue Value: Leaf
  misc_feature: MA Experiment 20001757 PARAMETER Experiment Name: At_50mM_NH4NO3_L-to-H_P Parameter: Treatment Value: 50mM NH4NO3 vs 100mM Mannitol
acattttcagctgctcataaaccctaaaaatcctctctttttctcaaccttgattcttagccatggagttctggggaattgaagttaaatcaggaaagccagttacagtgactcctgaagaaggcattcttatccacgtttctcaggcatcgcttggagaatgtaaaaacaagaagggagagtttgtgcctttacatgtaaaggttgggaaccagaacttggttctgggaactctatcgactgagaacatccctcagcttttctgtgatttggtattcgacaaggagtttgagctttctcacacttggggaaaaggaagtgtttactttgttggatacaaaactcccaacattgagccacaaggctattctggtgattcagaggaagaagaggaagaagaggaagaagttcctgctgggaatgctgccaaggctgtagctaaaccaaaggctaagcctgcagaagtgaagccagctgttgatgatgaagaggatgagtctgattctgacggaatggatgaagatgattctgatggtgaggattctgaggaagaagagcctacacctaagaagcctgcatcaagcaagaagagagctaatgaaactacccctaaagcacctgtgtcagcaaagaaggcgaaagtagcagttactcctcagaaaacagatgagaagaagaaagggggaaaggctgcaaaccagagcccaaagtcggccagtcaagtctcatgtggttcatgcaagaagactttcaactcagggaatgcacttgagtctcacaacaaggccaagcacgctgctgccaagtgaagtggtttcttattagagcttgtgatttctatggaattttgcctgtagtctttatgaaaccttcggattttcttatattttcttttgataacaagagtcttaatgaaagagagccagttggagtcttattaccactatatttcaacattctatcttggctcaaatgtgttaattttagattcacgttttcacc

SEQ ID NO: 84687 - protein, 248 aa, Arabidopsis thaliana
  peptide (1)..(248): Ceres Seq. ID no. 12676476
  misc_feature (83)..(178): Pfam Name: Nucleoplasmin Pfam Description: Nucleoplasmin
  misc_feature (1)..(248): Homolog of NCBI NO: 18407844 NR Description: putative histone deacetylase; protein id: supported by cDNA: gi_11066134, supported by cDNA: gi_17529219, by cDNA: gi_20466056 [Arabidopsis thaliana]
  misc_feature (1)..(247): Homolog of NCBI NO: 2392769 NR Description: putative histone deacetylase [Arabidopsis
  misc_feature (1)..(225): Homolog of NCBI NO: 33667906 NR Description: histone deacetylase [Solanum chacoense]
  misc_feature (1)..(246): Homolog of NCBI NO: 30688577 NR Description: histone deacetylase-related protein [Arabidopsis
  misc_feature (1)..(220): Homolog of NCBI NO: 25352191 NR Description: probable histone deacetylase (EC 3.5.1.-) - Arabidopsis thaliana >gi|2854070|gb|AAC02539.1| putative deacetylase [Arabidopsis thaliana]
  misc_feature (1)..(224): Homolog of NCBI NO: 30680179 NR Description: histone deacetylase -related protein [Arabidopsis
  misc_feature (1)..(219): Homolog of NCBI NO: 7804963 NR Description: putative histone deacetylase HD2c [Arabidopsis >gi|9758002|dbj|BAB08599.1| histone deacetylase HD2c [Arabidopsis >gi|13926268|gb|AAK49605.1|AF372889_1 AT5g03740/F17C15_160
  misc_feature (1)..(214): Homolog of NCBI NO: 7804960 NR Description: putative histone deacetylase HD2 [Oryza sativa]
  misc_feature (1)..(219): Homolog of NCBI NO: 11282318 NR Description: histone deacetylase-like protein - Arabidopsis
  misc_feature (1)..(246): Homolog of NCBI NO: 7716948 NR Description: histone deacetylase 2 isoform b [Zea mays]
MEFWGIEVKSGKPVTVTPEEGILIHVSQASLGECKNKKGEFVPLHVKVGNQNLVLGTLSTENIPQLFCDLVFDKEFELSHTWGKGSVYFVGYKTPNIEPQGYSGDSEEEEEEEEEVPAGNAAKAVAKPKAKPAEVKPAVDDEEDESDSDGMDEDDSDGEDSEEEEPTPKKPASSKKRANETTPKAPVSAKKAKVAVTPQKTDEKKKGGKAANQSPKSASQVSCGSCKKTFNSGNALESHNKAKHAAAK

SEQ ID NO: 84688 - DNA, 2149 bp, Arabidopsis thaliana
  misc_feature (1)..(2149): Ceres Seq. ID no. 12676482
  misc_feature: MA Experiment ID: 20000315 Result: Down-regulated in Transcription
  misc_feature: MA Experiment 20000315 PARAMETER Experiment Name: At_14day_Shoots-Roots_Sub_P Parameter: Age (day) Value: 14
  misc_feature: MA Experiment 20000315 PARAMETER Experiment Name: At_14day_Shoots-Roots_Sub_P Parameter: Organism Value: A. thaliana
  misc_feature: MA Experiment 20000315 PARAMETER Experiment Name: At_14day_Shoots-Roots_Sub_P Parameter: Plant Line Value: WS
  misc_feature: MA Experiment 20000315 PARAMETER Experiment Name: At_14day_Shoots-Roots_Sub_P Parameter: Tissue Value: Shoots vs. Whole Plant
acaaattccacatttctcagttctcacgcacgacgtctctgagccctagcgtccggcgaatccttttttttctcttttcttcatttccttttgcttcatttcgaatcaaattcaattttatatgtgagattttcattcttattcatatgagtttttgttagatttcttccagttggtgaatcgtggtactcatttcttctcatgtgccatggatattgaaattagggtttttttttacgtctagagtcaattgggtttgtgatttattggggtttactcgaaattgccgttattgggtttcttaaagtcttcgtcttttgatgttcttcatcagttcaaatttacgatttttgtgagggttttggatacaaatgttgatttctatgtggattgatcatatggattatgtaaagtttatccctttcttcgaaagatttgatctttaatgtgtatcaattcttgtttgctgacttttgttacattaccctgttttgcagaagcttggagtttatctttgactttattgttggatgttaaagctatcttatcttatagtataaagtggagtttcgacatgttgcgattcagttgtagtggttttgatatctcaagttgttttattcatcttgctgaatggcatcctttggaataacgaagcttaccgggctttgaagcccctctttttgcagagtttcgttattgttagcttgtggtctacttgagaaattcataaattttggagtagataatgttttgtgatagttttgcatttgcccaagtgatgagttgcttcgggtgttttggtggctctgagagatcaagacattcaccaaatccatatgatgatgatacatattcccatgatagtggtgaaaccagcaatccgggaggagatgatgaagaaggagaagaggaagaggaagtagaggagctaagtcgttccaaacgatctgaagaaattttgaaatgtaaactacaaaatggactagtctgcaggcagtttccagtcaaggaaactaataaacttacacgcggagaggatgaagatggaaacaagacaataaatgagtttgttcgtgagcgtaaaattggatctggtagttatgggaaagtggttctctatcgaagcactgtcgatgacaagcattatgctattaaggcttttcacaagtcacatttatcgaggctacgggttgcaccttcagaaactgctatgggtgatgttcttcgtgaggttatgattatgaaaaccctggagcatcctaatatcgttaatctcattgaggtgattgatgaccctgagtttgatgatttttacatggttctcgaatatgttgatggaaaatgggcctatgatgattctggaccaccgggtgctctcggagaaattactgctagaaagtacttgcgcgatgtagttgccggcctcatgtaccttcatgctcataatgtaattcatggtgacatcaaacctgacaatttactggttactagtaccgggagagtgaaaataggagatttcagtgtcagccaagtattcaaagatgatgatgatcaactccgtagatcacccggcactcctgtctttactgccccagaatgttgtttaggtataacatacagtggaagatctgcagatacgtgggcagtaggagttactttgtattgtatgattttaggacaatacccatttctgggtgatacacttcaagatacttatgacaagattgttcacaacccgttgataataccggaaggactcaatcctcgtctaagggacttgatcgaaggtctcctttgcaaagatccaaaccagaggatgacgttgaaagctgtggcggagcatccatggatcacaggagaagacggggctatttcggaatactgttgttggtgcaaacgcaaagctgaagaagaagaagatcaaaaccatagctgaaagctagtacgggtatatacttgattgaacatagcaatcatctcgttgcatgttggcgattagaagcgtttgcgtttgaagtttgttataagttttttggtatttgacgcaataccgttgttttgagcctctcttgattgtgtgtctcggtctgtcggtcatgtattgagaagactcttgatagtcttttttctctttgttttcttcact

SEQ ID NO: 84689 - protein, 396 aa, Arabidopsis thaliana
  peptide (1)..(396): Ceres Seq. ID no. 12676483
  misc_feature (108)..(369): Pfam Name: Protein kinase domain Pfam Description: Protein kinase domain
  misc_feature (1)..(396): Homolog of NCBI NO: 30692568 NR Description: protein kinase family [Arabidopsis thaliana]
  misc_feature (12)..(396): Homolog of NCBI NO: 11358840 NR Description: serine/threonine-protein kinase-like protein -
  misc_feature (1)..(396): Homolog of NCBI NO: 22327987 NR Description: serine/threonine-protein kinase - like protein; id: At5g60550.1, supported by cDNA: gi_20466759 [Arabidopsis
  misc_feature (1)..(396): Homolog of NCBI NO: 20466760 NR Description: serine/threonine-protein kinase-like protein
  misc_feature (1)..(396): Homolog of NCBI NO: 9757757 NR Description: serine/threonine-protein kinase-like protein
  misc_feature (22)..(389): Homolog of NCBI NO: 13324784 NR Description: putative protein kinase [Oryza sativa]
  misc_feature (213)..(396): Homolog of NCBI NO: 27437013 NR Description: calcium/calmodulin-dependent protein kinase 1 isoform b; CAMKK alpha protein [Homo sapiens]
  misc_feature (86)..(144): Homolog of NCBI NO: 27437013 NR Description: calcium/calmodulin-dependent protein kinase 1 isoform b; CAMKK alpha protein [Homo sapiens]
  misc_feature (159)..(194): Homolog of NCBI NO: 27437013 NR Description: calcium/calmodulin-dependent protein kinase 1 isoform b; CAMKK alpha protein [Homo sapiens]
  misc_feature (86)..(390): Homolog of NCBI NO: 23491819 NR Description: calcium/calmodulin-dependent protein kinase
MFCDSFAFAQVMSCFGCFGGSERSRHSPNPYDDDTYSHDSGETSNPGGDDEEGEEEEEVEELSRSKRSEEILKCKLQNGLVCRQFPVKETNKLTRGEDEDGNKTINEFVRERKIGSGSYGKVVLYRSTVDDKHYAIKAFHKSHLSRLRVAPSETAMGDVLREVMIMKTLEHPNIVNLIEVIDDPEFDDFYMVLEYVDGKWAYDDSGPPGALGEITARKYLRDVVAGLMYLHAHNVIHGDIKPDNLLVTSTGRVKIGDFSVSQVFKDDDDQLRRSPGTPVFTAPECCLGITYSGRSADTWAVGVTLYCMILGQYPFLGDTLQDTYDKIVHNPLIIPEGLNPRLRDLIEGLLCKDPNQRMTLKAVAEHPWITGEDGAISEYCCWCKRKAEEEEDQNHS

SEQ ID NO: 84690 - protein, 385 aa, Arabidopsis thaliana
  peptide (1)..(385): Ceres Seq. ID no. 12676484
  misc_feature (97)..(358): Pfam Name: Protein kinase domain Pfam Description: Protein kinase domain
  misc_feature (1)..(385): Homolog of NCBI NO: 30692568 NR Description: protein kinase family [Arabidopsis thaliana]
  misc_feature (1)..(385): Homolog of NCBI NO: 11358840 NR Description: serine/threonine-protein kinase-like protein -
  misc_feature (1)..(385): Homolog of NCBI NO: 22327987 NR Description: serine/threonine-protein kinase - like protein; id: At5g60550.1, supported by cDNA: gi_20466759 [Arabidopsis
  misc_feature (1)..(385): Homolog of NCBI NO: 20466760 NR Description: serine/threonine-protein kinase-like protein
  misc_feature (1)..(385): Homolog of NCBI NO: 9757757 NR Description: serine/threonine-protein kinase-like protein
  misc_feature (11)..(378): Homolog of NCBI NO: 13324784 NR Description: putative protein kinase [Oryza sativa]
  misc_feature (202)..(385): Homolog of NCBI NO: 27437013 NR Description: calcium/calmodulin-dependent protein kinase 1 isoform b; CAMKK alpha protein [Homo sapiens]
  misc_feature (75)..(133): Homolog of NCBI NO: 27437013 NR Description: calcium/calmodulin-dependent protein kinase 1 isoform b; CAMKK alpha protein [Homo sapiens]
  misc_feature (148)..(183): Homolog of NCBI NO: 27437013 NR Description: calcium/calmodulin-dependent protein kinase 1 isoform b; CAMKK alpha protein [Homo sapiens]
  misc_feature (75)..(379): Homolog of NCBI NO: 23491819 NR Description: calcium/calmodulin-dependent protein kinase
MSCFGCFGGSERSRHSPNPYDDDTYSHDSGETSNPGGDDEEGEEEEEVEELSRSKRSEEILKCKLQNGLVCRQFPVKETNKLTRGEDEDGNKTINEFVRERKIGSGSYGKVVLYRSTVDDKHYAIKAFHKSHLSRLRVAPSETAMGDVLREVMIMKTLEHPNIVNLIEVIDDPEFDDFYMVLEYVDGKWAYDDSGPPGALGEITARKYLRDVVAGLMYLHAHNVIHGDIKPDNLLVTSTGRVKIGDFSVSQVFKDDDDQLRRSPGTPVFTAPECCLGITYSGRSADTWAVGVTLYCMILGQYPFLGDTLQDTYDKIVHNPLIIPEGLNPRLRDLIEGLLCKDPNQRMTLKAVAEHPWITGEDGAISEYCCWCKRKAEEEEDQNHS

SEQ ID NO: 84691 - protein, 241 aa, Arabidopsis thaliana
  peptide (1)..(241): Ceres Seq. ID no. 12676485
  misc_feature (1)..(214): Pfam Name: Protein kinase domain Pfam Description: Protein kinase domain
  misc_feature (1)..(241): Homolog of NCBI NO: 30692568 NR Description: protein kinase family [Arabidopsis thaliana]
  misc_feature (1)..(241): Homolog of NCBI NO: 11358840 NR Description: serine/threonine-protein kinase-like protein -
  misc_feature (1)..(241): Homolog of NCBI NO: 22327987 NR Description: serine/threonine-protein kinase - like protein; id: At5g60550.1, supported by cDNA: gi_20466759 [Arabidopsis
  misc_feature (1)..(241): Homolog of NCBI NO: 20466760 NR Description: serine/threonine-protein kinase-like protein
  misc_feature (1)..(241): Homolog of NCBI NO: 9757757 NR Description: serine/threonine-protein kinase-like protein
  misc_feature (1)..(234): Homolog of NCBI NO: 13324784 NR Description: putative protein kinase [Oryza sativa]
  misc_feature (58)..(241): Homolog of NCBI NO: 27437013 NR Description: calcium/calmodulin-dependent protein kinase 1 isoform b; CAMKK alpha protein [Homo sapiens]
  misc_feature (4)..(39): Homolog of NCBI NO: 27437013 NR Description: calcium/calmodulin-dependent protein kinase 1 isoform b; CAMKK alpha protein [Homo sapiens]
  misc_feature (1)..(235): Homolog of NCBI NO: 23491819 NR Description: calcium/calmodulin-dependent protein kinase
  misc_feature (1)..(213): Homolog of NCBI NO: 19075860 NR Description: serine/threonine-protein kinase ssp1
MGDVLREVMIMKTLEHPNIVNLIEVIDDPEFDDFYMVLEYVDGKWAYDDSGPPGALGEITARKYLRDVVAGLMYLHAHNVIHGDIKPDNLLVTSTGRVKIGDFSVSQVFKDDDDQLRRSPGTPVFTAPECCLGITYSGRSADTWAVGVTLYCMILGQYPFLGDTLQDTYDKIVHNPLIIPEGLNPRLRDLIEGLLCKDPNQRMTLKAVAEHPWITGEDGAISEYCCWCKRKAEEEEDQNHS

SEQ ID NO: 84692 - DNA, 1480 bp, Arabidopsis thaliana
  misc_feature (1)..(1480): Ceres Seq. ID no. 12676486
  misc_feature: MA Experiment ID: 20000173 Result: Down-regulated in Transcription
  misc_feature: MA Experiment 20000173 PARAMETER Experiment Name: At_42deg_Heat_P Parameter: Age (day) Value: 14
  misc_feature: MA Experiment 20000173 PARAMETER Experiment Name: At_42deg_Heat_P Parameter: Organism Value: A. thaliana
  misc_feature: MA Experiment 20000173 PARAMETER Experiment Name: At_42deg_Heat_P Parameter: Plant Line Value: WS
  misc_feature: MA Experiment 20000173 PARAMETER Experiment Name: At_42deg_Heat_P Parameter: Temperature (deg C) Value: 42 vs. 22
  misc_feature: MA Experiment 20000173 PARAMETER Experiment Name: At_42deg_Heat_P Parameter: Timepoint (hr) Value: 6
  misc_feature: MA Experiment 20000173 PARAMETER Experiment Name: At_42deg_Heat_P Parameter: Tissue Value: Aerial
  misc_feature: MA Experiment ID: 20000184 Result: Down-regulated in Transcription
  misc_feature: MA Experiment 20000184 PARAMETER Experiment Name: At_Shoots__P Parameter: Age (day) Value: 7
  misc_feature: MA Experiment 20000184 PARAMETER Experiment Name: At_Shoots__P Parameter: Tissue Value: Shoots vs. Whole Plant
  misc_feature: MA Experiment ID: 20000185 Result: Down-regulated in Transcription
  misc_feature: MA Experiment 20000185 PARAMETER Experiment Name: At_Roots__P Parameter: Age (day) Value: 7 vs. 21
  misc_feature: MA Experiment 20000185 PARAMETER Experiment Name: At_Roots__P Parameter: Organism Value: A. thaliana
  misc_feature: MA Experiment 20000185 PARAMETER Experiment Name: At_Roots__P Parameter: Tissue Value: Roots vs. Whole Plant
  misc_feature: MA Experiment ID: 20000227 Result: Down-regulated in Transcription
  misc_feature: MA Experiment 20000227 PARAMETER Experiment Name: At_Root-Tips-vs-Tops_P Parameter: Tissue Value: Root Tips vs. Root Tops
  misc_feature: MA Experiment ID: 20000234 Result: Down-regulated in Transcription
  misc_feature: MA Experiment 20000234 PARAMETER Experiment Name: At_Siliques_P Parameter: Age (day) Value: 21
  misc_feature: MA Experiment 20000234 PARAMETER Experiment Name: At_Siliques_P Parameter: Organism Value: A. thaliana
  misc_feature: MA Experiment 20000234 PARAMETER Experiment Name: At_Siliques_P Parameter: Plant Line Value: WS
  misc_feature: MA Experiment 20000234 PARAMETER Experiment Name: At_Siliques_P Parameter: Tissue Value: Less Than 5mm Siliques vs. Whole Plant
  misc_feature: MA Experiment ID: 20000235 Result: Down-regulated in Transcription
  misc_feature: MA Experiment 20000235 PARAMETER Experiment Name: At_Siliques_P Parameter: Age (day) Value: 21
  misc_feature: MA Experiment 20000235 PARAMETER Experiment Name: At_Siliques_P Parameter: Organism Value: A. thaliana
  misc_feature: MA Experiment 20000235 PARAMETER Experiment Name: At_Siliques_P Parameter: Plant Line Value: WS
  misc_feature: MA Experiment 20000235 PARAMETER Experiment Name: At_Siliques_P Parameter: Tissue Value: 5-10mm Siliques vs. Whole Plant
  misc_feature: MA Experiment ID: 20000264 Result: Down-regulated in Transcription
  misc_feature: MA Experiment 20000264 PARAMETER Experiment Name: At_Open_Flower_P Parameter: Age (day) Value: 21
  misc_feature: MA Experiment 20000264 PARAMETER Experiment Name: At_Open_Flower_P Parameter: Plant Line Value: WS
  misc_feature: MA Experiment 20000264 PARAMETER Experiment Name: At_Open_Flower_P Parameter: Tissue Value: Open Flower vs. Whole Plant
  misc_feature: MA Experiment ID: 20000265 Result: Down-regulated in Transcription
  misc_feature: MA Experiment 20000265 PARAMETER Experiment Name: At_Open_Flower_P Parameter: Age (day) Value: 21
  misc_feature: MA Experiment 20000265 PARAMETER Experiment Name: At_Open_Flower_P Parameter: Plant Line Value: WS
  misc_feature: MA Experiment 20000265 PARAMETER Experiment Name: At_Open_Flower_P Parameter: Tissue Value: Closed Flower vs. Whole Plant
  misc_feature: MA Experiment ID: 20000268 Result: Down-regulated in Transcription
  misc_feature: MA Experiment 20000268 PARAMETER Experiment Name: At_100mM_NaCl__P Parameter: Age (day) Value: 14
  misc_feature: MA Experiment 20000268 PARAMETER Experiment Name: At_100mM_NaCl__P Parameter: Organism Value: A. thaliana
  misc_feature: MA Experiment 20000268 PARAMETER Experiment Name: At_100mM_NaCl__P Parameter: Plant Line Value: WS
  misc_feature: MA Experiment 20000268 PARAMETER Experiment Name: At_100mM_NaCl__P Parameter: Timepoint (hr) Value: 6
  misc_feature: MA Experiment 20000268 PARAMETER Experiment Name: At_100mM_NaCl__P Parameter: Tissue Value: Whole Plant
  misc_feature: MA Experiment 20000268 PARAMETER Experiment Name: At_100mM_NaCl__P Parameter: Treatment Value: 100mM NaCl vs. No Treatment
  misc_feature: MA Experiment ID: 20000286 Result: Down-regulated in Transcription
  misc_feature: MA Experiment 20000286 PARAMETER Experiment Name: At_Open_Flower_P Parameter: Age (day) Value: 21
  misc_feature: MA Experiment 20000286 PARAMETER Experiment Name: At_Open_Flower_P Parameter: Plant Line Value: WS
  misc_feature: MA Experiment 20000286 PARAMETER Experiment Name: At_Open_Flower_P Parameter: Tissue Value: Half Open vs. Whole Plant
  misc_feature: MA Experiment ID: 20000308 Result: Down-regulated in Transcription
  misc_feature: MA Experiment 20000308 PARAMETER Experiment Name: At_100mM_NaCl__P Parameter: Age (day) Value: 17
  misc_feature: MA Experiment 20000308 PARAMETER Experiment Name: At_100mM_NaCl__P Parameter: Organism Value: A. thaliana
  misc_feature: MA Experiment 20000308 PARAMETER Experiment Name: At_100mM_NaCl__P Parameter: Plant Line Value: WS
  misc_feature: MA Experiment 20000308 PARAMETER Experiment Name: At_100mM_NaCl__P Parameter: Timepoint (hr) Value: 72
  misc_feature: MA Experiment 20000308 PARAMETER Experiment Name: At_100mM_NaCl__P Parameter: Tissue Value: Whole Plant
  misc_feature: MA Experiment 20000308 PARAMETER Experiment Name: At_100mM_NaCl__P Parameter: Treatment Value: 100mM NaCl vs. No Treatment
  misc_feature: MA Experiment ID: 20000437 Result: Down-regulated in Transcription
  misc_feature: MA Experiment 20000437 PARAMETER Experiment Name: At_Drought_P Parameter: Age (day) Value: 8
  misc_feature: MA Experiment 20000437 PARAMETER Experiment Name: At_Drought_P Parameter: Organism Value: A. thaliana
  misc_feature: MA Experiment 20000437 PARAMETER Experiment Name: At_Drought_P Parameter: Plant Line Value: WS
  misc_feature: MA Experiment 20000437 PARAMETER Experiment Name: At_Drought_P Parameter: Timepoint (hr) Value: 24
  misc_feature: MA Experiment 20000437 PARAMETER Experiment Name: At_Drought_P Parameter: Tissue Value: Whole Plant
  misc_feature: MA Experiment 20000437 PARAMETER Experiment Name: At_Drought_P Parameter: Treatment Value: Drought vs. No Drought
  misc_feature: MA Experiment ID: 20000438 Result: Down-regulated in Transcription
  misc_feature: MA Experiment 20000438 PARAMETER Experiment Name: At_Shoots__P Parameter: Age (day) Value: 14
  misc_feature: MA Experiment 20000438 PARAMETER Experiment Name: At_Shoots__P Parameter: Tissue Value: Shoots vs. Whole Plant
  misc_feature: MA Experiment ID: 20000439 Result: Down-regulated in Transcription
  misc_feature: MA Experiment 20000439 PARAMETER Experiment Name: At_Roots__P Parameter: Age (day) Value: 14 vs. 21
  misc_feature: MA Experiment 20000439 PARAMETER Experiment Name: At_Roots__P Parameter: Organism Value: A. thaliana
  misc_feature: MA Experiment 20000439 PARAMETER Experiment Name: At_Roots__P Parameter: Tissue Value: Roots vs. Whole Plant
  misc_feature: MA Experiment ID: 20000441 Result: Up-regulated in Transcription
  misc_feature: MA Experiment 20000441 PARAMETER Experiment Name: At_1uM_BR-BRZ__P Parameter: Tissue Value: Shoot Apices
  misc_feature: MA Experiment 20000441 PARAMETER Experiment Name: At_1uM_BR-BRZ__P Parameter: Treatment Value: 1uM BR vs. No Treatment
  misc_feature: MA Experiment ID: 20000452 Result: Up-regulated in Transcription
  misc_feature: MA Experiment 20000452 PARAMETER Experiment Name: At_CS6879_Shoots-Roots_P Parameter: Age (day) Value: 14
  misc_feature: MA Experiment 20000452 PARAMETER Experiment Name: At_CS6879_Shoots-Roots_P Parameter: Organism Value: A. thaliana
  misc_feature: MA Experiment 20000452 PARAMETER Experiment Name: At_CS6879_Shoots-Roots_P Parameter: Plant Line Value: CS6879 vs. WS
  misc_feature: MA Experiment 20000452 PARAMETER Experiment Name: At_CS6879_Shoots-Roots_P Parameter: Tissue Value: Shoots
  misc_feature: MA Experiment ID: 20000460 Result: Up-regulated in Transcription
  misc_feature: MA Experiment 20000460 PARAMETER Experiment Name: At_10percent_PEG_P Parameter: Age (day) Value: 12
  misc_feature: MA Experiment 20000460 PARAMETER Experiment Name: At_10percent_PEG_P Parameter: Organism Value: A. thaliana
  misc_feature: MA Experiment 20000460 PARAMETER Experiment Name: At_10percent_PEG_P Parameter: Plant Line Value: WS
  misc_feature: MA Experiment 20000460 PARAMETER Experiment Name: At_10percent_PEG_P Parameter: Timepoint (day) Value: 12
  misc_feature: MA Experiment 20000460 PARAMETER Experiment Name: At_10percent_PEG_P Parameter: Tissue Value: Whole Plant
  misc_feature: MA Experiment 20000460 PARAMETER Experiment Name: At_10percent_PEG_P Parameter: Treatment Value: 10percent PEG vs. No Treatment
  misc_feature: MA Experiment ID: 20000495 Result: Down-regulated in Transcription
  misc_feature: MA Experiment 20000495 PARAMETER Experiment Name: At_Guard_Cells_P Parameter: Harvest Date Value: 8/2/2002
  misc_feature: MA Experiment 20000495 PARAMETER Experiment Name: At_Guard_Cells_P Parameter: Organism Value: A. thaliana
  misc_feature: MA Experiment 20000495 PARAMETER Experiment Name: At_Guard_Cells_P Parameter: Tissue Value: Guard Cells vs. Leaves
  misc_feature: MA Experiment ID: 20000573 Result: Down-regulated in Transcription
  misc_feature: MA Experiment 20000573 PARAMETER Experiment Name: At_100uM_ABA_Mutants__P Parameter: Organism Value: A. thaliana
  misc_feature: MA Experiment 20000573 PARAMETER Experiment Name: At_100uM_ABA_Mutants__P Parameter: Plant Line Value: CS22 vs. Ler wt
  misc_feature: MA Experiment 20000573 PARAMETER Experiment Name: At_100uM_ABA_Mutants__P Parameter: Timepoint (hr) Value: N/A
  misc_feature: MA Experiment 20000573 PARAMETER Experiment Name: At_100uM_ABA_Mutants__P Parameter: Tissue Value: Whole Plant
  misc_feature: MA Experiment 20000573 PARAMETER Experiment Name: At_100uM_ABA_Mutants__P Parameter: Treatment Value: None
  misc_feature: MA Experiment ID: 20000574 Result: Down-regulated in Transcription
  misc_feature: MA Experiment 20000574 PARAMETER Experiment Name: At_100uM_ABA_Mutants__P Parameter: Organism Value: A. thaliana
  misc_feature: MA Experiment 20000574 PARAMETER Experiment Name: At_100uM_ABA_Mutants__P Parameter: Plant Line Value: CS23 vs. Ler wt
  misc_feature: MA Experiment 20000574 PARAMETER Experiment Name: At_100uM_ABA_Mutants__P Parameter: Timepoint (hr) Value: N/A
  misc_feature: MA Experiment 20000574 PARAMETER Experiment Name: At_100uM_ABA_Mutants__P Parameter: Tissue Value: Whole Plant
  misc_feature: MA Experiment 20000574 PARAMETER Experiment Name: At_100uM_ABA_Mutants__P Parameter: Treatment Value: None
  misc_feature: MA Experiment ID: 20000794 Result: Down-regulated in Transcription
  misc_feature: MA Experiment 20000794 PARAMETER Experiment Name: At_Petals_P Parameter: Age (day) Value: 23-25 days
  misc_feature: MA Experiment 20000794 PARAMETER Experiment Name: At_Petals_P Parameter: Plant Line Value: WS
  misc_feature: MA Experiment 20000794 PARAMETER Experiment Name: At_Petals_P Parameter: Tissue Value: Petals vs. Whole plant
  misc_feature: MA Experiment ID: 20001451 Result: Down-regulated in Transcription
  misc_feature: MA Experiment 20001451 PARAMETER Experiment Name: At_Far-red-induction_P Parameter: Age (day) Value: 7
  misc_feature: MA Experiment 20001451 PARAMETER Experiment Name: At_Far-red-induction_P Parameter: Light Value: Far-red vs. White
  misc_feature: MA Experiment 20001451 PARAMETER Experiment Name: At_Far-red-induction_P Parameter: Organism Value: A. thaliana
  misc_feature: MA Experiment 20001451 PARAMETER Experiment Name: At_Far-red-induction_P Parameter: Plant Line Value: Columbia
  misc_feature: MA Experiment 20001451 PARAMETER Experiment Name: At_Far-red-induction_P Parameter: Timepoint (hr) Value: 24
  misc_feature: MA Experiment 20001451 PARAMETER Experiment Name: At_Far-red-induction_P Parameter: Tissue Value: Whole Plant
  misc_feature: MA Experiment ID: 20001557 Result: Down-regulated in Transcription
  misc_feature: MA Experiment 20001557 PARAMETER Experiment Name: At_Drought_Soil_Dry_P Parameter: Age (day) Value: 27
  misc_feature: MA Experiment 20001557 PARAMETER Experiment Name: At_Drought_Soil_Dry_P Parameter: Organism Value: A. thaliana
  misc_feature: MA Experiment 20001557 PARAMETER Experiment Name: At_Drought_Soil_Dry_P Parameter: Plant Line Value: WS
  misc_feature: MA Experiment 20001557 PARAMETER Experiment Name: At_Drought_Soil_Dry_P Parameter: Post Timepoint (hr) Value: 3
  misc_feature: MA Experiment 20001557 PARAMETER Experiment Name: At_Drought_Soil_Dry_P Parameter: Post-Treatment Value: Re-Water vs. No Drought
  misc_feature: MA Experiment 20001557 PARAMETER Experiment Name: At_Drought_Soil_Dry_P Parameter: Timepoint (day) Value: 13
  misc_feature: MA Experiment 20001557 PARAMETER Experiment Name: At_Drought_Soil_Dry_P Parameter: Treatment Value: Drought vs. No Drought
  misc_feature: MA Experiment ID: 20001560 Result: Down-regulated in Transcription
  misc_feature: MA Experiment 20001560 PARAMETER Experiment Name: At_Drought_Soil_Dry_P Parameter: Age (day) Value: 28
  misc_feature: MA Experiment 20001560 PARAMETER Experiment Name: At_Drought_Soil_Dry_P Parameter: Organism Value: A. thaliana
  misc_feature: MA Experiment 20001560 PARAMETER Experiment Name: At_Drought_Soil_Dry_P Parameter: Plant Line Value: WS
  misc_feature: MA Experiment 20001560 PARAMETER Experiment Name: At_Drought_Soil_Dry_P Parameter: Post Timepoint (hr) Value: None
  misc_feature: MA Experiment 20001560 PARAMETER Experiment Name: At_Drought_Soil_Dry_P Parameter: Post-Treatment Value: None
  misc_feature: MA Experiment 20001560 PARAMETER Experiment Name: At_Drought_Soil_Dry_P Parameter: Timepoint (day) Value: 14
  misc_feature: MA Experiment 20001560 PARAMETER Experiment Name: At_Drought_Soil_Dry_P Parameter: Treatment Value: Drought vs. No Drought
  misc_feature: MA Experiment ID: 20001904 Result: Down-regulated in Transcription
  misc_feature: MA Experiment 20001904 PARAMETER Experiment Name: At_Drought_Reproduction_P Parameter: Age (day) Value: 37
  misc_feature: MA Experiment 20001904 PARAMETER Experiment Name: At_Drought_Reproduction_P Parameter: Organism Value: A. thaliana
  misc_feature: MA Experiment 20001904 PARAMETER Experiment Name: At_Drought_Reproduction_P Parameter: Plant Line Value: WS
  misc_feature: MA Experiment 20001904 PARAMETER Experiment Name: At_Drought_Reproduction_P Parameter: Timepoint (day) Value: 7
  misc_feature: MA Experiment 20001904 PARAMETER Experiment Name: At_Drought_Reproduction_P Parameter: Tissue Value: Rosettes
  misc_feature: MA Experiment 20001904 PARAMETER Experiment Name: At_Drought_Reproduction_P Parameter: Treatment Value: Drought vs. No Drought
accgcgaaaactcatctctgctcaatcctcaatctcagtctctctgttgactccgactgttatataaaaccatacaaataccttcagattcactacttcaaacctcaaagcaaccactgaatctcgactttgatcaattgagagagaaatgaacaccggcggtggccaatacacggattttccggcggtggaaactcacggaggacagttcataagttacgatatcttcggtagtttattcgagatcacatctaagtatcgtcctccgattataccaattggtcgtggagcttatggaatcgtttgctctgtgttggatacggagacgaacgagctagtagcgatgaagaagatagctaatgcttttgataatcatatggatgctaagcgtacgcttcgtgagatcaagcttcttcgtcatcttgatcatgaaaacattatagctataagagatgttgttccaccaccactaagaagacagttcagtgatgtttatatctctactgaattaatggatactgatcttcatcaaatcatcagatctaaccagagtttatcagaagaacactgtcagtacttcttgtaccagctacttcgaggactgaagtatatccactcagctaacattattcatagggatttaaagccgagcaatcttctgttgaacgcgaattgcgatttaaagatttgtgatttcggtcttgctagacctacttcagagaatgattttatgactgagtatgttgttacgagatggtatagagcacctgagcttctgttgaactcttcagattacacagctgctattgatgtttggtctgttggttgtatctttatggagcttatgaatagaaagcctttgttccctggtaaagaccatgttcatcaaatgcgcttattgacagagttgcttggcacaccgacagaatctgatctcggttttactcacaatgaggatgcgaaaagatacatccggcaacttcccaacttcccacgtcagcccttagctaaacttttctctcatgttaacccaatggccattgatcttgttgacagaatgttgacgtttgaccccaacagaagaatcactgttgaacaagctctgaatcaccagtaccttgctaaattgcacgacccgaatgatgagccaatctgtcaaaagccattctcttttgagttcgaacaacagcctctggatgaggaacagataaaagagatgatctaccaagaagccatagcactcaatccaacatacggttagaagtgcagcagccccgtgaatgcctggtattacccaataaccatccgaatggctacttagtatctttgcctgttcttttattcatgtacttcttccacatatgtaatcttgtaacttttatttgtttgttcatgttatttactgctagtgattaagtgtagctccaatgtaaagtactccagttattaaagaatatctatagacttttttacttcacat

SEQ ID NO: 84693 - protein, 370 aa, Arabidopsis thaliana
  peptide (1)..(370): Ceres Seq. ID no. 12676487
  misc_feature (38)..(324): Pfam Name: Protein kinase domain Pfam Description: Protein kinase domain
  misc_feature (1)..(370): Homolog of NCBI NO: 15231196 NR Description: mitogen-activated protein kinase 3; protein id: supported by cDNA: gi_14423447, supported by cDNA: gi_457397
  misc_feature (1)..(370): Homolog of NCBI NO: 629544 NR Description: mitogen-activated protein kinase 3 (EC 2.7.1.-) - thaliana >gi|457398|dbj|BAA04866.1| MAP kinase [Arabidopsis
  misc_feature (1)..(369): Homolog of NCBI NO: 18143321 NR Description: wound induced protein kinase [Nicotiana tabacum]
  misc_feature (10)..(369): Homolog of NCBI NO: 8132287 NR Description: MAP kinase 3 [Pisum sativum]
  misc_feature (1)..(369): Homolog of NCBI NO: 7434295 NR Description: mitogen-activated protein kinase (EC 2.7.1.-) - common tobacco >gi|1136298|dbj|BAA09600.1| WIPK [Nicotiana
  misc_feature (4)..(369): Homolog of NCBI NO: 27374988 NR Description: wound-inuduced protein kinase [Nicotiana
  misc_feature (10)..(369): Homolog of NCBI NO: 7434328 NR Description: protein kinase MMK4 (EC 2.7.1.-), cold- and
  misc_feature (2)..(367): Homolog of NCBI NO: 7434315 NR Description: mitogen-activated protein kinase I (EC 2.7.1.-) -
  misc_feature (1)..(369): Homolog of NCBI NO: 30171845 NR Description: mitogen-activated protein kinase 3 [Lycopersicon
  misc_feature (1)..(369): Homolog of NCBI NO: 8925321 NR Description: MAP kinase 1 [Capsicum annuum]
MNTGGGQYTDFPAVETHGGQFISYDIFGSLFEITSKYRPPIIPIGRGAYGIVCSVLDTETNELVAMKKIANAFDNHMDAKRTLREIKLLRHLDHENIIAIRDVVPPPLRRQFSDVYISTELMDTDLHQIIRSNQSLSEEHCQYFLYQLLRGLKYIHSANIIHRDLKPSNLLLNANCDLKICDFGLARPTSENDFMTEYVVTRWYRAPELLLNSSDYTAAIDVWSVGCIFMELMNRKPLFPGKDHVHQMRLLTELLGTPTESDLGFTHNEDAKRYIRQLPNFPRQPLAKLFSHVNPMAIDLVDRMLTFDPNRRITVEQALNHQYLAKLHDPNDEPICQKPFSFEFEQQPLDEEQIKEMIYQEAIALNPTYG

SEQ ID NO: 84694 - protein, 305 aa, Arabidopsis thaliana
  peptide (1)..(305): Ceres Seq. ID no. 12676488
  misc_feature (1)..(259): Pfam Name: Protein kinase domain Pfam Description: Protein kinase domain
  misc_feature (1)..(305): Homolog of NCBI NO: 15231196 NR Description: mitogen-activated protein kinase 3; protein id: supported by cDNA: gi_14423447, supported by cDNA: gi_457397
  misc_feature (1)..(305): Homolog of NCBI NO: 629544 NR Description: mitogen-activated protein kinase 3 (EC 2.7.1.-) - thaliana >gi|457398|dbj|BAA04866.1| MAP kinase [Arabidopsis
  misc_feature (1)..(304): Homolog of NCBI NO: 18143321 NR Description: wound induced protein kinase [Nicotiana tabacum]
  misc_feature (1)..(304): Homolog of NCBI NO: 8132287 NR Description: MAP kinase 3 [Pisum sativum]
  misc_feature (1)..(304): Homolog of NCBI NO: 7434295 NR Description: mitogen-activated protein kinase (EC 2.7.1.-) - common tobacco >gi|1136298|dbj|BAA09600.1| WIPK [Nicotiana
  misc_feature (1)..(304): Homolog of NCBI NO: 27374988 NR Description: wound-inuduced protein kinase [Nicotiana
  misc_feature (1)..(304): Homolog of NCBI NO: 7434328 NR Description: protein kinase MMK4 (EC 2.7.1.-), cold- and
  misc_feature (1)..(302): Homolog of NCBI NO: 7434315 NR Description: mitogen-activated protein kinase I (EC 2.7.1.-) -
  misc_feature (1)..(304): Homolog of NCBI NO: 30171845 NR Description: mitogen-activated protein kinase 3 [Lycopersicon
  misc_feature (1)..(304): Homolog of NCBI NO: 8925321 NR Description: MAP kinase 1 [Capsicum annuum]
MKKIANAFDNHMDAKRTLREIKLLRHLDHENIIAIRDVVPPPLRRQFSDVYISTELMDTDLHQIIRSNQSLSEEHCQYFLYQLLRGLKYIHSANIIHRDLKPSNLLLNANCDLKICDFGLARPTSENDFMTEYVVTRWYRAPELLLNSSDYTAAIDVWSVGCIFMELMNRKPLFPGKDHVHQMRLLTELLGTPTESDLGFTHNEDAKRYIRQLPNFPRQPLAKLFSHVNPMAIDLVDRMLTFDPNRRITVEQALNHQYLAKLHDPNDEPICQKPFSFEFEQQPLDEEQIKEMIYQEAIALNPTYG

SEQ ID NO: 84695 - protein, 294 aa, Arabidopsis thaliana
  peptide (1)..(294): Ceres Seq. ID no. 12676489
  misc_feature (1)..(248): Pfam Name: Protein kinase domain Pfam Description: Protein kinase domain
  misc_feature (1)..(294): Homolog of NCBI NO: 15231196 NR Description: mitogen-activated protein kinase 3; protein id: supported by cDNA: gi_14423447, supported by cDNA: gi_457397
  misc_feature (1)..(294): Homolog of NCBI NO: 629544 NR Description: mitogen-activated protein kinase 3 (EC 2.7.1.-) - thaliana >gi|457398|dbj|BAA04866.1| MAP kinase [Arabidopsis
  misc_feature (1)..(293): Homolog of NCBI NO: 18143321 NR Description: wound induced protein kinase [Nicotiana tabacum]
  misc_feature (1)..(293): Homolog of NCBI NO: 8132287 NR Description: MAP kinase 3 [Pisum sativum]
  misc_feature (1)..(293): Homolog of NCBI NO: 7434295 NR Description: mitogen-activated protein kinase (EC 2.7.1.-) - common tobacco >gi|1136298|dbj|BAA09600.1| WIPK [Nicotiana
  misc_feature (1)..(293): Homolog of NCBI NO: 27374988 NR Description: wound-inuduced protein kinase [Nicotiana
  misc_feature (1)..(293): Homolog of NCBI NO: 7434328 NR Description: protein kinase MMK4 (EC 2.7.1.-), cold- and
  misc_feature (1)..(291): Homolog of NCBI NO: 7434315 NR Description: mitogen-activated protein kinase I (EC 2.7.1.-) -
  misc_feature (1)..(293): Homolog of NCBI NO: 30171845 NR Description: mitogen-activated protein kinase 3 [Lycopersicon
  misc_feature (1)..(293): Homolog of NCBI NO: 8925321 NR Description: MAP kinase 1 [Capsicum annuum]
MDAKRTLREIKLLRHLDHENIIAIRDVVPPPLRRQFSDVYISTELMDTDLHQIIRSNQSLSEEHCQYFLYQLLRGLKYIHSANIIHRDLKPSNLLLNANCDLKICDFGLARPTSENDFMTEYVVTRWYRAPELLLNSSDYTAAIDVWSVGCIFMELMNRKPLFPGKDHVHQMRLLTELLGTPTESDLGFTHNEDAKRYIRQLPNFPRQPLAKLFSHVNPMAIDLVDRMLTFDPNRRITVEQALNHQYLAKLHDPNDEPICQKPFSFEFEQQPLDEEQIKEMIYQEAIALNPTYG

SEQ ID NO: 84696 - DNA, 1983 bp, Arabidopsis thaliana
  misc_feature (1)..(1983): Ceres Seq. ID no. 12676532
  misc_feature: MA Experiment ID: 20000173 Result: Down-regulated in Transcription
  misc_feature: MA Experiment 20000173 PARAMETER Experiment Name: At_42deg_Heat_P Parameter: Age (day) Value: 14
  misc_feature: MA Experiment 20000173 PARAMETER Experiment Name: At_42deg_Heat_P Parameter: Organism Value: A. thaliana
  misc_feature: MA Experiment 20000173 PARAMETER Experiment Name: At_42deg_Heat_P Parameter: Plant Line Value: WS
  misc_feature: MA Experiment 20000173 PARAMETER Experiment Name: At_42deg_Heat_P Parameter: Temperature (deg C) Value: 42 vs. 22
  misc_feature: MA Experiment 20000173 PARAMETER Experiment Name: At_42deg_Heat_P Parameter: Timepoint (hr) Value: 6
  misc_feature: MA Experiment 20000173 PARAMETER Experiment Name: At_42deg_Heat_P Parameter: Tissue Value: Aerial
  misc_feature: MA Experiment ID: 20000234 Result: Up-regulated in Transcription
  misc_feature: MA Experiment 20000234 PARAMETER Experiment Name: At_Siliques_P Parameter: Age (day) Value: 21
  misc_feature: MA Experiment 20000234 PARAMETER Experiment Name: At_Siliques_P Parameter: Organism Value: A. thaliana
  misc_feature: MA Experiment 20000234 PARAMETER Experiment Name: At_Siliques_P Parameter: Plant Line Value: WS
  misc_feature: MA Experiment 20000234 PARAMETER Experiment Name: At_Siliques_P Parameter: Tissue Value: Less Than 5mm Siliques vs. Whole Plant
  misc_feature: MA Experiment ID: 20001451 Result: Down-regulated in Transcription
  misc_feature: MA Experiment 20001451 PARAMETER Experiment Name: At_Far-red-induction_P Parameter: Age (day) Value: 7
  misc_feature: MA Experiment 20001451 PARAMETER Experiment Name: At_Far-red-induction_P Parameter: Light Value: Far-red vs. White
  misc_feature: MA Experiment 20001451 PARAMETER Experiment Name: At_Far-red-induction_P Parameter: Organism Value: A. thaliana
  misc_feature: MA Experiment 20001451 PARAMETER Experiment Name: At_Far-red-induction_P Parameter: Plant Line Value: Columbia
  misc_feature: MA Experiment 20001451 PARAMETER Experiment Name: At_Far-red-induction_P Parameter: Timepoint (hr) Value: 24
  misc_feature: MA Experiment 20001451 PARAMETER Experiment Name: At_Far-red-induction_P Parameter: Tissue Value: Whole Plant
gtcttccgttgcgtgagatattattgaacggtgtttgttattcggagaagaagaagaagaagaactgaagaagcatattcgacggtcaccaccaaacctcttccgtcggattttcactctccgtttatcgaacatctgagatctctctccacttccgtcaccgaagatgcattccagtcatcttcttctcgaggagccgatcaggatggcttcaatcctcgagccttccaaatctagtttcttcccggcattgactaagatcgtcggaactctaggtcctaaatcccgatccgtcgaggctctctccggctgtctcaaagccggcatgtctgtggctcgatttgatttctcgtggggagatgctgattatcaccaggagacacttgataatttgaaagttgctgtgaggagcactaagaagctttgtgctgttatgcttgatactgttggacctgagctacaagttattaacaaatctgagaaagctattactttgaaagctgatggccttgtaactttgacaccgaatcaagatcaagaagcttcttctgaagttcttcccattaatttcaatggacttgccaaggcagtgaagaaaggagacaccatcttcgttgggcaatacctattcactggtagtgaaacaacttcagtttggctcgaggttgatgaagttaaaggagatgatgtcatttgcctttcaaggaatgctgctactctggctggttctttgttcactttacactcctctcaagttcacattgatctcccaacgcttacagagaaggataaggaggttataagcacatggggagttcaaaataaaatcgattttctctcattgtcttattgtcgtcatgctgaggatgttcgccagacccgtgaaatgcttaaaaagttgggcgacctctctcaaacacaaatatttgctaagattgagaacgtagagggactaacccacttcgatgagattctacaagaagctgatggcattattctttctcgtgggaatttgggtatagatttacccccggaaaaggtgtttttgtttcaaaaggctgctctttacaagtgcaacatggctggaaagccagctgttcttacccgtgttgttgacagtatgactgacaacttgcgaccaactcgtgctgaggccacggatgttgctaatgctgttttagatggaagtgatgcaattcttcttggtgctgagacccttcgtggattgtaccctgttgagacaatatcaactgttggtaggatctgtgctgaggcagaaaaggttttcaatcaagatttgtactttaagaagactgtcaagtatgttggagaaccaatgactcacttggaatcgattgcttcttcagctgtacgggcagccattaaggttaaggcatccgtaattatatgcttcacctcttctggaagagcagccagattgattgccaaatacaggccaacgatgccggttatttctgttgtcattccccgggttaagacaaatcaactgaaatggagctttagtggagcttttgaggcgaggcagtcacttattgtcagaggcctcttccctatgcttgctgaccctcgtcaccctgcggaatctacaagtgcgacaaacgagtcagtcctgaaggttgctctagaccatgggaagcatgctggagtaatcaagtcgcatgacagagtagtggtgtgtcagaaagttggtgatgcatctgtggttaagatcattgagcttgaggattaacttttgcctcgcaaaaacattatataattggctgcattttgggttgccttgaattgatgataactcccaatgccggagtgaaaatattatctccgggacttctggtttctttttgtatacttaggagatttgatgtctctaaggtttcagctatatttgattaccttcaaatgtacgcatatgataaaagtatacaatgcctagcaattttataataagctgttacattccct

SEQ ID NO: 84697 - protein, 527 aa, Arabidopsis thaliana; identical to SEQ ID NO: 28911
  peptide (1)..(527): Ceres Seq. ID no. 12676533
  misc_feature (394)..(524): Pfam Name: Pyruvate kinase, alpha/beta domain Pfam Description: Pyruvate kinase, alpha/beta domain
  misc_feature (1)..(527): Homolog of NCBI NO: 18409740 NR Description: pyruvate kinase - like protein; protein id: supported by cDNA: 12298., supported by cDNA: gi_14194098 thaliana] >gi|14194099|gb|AAK56244.1|AF367255_1
  misc_feature (14)..(527): Homolog of NCBI NO: 11260409 NR Description: pyruvate kinase-like protein - Arabidopsis
  misc_feature (1)..(527): Homolog of NCBI NO: 18404169 NR Description: putative pyruvate kinase; protein id: supported by cDNA: 120685., supported by cDNA: gi_17978969 thaliana] >gi|17978970|gb|AAL47446.1| At2g36580/F1O11.21
  misc_feature (1)..(527): Homolog of NCBI NO: 21537122 NR Description: putative pyruvate kinase [Arabidopsis thaliana]
  misc_feature (1)..(527): Homolog of NCBI NO: 23308151 NR Description: At2g36580/F1O11.21 [Arabidopsis thaliana]
  misc_feature (37)..(527): Homolog of NCBI NO: 20562907 NR Description: pyruvate kinase-like [Deschampsia antarctica]
  misc_feature (54)..(527): Homolog of NCBI NO: 25287747 NR Description: probable pyruvate kinase [imported] - Arabidopsis

SEQ ID NO: 84698 - protein, 514 aa, Arabidopsis thaliana; identical to SEQ ID NO: 28912
  peptide (1)..(514): Ceres Seq. ID no. 12676534
  misc_feature (381)..(511): Pfam Name: Pyruvate kinase, alpha/beta domain Pfam Description: Pyruvate kinase, alpha/beta domain
  misc_feature (1)..(514): Homolog of NCBI NO: 18409740 NR Description: pyruvate kinase - like protein; protein id: supported by cDNA: 12298., supported by cDNA: gi_14194098 thaliana] >gi|14194099|gb|AAK56244.1|AF367255_1
  misc_feature (1)..(514): Homolog of NCBI NO: 11260409 NR Description: pyruvate kinase-like protein - Arabidopsis
  misc_feature (1)..(514): Homolog of NCBI NO: 18404169 NR Description: putative pyruvate kinase; protein id: supported by cDNA: 120685., supported by cDNA: gi_17978969 thaliana] >gi|17978970|gb|AAL47446.1| At2g36580/F1O11.21
  misc_feature (1)..(514): Homolog of NCBI NO: 21537122 NR Description: putative pyruvate kinase [Arabidopsis thaliana]
  misc_feature (1)..(514): Homolog of NCBI NO: 23308151 NR Description: At2g36580/F1O11.21 [Arabidopsis thaliana]
  misc_feature (24)..(514): Homolog of NCBI NO: 20562907 NR Description: pyruvate kinase-like [Deschampsia antarctica]
  misc_feature (41)..(514): Homolog of NCBI NO: 25287747 NR Description: probable pyruvate kinase [imported] - Arabidopsis

SEQ ID NO: 84699 - protein, 474 aa, Arabidopsis thaliana; identical to SEQ ID NO: 28913
  peptide (1)..(474): Ceres Seq. ID no. 12676535
  misc_feature (341)..(471): Pfam Name: Pyruvate kinase, alpha/beta domain Pfam Description: Pyruvate kinase, alpha/beta domain
  misc_feature (1)..(474): Homolog of NCBI NO: 18409740 NR Description: pyruvate kinase - like protein; protein id: supported by cDNA: 12298., supported by cDNA: gi_14194098 thaliana] >gi|14194099|gb|AAK56244.1|AF367255_1
  misc_feature (1)..(474): Homolog of NCBI NO: 11260409 NR Description: pyruvate kinase-like protein - Arabidopsis
  misc_feature (1)..(474): Homolog of NCBI NO: 18404169 NR Description: putative pyruvate kinase; protein id: supported by cDNA: 120685., supported by cDNA: gi_17978969 thaliana] >gi|17978970|gb|AAL47446.1| At2g36580/F1O11.21
  misc_feature (1)..(474): Homolog of NCBI NO: 21537122 NR Description: putative pyruvate kinase [Arabidopsis thaliana]
  misc_feature (1)..(474): Homolog of NCBI NO: 23308151 NR Description: At2g36580/F1O11.21 [Arabidopsis thaliana]
  misc_feature (1)..(474): Homolog of NCBI NO: 20562907 NR Description: pyruvate kinase-like [Deschampsia antarctica]
  misc_feature (1)..(474): Homolog of NCBI NO: 25287747 NR Description: probable pyruvate kinase [imported] - Arabidopsis

SEQ ID NO: 84700 - DNA, 1434 bp, Arabidopsis thaliana
  misc_feature (1)..(1434): Ceres Seq. ID no. 12676536
  misc_feature: MA Experiment ID: 20000184 Result: Up-regulated in Transcription
  misc_feature: MA Experiment 20000184 PARAMETER Experiment Name: At_Shoots__P Parameter: Age (day) Value: 7
  misc_feature: MA Experiment 20000184 PARAMETER Experiment Name: At_Shoots__P Parameter: Tissue Value: Shoots vs. Whole Plant
  misc_feature: MA Experiment ID: 20000185 Result: Up-regulated in Transcription
  misc_feature: MA Experiment 20000185 PARAMETER Experiment Name: At_Roots__P Parameter: Age (day) Value: 7 vs. 21
  misc_feature: MA Experiment 20000185 PARAMETER Experiment Name: At_Roots__P Parameter: Organism Value: A. thaliana
  misc_feature: MA Experiment 20000185 PARAMETER Experiment Name: At_Roots__P Parameter: Tissue Value: Roots vs. Whole Plant
  misc_feature: MA Experiment ID: 20000227 Result: Down-regulated in Transcription
  misc_feature: MA Experiment 20000227 PARAMETER Experiment Name: At_Root-Tips-vs-Tops_P Parameter: Tissue Value: Root Tips vs. Root Tops
  misc_feature: MA Experiment ID: 20000439 Result: Up-regulated in Transcription
  misc_feature: MA Experiment 20000439 PARAMETER Experiment Name: At_Roots__P Parameter: Age (day) Value: 14 vs. 21
  misc_feature: MA Experiment 20000439 PARAMETER Experiment Name: At_Roots__P Parameter: Organism Value: A. thaliana
  misc_feature: MA Experiment 20000439 PARAMETER Experiment Name: At_Roots__P Parameter: Tissue Value: Roots vs. Whole Plant
  misc_feature: MA Experiment ID: 20000495 Result: Up-regulated in Transcription
  misc_feature: MA Experiment 20000495 PARAMETER Experiment Name: At_Guard_Cells_P Parameter: Harvest Date Value: 8/2/2002
  misc_feature: MA Experiment 20000495 PARAMETER Experiment Name: At_Guard_Cells_P Parameter: Organism Value: A. thaliana
  misc_feature: MA Experiment 20000495 PARAMETER Experiment Name: At_Guard_Cells_P Parameter: Tissue Value: Guard Cells vs. Leaves
  misc_feature: MA Experiment ID: 20000794 Result: Down-regulated in Transcription
  misc_feature: MA Experiment 20000794 PARAMETER Experiment Name: At_Petals_P Parameter: Age (day) Value: 23-25 days
  misc_feature: MA Experiment 20000794 PARAMETER Experiment Name: At_Petals_P Parameter: Plant Line Value: WS
  misc_feature: MA Experiment 20000794 PARAMETER Experiment Name: At_Petals_P Parameter: Tissue Value: Petals vs. Whole plant
  misc_feature: MA Experiment ID: 20001248 Result: Down-regulated in Transcription
  misc_feature: MA Experiment 20001248 PARAMETER Experiment Name: At_Far-red-induction_P Parameter: Age (day) Value: 7
  misc_feature: MA Experiment 20001248 PARAMETER Experiment Name: At_Far-red-induction_P Parameter: Light Value: Far-red vs. White
  misc_feature: MA Experiment 20001248 PARAMETER Experiment Name: At_Far-red-induction_P Parameter: Organism Value: A. thaliana
  misc_feature: MA Experiment 20001248 PARAMETER Experiment Name: At_Far-red-induction_P Parameter: Plant Line Value: Columbia
  misc_feature: MA Experiment 20001248 PARAMETER Experiment Name: At_Far-red-induction_P Parameter: Timepoint (hr) Value: 4
  misc_feature: MA Experiment 20001248 PARAMETER Experiment Name: At_Far-red-induction_P Parameter: Tissue Value: Whole Plant
  misc_feature: MA Experiment ID: 20001557 Result: Down-regulated in Transcription
  misc_feature: MA Experiment 20001557 PARAMETER Experiment Name: At_Drought_Soil_Dry_P Parameter: Age (day) Value: 27
  misc_feature: MA Experiment 20001557 PARAMETER Experiment Name: At_Drought_Soil_Dry_P Parameter: Organism Value: A. thaliana
  misc_feature: MA Experiment 20001557 PARAMETER Experiment Name: At_Drought_Soil_Dry_P Parameter: Plant Line Value: WS
  misc_feature: MA Experiment 20001557 PARAMETER Experiment Name: At_Drought_Soil_Dry_P Parameter: Post Timepoint (hr) Value: 3
  misc_feature: MA Experiment 20001557 PARAMETER Experiment Name: At_Drought_Soil_Dry_P Parameter: Post-Treatment Value: Re-Water vs. No Drought
  misc_feature: MA Experiment 20001557 PARAMETER Experiment Name: At_Drought_Soil_Dry_P Parameter: Timepoint (day) Value: 13
  misc_feature: MA Experiment 20001557 PARAMETER Experiment Name: At_Drought_Soil_Dry_P Parameter: Treatment Value: Drought vs. No Drought
  misc_feature: MA Experiment ID: 20001905 Result: Down-regulated in Transcription
  misc_feature: MA Experiment 20001905 PARAMETER Experiment Name: At_Drought_Reproduction_P Parameter: Age (day) Value: 40
  misc_feature: MA Experiment 20001905 PARAMETER Experiment Name: At_Drought_Reproduction_P Parameter: Organism Value: A. thaliana
  misc_feature: MA Experiment 20001905 PARAMETER Experiment Name: At_Drought_Reproduction_P Parameter: Plant Line Value: WS
  misc_feature: MA Experiment 20001905 PARAMETER Experiment Name: At_Drought_Reproduction_P Parameter: Timepoint (day) Value: 10
  misc_feature: MA Experiment 20001905 PARAMETER Experiment Name: At_Drought_Reproduction_P Parameter: Tissue Value: Rosettes
  misc_feature: MA Experiment 20001905 PARAMETER Experiment Name: At_Drought_Reproduction_P Parameter: Treatment Value: Drought vs. No Drought
  misc_feature: MA Experiment ID: 20001906 Result: Down-regulated in Transcription
  misc_feature: MA Experiment 20001906 PARAMETER Experiment Name: At_Drought_Reproduction_P Parameter: Age (day) Value: 35
  misc_feature: MA Experiment 20001906 PARAMETER Experiment Name: At_Drought_Reproduction_P Parameter: Organism Value: A. thaliana
  misc_feature: MA Experiment 20001906 PARAMETER Experiment Name: At_Drought_Reproduction_P Parameter: Plant Line Value: WS
  misc_feature: MA Experiment 20001906 PARAMETER Experiment Name: At_Drought_Reproduction_P Parameter: Timepoint (day) Value: 5
  misc_feature: MA Experiment 20001906 PARAMETER Experiment Name: At_Drought_Reproduction_P Parameter: Tissue Value: Siliques
  misc_feature: MA Experiment 20001906 PARAMETER Experiment Name: At_Drought_Reproduction_P Parameter: Treatment Value: Drought vs. No Drought
atttctttctctctgcttctctctcttctctatttgtcctaacgacctgattgcattagacaggaacgaaaaggaatgcaaaagatgagagtttcggggtttagagttcttctcttggtttcttgtttcttctgcaaatccaaaggagctgttgttcctgcactcatcatgtttggcgactccattgttgacgttggcaacaacaataacttactcagcattgtcaaatccaactttcttccttacggtagagacttcatcgaccaaagacccaccggaagattctgcaacggaaaactcgctgtagatttctcagccgagtaccttggtttctcttcatacccacctgcattcctaagccgggaagcaagcaacgagaatatcctgatcggtgccaactttgcatcagcttcttcaggatactatgatgccacatctgttccatttggctcgatctccttaacacgacagctgagctattacagggcgtatcaaaatagagtaacgagaatgatcgggagggggaacgcgcgcatactgttctctagaggtatccacattttgagtgcgggatctagcgactttcttcagaattattacatcaatcctctactcaacatcctaaatacacctgatcagttcgctgacattctcctgagatccttctcagaattcatccagaatctgtatgaactaggagcaaggagaatcggagtgatatcgctaccgccgatgggttgcctgcctgcagctatcactcttttcggtgcaggaaacaaaagttgtgttgagagactgaacaatgatgctatcatgttcaatactaaacttgagaacacaacccggttactgatgaatagacactcaggcctcagactcgtcgcctttaatgtctaccaacctttcctggacatcatcaccaacccaactgacaatggattctttgaaacaaaaagggcatgctgcggaacagggacaatagaaacatcgttcctttgcaattctctatccttcggaacgtgtgtaaatgccacaggatatgtgttttgggatggatttcatcccacagaggctgtaaacgagctgttggctggtcaactactgggtcaagggatttctctaatcaattgaattgagcttcattccagttggattgaattcaaactgtatacctacaaatagctaccaaagtttgtctctctctctctatctctctctcttctctctttctctttctctctctatatatgtaactcacaaataagagacagattgtgtgtgcgtgtgtgtgactgaatgtagaaactaccaatctggtctgtgtcactgtgtgatggcctgatgggtctataggtccaagatttgtttgagaagatcacaatctttggtattttatttttgttccgaatctacctctttaacatttctaaggtt

SEQ ID NO: 84701 - protein, 351 aa, Arabidopsis thaliana; identical to SEQ ID NO: 70245
  peptide (1)..(351): Ceres Seq. ID no. 12676537
  misc_feature (30)..(289): Pfam Name: GDSL-like Lipase/Acylhydrolase Pfam Description: GDSL-like Lipase/Acylhydrolase
  misc_feature (1)..(351): Homolog of NCBI NO: 30693763 NR Description: GDSL-motif lipase/hydrolase protein [Arabidopsis
  misc_feature (4)..(289): Homolog of NCBI NO: 11280580 NR Description: hypothetical protein T4D2.30 - Arabidopsis >gi|6630730|emb|CAB64213.1| putative protein [Arabidopsis
  misc_feature (321)..(351): Homolog of NCBI NO: 11280580 NR Description: hypothetical protein T4D2.30 - Arabidopsis >gi|6630730|emb|CAB64213.1| putative protein [Arabidopsis
  misc_feature (3)..(351): Homolog of NCBI NO: 9758010 NR Description: proline-rich protein APG-like [Arabidopsis
  misc_feature (3)..(351): Homolog of NCBI NO: 15237531 NR Description: putative protein; protein id: At5g03820.1
  misc_feature (34)..(351): Homolog of NCBI NO: 15237528 NR Description: putative protein; protein id: At5g03810.1
  misc_feature (26)..(351): Homolog of NCBI NO: 15237137 NR Description: GDSL-motif lipase/hydrolase-like protein; protein
  misc_feature (12)..(351): Homolog of NCBI NO: 13174242 NR Description: putative proline-rich protein [Oryza sativa]
  misc_feature (7)..(350): Homolog of NCBI NO: 15228189 NR Description: putative APG protein; protein id: At3g16370.1,
  misc_feature (33)..(350): Homolog of NCBI NO: 2062167 NR Description: Proline-rich protein APG isolog [Arabidopsis

SEQ ID NO: 84702 - protein, 348 aa, Arabidopsis thaliana; identical to SEQ ID NO: 70246
  peptide (1)..(348): Ceres Seq. ID no. 12676538
  misc_feature (27)..(286): Pfam Name: GDSL-like Lipase/Acylhydrolase Pfam Description: GDSL-like Lipase/Acylhydrolase
  misc_feature (1)..(348): Homolog of NCBI NO: 30693763 NR Description: GDSL-motif lipase/hydrolase protein [Arabidopsis
  misc_feature (1)..(286): Homolog of NCBI NO: 11280580 NR Description: hypothetical protein T4D2.30 - Arabidopsis >gi|6630730|emb|CAB64213.1| putative protein [Arabidopsis
  misc_feature (318)..(348): Homolog of NCBI NO: 11280580 NR Description: hypothetical protein T4D2.30 - Arabidopsis >gi|6630730|emb|CAB64213.1| putative protein [Arabidopsis
  misc_feature (1)..(348): Homolog of NCBI NO: 9758010 NR Description: proline-rich protein APG-like [Arabidopsis
  misc_feature (1)..(348): Homolog of NCBI NO: 15237531 NR Description: putative protein; protein id: At5g03820.1
  misc_feature (31)..(348): Homolog of NCBI NO: 15237528 NR Description: putative protein; protein id: At5g03810.1
  misc_feature (23)..(348): Homolog of NCBI NO: 15237137 NR Description: GDSL-motif lipase/hydrolase-like protein; protein
  misc_feature (9)..(348): Homolog of NCBI NO: 13174242 NR Description: putative proline-rich protein [Oryza sativa]
  misc_feature (4)..(347): Homolog of NCBI NO: 15228189 NR Description: putative APG protein; protein id: At3g16370.1,
  misc_feature (30)..(347): Homolog of NCBI NO: 2062167 NR Description: Proline-rich protein APG isolog [Arabidopsis

SEQ ID NO: 84703 - protein, 320 aa, Arabidopsis thaliana; identical to SEQ ID NO: 70247
  peptide (1)..(320): Ceres Seq. ID no. 12676539
  misc_feature (1)..(258): Pfam Name: GDSL-like Lipase/Acylhydrolase Pfam Description: GDSL-like Lipase/Acylhydrolase
  misc_feature (1)..(320): Homolog of NCBI NO: 30693763 NR Description: GDSL-motif lipase/hydrolase protein [Arabidopsis
  misc_feature (1)..(258): Homolog of NCBI NO: 11280580 NR Description: hypothetical protein T4D2.30 - Arabidopsis >gi|6630730|emb|CAB64213.1| putative protein [Arabidopsis
  misc_feature (290)..(320): Homolog of NCBI NO: 11280580 NR Description: hypothetical protein T4D2.30 - Arabidopsis >gi|6630730|emb|CAB64213.1| putative protein [Arabidopsis
  misc_feature (1)..(320): Homolog of NCBI NO: 9758010 NR Description: proline-rich protein APG-like [Arabidopsis
  misc_feature (1)..(320): Homolog of NCBI NO: 15237531 NR Description: putative protein; protein id: At5g03820.1
  misc_feature (3)..(320): Homolog of NCBI NO: 15237528 NR Description: putative protein; protein id: At5g03810.1
  misc_feature (1)..(320): Homolog of NCBI NO: 15237137 NR Description: GDSL-motif lipase/hydrolase-like protein; protein
  misc_feature (1)..(320): Homolog of NCBI NO: 13174242 NR Description: putative proline-rich protein [Oryza sativa]
  misc_feature (1)..(319): Homolog of NCBI NO: 15228189 NR Description: putative APG protein; protein id: At3g16370.1,
  misc_feature (2)..(319): Homolog of NCBI NO: 2062167 NR Description: Proline-rich protein APG isolog [Arabidopsis

SEQ ID NO: 84704 - DNA, 490 bp, Arabidopsis thaliana
  misc_feature (1)..(490): Ceres Seq. ID no. 12676582
  misc_feature: MA Experiment ID: 108433 Result: Down-regulated in Transcription
  misc_feature: MA Experiment 108433 PARAMETER Experiment Name: At_rhl_Mutant2_cDNA_P Parameter: Age (day) Value: 7
  misc_feature: MA Experiment 108433 PARAMETER Experiment Name: At_rhl_Mutant2_cDNA_P Parameter: Organism Value: A. thaliana
  misc_feature: MA Experiment 108433 PARAMETER Experiment Name: At_rhl_Mutant2_cDNA_P Parameter: Plant Line Value: rhl Mutant vs. wt landsburg
  misc_feature: MA Experiment 108433 PARAMETER Experiment Name: At_rhl_Mutant2_cDNA_P Parameter: Tissue Value: Roots
  misc_feature: MA Experiment ID: 108434 Result: Up-regulated in Transcription
  misc_feature: MA Experiment 108434 PARAMETER Experiment Name: At_Root_Tips_cDNA_P Parameter: Tissue Value: Root Tips
  misc_feature: MA Experiment ID: 108488 Result: Down-regulated in Transcription
  misc_feature: MA Experiment ID: 108569 Result: Down-regulated in Transcription
  misc_feature: MA Experiment 108569 PARAMETER Experiment Name: At_0.001%_MeJA__cDNA_P Parameter: Timepoint (hr) Value: 6
  misc_feature: MA Experiment 108569 PARAMETER Experiment Name: At_0.001%_MeJA__cDNA_P Parameter: Tissue Value: Aerial
  misc_feature: MA Experiment 108569 PARAMETER Experiment Name: At_0.001%_MeJA__cDNA_P Parameter: Treatment Value: 0.001% MeJA vs. No Treatment
  misc_feature: MA Experiment ID: 108573 Result: Down-regulated in Transcription
  misc_feature: MA Experiment 108573 PARAMETER Experiment Name: At_Drought_cDNA_P Parameter: Timepoint (hr) Value: 6
  misc_feature: MA Experiment 108573 PARAMETER Experiment Name: At_Drought_cDNA_P Parameter: Tissue Value: Aerial
  misc_feature: MA Experiment 108573 PARAMETER Experiment Name: At_Drought_cDNA_P Parameter: Treatment Value: Drought vs. No Drought
  misc_feature: MA Experiment ID: 108595 Result: Up-regulated in Transcription
  misc_feature: MA Experiment 108595 PARAMETER Experiment Name: At_Ler-pi_Ovule_cDNA_P Parameter: Plant Line Value: null
  misc_feature: MA Experiment ID: 20000093 Result: Down-regulated in Transcription
  misc_feature: MA Experiment 20000093 PARAMETER Experiment Name: At_42deg_Heat_cDNA_P Parameter: Temperature (deg C) Value: 42 vs. 22
  misc_feature: MA Experiment 20000093 PARAMETER Experiment Name: At_42deg_Heat_cDNA_P Parameter: Timepoint (hr) Value: 0.5
  misc_feature: MA Experiment 20000093 PARAMETER Experiment Name: At_42deg_Heat_cDNA_P Parameter: Tissue Value: Aerial
  misc_feature: MA Experiment ID: 20000112 Result: Down-regulated in Transcription
  misc_feature: MA Experiment 20000112 PARAMETER Experiment Name: At_42deg_Heat_cDNA_P Parameter: Temperature (deg C) Value: 42 vs. 22
  misc_feature: MA Experiment 20000112 PARAMETER Experiment Name: At_42deg_Heat_cDNA_P Parameter: Timepoint (hr) Value: 2
  misc_feature: MA Experiment 20000112 PARAMETER Experiment Name: At_42deg_Heat_cDNA_P Parameter: Tissue Value: Aerial
  misc_feature: MA Experiment ID: 20000171 Result: Down-regulated in Transcription
  misc_feature: MA Experiment 20000171 PARAMETER Experiment Name: At_42deg_Heat_P Parameter: Age (day) Value: 14
  misc_feature: MA Experiment 20000171 PARAMETER Experiment Name: At_42deg_Heat_P Parameter: Organism Value: A. thaliana
  misc_feature: MA Experiment 20000171 PARAMETER Experiment Name: At_42deg_Heat_P Parameter: Plant Line Value: WS
  misc_feature: MA Experiment 20000171 PARAMETER Experiment Name: At_42deg_Heat_P Parameter: Temperature (deg C) Value: 42 vs. 22
  misc_feature: MA Experiment 20000171 PARAMETER Experiment Name: At_42deg_Heat_P Parameter: Timepoint (hr) Value: 1
  misc_feature: MA Experiment 20000171 PARAMETER Experiment Name: At_42deg_Heat_P Parameter: Tissue Value: Aerial
  misc_feature: MA Experiment ID: 20000173 Result: Down-regulated in Transcription
  misc_feature: MA Experiment 20000173 PARAMETER Experiment Name: At_42deg_Heat_P Parameter: Age (day) Value: 14
  misc_feature: MA Experiment 20000173 PARAMETER Experiment Name: At_42deg_Heat_P Parameter: Organism Value: A. thaliana
  misc_feature: MA Experiment 20000173 PARAMETER Experiment Name: At_42deg_Heat_P Parameter: Plant Line Value: WS
  misc_feature: MA Experiment 20000173 PARAMETER Experiment Name: At_42deg_Heat_P Parameter: Temperature (deg C) Value: 42 vs. 22
  misc_feature: MA Experiment 20000173 PARAMETER Experiment Name: At_42deg_Heat_P Parameter: Timepoint (hr) Value: 6
  misc_feature: MA Experiment 20000173 PARAMETER Experiment Name: At_42deg_Heat_P Parameter: Tissue Value: Aerial
  misc_feature: MA Experiment ID: 20000437 Result: Down-regulated in Transcription
  misc_feature: MA Experiment 20000437 PARAMETER Experiment Name: At_Drought_P Parameter: Age (day) Value: 8
  misc_feature: MA Experiment 20000437 PARAMETER Experiment Name: At_Drought_P Parameter: Organism Value: A. thaliana
  misc_feature: MA Experiment 20000437 PARAMETER Experiment Name: At_Drought_P Parameter: Plant Line Value: WS
  misc_feature: MA Experiment 20000437 PARAMETER Experiment Name: At_Drought_P Parameter: Timepoint (hr) Value: 24
  misc_feature: MA Experiment 20000437 PARAMETER Experiment Name: At_Drought_P Parameter: Tissue Value: Whole Plant
  misc_feature: MA Experiment 20000437 PARAMETER Experiment Name: At_Drought_P Parameter: Treatment Value: Drought vs. No Drought
  misc_feature: MA Experiment ID: 20000451 Result: Up-regulated in Transcription
  misc_feature: MA Experiment 20000451 PARAMETER Experiment Name: At_CS6879_Shoots-Roots_P Parameter: Age (day) Value: 14
  misc_feature: MA Experiment 20000451 PARAMETER Experiment Name: At_CS6879_Shoots-Roots_P Parameter: Organism Value: A. thaliana
  misc_feature: MA Experiment 20000451 PARAMETER Experiment Name: At_CS6879_Shoots-Roots_P Parameter: Plant Line Value: CS6879 vs. WS
  misc_feature: MA Experiment 20000451 PARAMETER Experiment Name: At_CS6879_Shoots-Roots_P Parameter: Tissue Value: Roots
  misc_feature: MA Experiment ID: 20000452 Result: Up-regulated in Transcription
  misc_feature: MA Experiment 20000452 PARAMETER Experiment Name: At_CS6879_Shoots-Roots_P Parameter: Age (day) Value: 14
  misc_feature: MA Experiment 20000452 PARAMETER Experiment Name: At_CS6879_Shoots-Roots_P Parameter: Organism Value: A. thaliana
  misc_feature: MA Experiment 20000452 PARAMETER Experiment Name: At_CS6879_Shoots-Roots_P Parameter: Plant Line Value: CS6879 vs. WS
  misc_feature: MA Experiment 20000452 PARAMETER Experiment Name: At_CS6879_Shoots-Roots_P Parameter: Tissue Value: Shoots
aaaaccattcggcaaaatcaaataatctttttcttagttcgaatttaatttcccaagagaaaaatgtcaggccgaggaaagggaggaaaaggattaggaaagggaggagccaagagacatcggaaagtactcagagacaacatccaagggattaccaaacctgcgattcgtcgtctcgcgagaagaggaggcgtgaagcgtatcagtggtttgatctatgaagagactcgcggcgttctcaagatctttctcgagaacgtgattcgtgacgccgttacttacacggagcacgctcgccggaaaactgttacggcgatggacgtcgtttacgctctcaagagacaaggacgaactttgtatggattcggcggctaaatcgttcggattgcaatttcggattttgtaaactcttcaatttcagcatctagggatttcagatttgtaatttctcagttaaacgatgaatgaattgaaaaaaaaagaattgtct

SEQ ID NO: 84705 - protein, 103 aa, Arabidopsis thaliana; identical to SEQ ID NO: 7737
  peptide (1)..(103): Ceres Seq. ID no. 12676583
  misc_feature (1)..(103): Homolog of NCBI NO: 34876368 NR Description: similar to germinal histone H4 gene [Rattus
  misc_feature (1)..(103): Homolog of NCBI NO: 15226944 NR Description: histone H4; protein id: At2g28740.1, supported by
  misc_feature (1)..(103): Homolog of NCBI NO: 27692960 NR Description: Similar to germinal histone H4 gene [Mus musculus]
  misc_feature (1)..(103): Homolog of NCBI NO: 462243 NR Description: Histone H4 >gi|421921|pir||S32769 histone H4 - >gi|297150|emb|CAA48923.1| histone H4 [Lycopersicon esculentum] histone H4 [Lycopersicon esculentum] >gi|2746721|gb|AAB94924.1|
  misc_feature (1)..(103): Homolog of NCBI NO: 1806283 NR Description: Histone H4 homologue [Sesbania rostrata]
  misc_feature (1)..(103): Homolog of NCBI NO: 4504301 NR Description: H4 histone family, member A [Homo sapiens] H4 histone family, member B [Homo sapiens] H4 histone family, member C [Homo sapiens]
  misc_feature (1)..(103): Homolog of NCBI NO: 27692935 NR Description: Similar to germinal histone H4 gene [Mus musculus]
  misc_feature (1)..(103): Homolog of NCBI NO: 34858262 NR Description: similar to germinal histone H4 gene [Rattus
  misc_feature (1)..(103): Homolog of NCBI NO: 37590121 NR Description: Hist1h4h protein [Mus musculus]
  misc_feature (1)..(103): Homolog of NCBI NO: 462242 NR Description: Histone H4 >gi|166311|gb|AAC37355.1| histone H4 formosa] >gi|455652|gb|AAB28739.1| histone H4; H4 [Acropora

SEQ ID NO: 84706 - protein, 72 aa, Arabidopsis thaliana
  peptide (1)..(72): Ceres Seq. ID no. 12676584
NHSAKSNNLFLSSNLISQEKNVRPRKGRKRIRKGRSQETSESTQRQHPRDYQTCDSSSREKRRREAYQWFDL

SEQ ID NO: 84707 - DNA, 2058 bp, Arabidopsis thaliana
  misc_feature (1)..(2058): Ceres Seq. ID no. 12676585
  misc_feature: MA Experiment ID: 108434 Result: Down-regulated in Transcription
  misc_feature: MA Experiment 108434 PARAMETER Experiment Name: At_Root_Tips_cDNA_P Parameter: Tissue Value: Root Tips
  misc_feature: MA Experiment ID: 108461 Result: Down-regulated in Transcription
  misc_feature: MA Experiment 108461 PARAMETER Experiment Name: At_Germinating_Seeds_cDNA_P Parameter: Age (day) Value: 1 vs. 0
  misc_feature: MA Experiment 108461 PARAMETER Experiment Name: At_Germinating_Seeds_cDNA_P Parameter: Tissue Value: Germinating Seeds
  misc_feature: MA Experiment ID: 108488 Result: Down-regulated in Transcription
  misc_feature: MA Experiment ID: 108569 Result: Up-regulated in Transcription
  misc_feature: MA Experiment 108569 PARAMETER Experiment Name: At_0.001%_MeJA__cDNA_P Parameter: Timepoint (hr) Value: 6
  misc_feature: MA Experiment 108569 PARAMETER Experiment Name: At_0.001%_MeJA__cDNA_P Parameter: Tissue Value: Aerial
  misc_feature: MA Experiment 108569 PARAMETER Experiment Name: At_0.001%_MeJA__cDNA_P Parameter: Treatment Value: 0.001% MeJA vs. No Treatment
  misc_feature: MA Experiment ID: 108573 Result: Up-regulated in Transcription
  misc_feature: MA Experiment 108573 PARAMETER Experiment Name: At_Drought_cDNA_P Parameter: Timepoint (hr) Value: 6
  misc_feature: MA Experiment 108573 PARAMETER Experiment Name: At_Drought_cDNA_P Parameter: Tissue Value: Aerial
  misc_feature: MA Experiment 108573 PARAMETER Experiment Name: At_Drought_cDNA_P Parameter: Treatment Value: Drought vs. No Drought
  misc_feature: MA Experiment ID: 108585 Result: Up-regulated in Transcription
  misc_feature: MA Experiment 108585 PARAMETER Experiment Name: At_5mM_NaNP_cDNA_P Parameter: Timepoint (hr) Value: 6
  misc_feature: MA Experiment 108585 PARAMETER Experiment Name: At_5mM_NaNP_cDNA_P Parameter: Tissue Value: Aerial
  misc_feature: MA Experiment 108585 PARAMETER Experiment Name: At_5mM_NaNP_cDNA_P Parameter: Treatment Value: null
  misc_feature: MA Experiment ID: 20000087 Result: Down-regulated in Transcription
  misc_feature: MA Experiment 20000087 PARAMETER Experiment Name: At_100uM_ABA_Mutants_cDNA_P Parameter: Plant Line Value: WS
  misc_feature: MA Experiment 20000087 PARAMETER Experiment Name: At_100uM_ABA_Mutants_cDNA_P Parameter: Timepoint (hr) Value: 6
  misc_feature: MA Experiment 20000087 PARAMETER Experiment Name: At_100uM_ABA_Mutants_cDNA_P Parameter: Tissue Value: Aerial
  misc_feature: MA Experiment 20000087 PARAMETER Experiment Name: At_100uM_ABA_Mutants_cDNA_P Parameter: Treatment Value: 100uM ABA vs. No Treatment
  misc_feature: MA Experiment ID: 20000111 Result: Down-regulated in Transcription
  misc_feature: MA Experiment 20000111 PARAMETER Experiment Name: At_42deg_Heat_cDNA_P Parameter: Temperature (deg C) Value: 42 vs. 22
  misc_feature: MA Experiment 20000111 PARAMETER Experiment Name: At_42deg_Heat_cDNA_P Parameter: Timepoint (hr) Value: 6
  misc_feature: MA Experiment 20000111 PARAMETER Experiment Name: At_42deg_Heat_cDNA_P Parameter: Tissue Value: Aerial
aagtcttttttataagctcatgctcattattactccgacaagtgccgtgtaattcctcgccctcggctactcttttctcttcttgcctctcgtctccgccgctgattcagctgccgccgacaaaggaatatggaagaaaaagatgtgtatacgcaagatggaactgttgatattcacaaaaatcctgcaaacaaggagaaaaccggaaattggaaagcttgccgcttcattctcggaaatgagtgctgtgaaagattggcctactatggcatgggcactaaccttgtgaattatcttgagagccgtctgaatcaaggcaatgctacggctgcaaataacgtcacgaattggtctggaacatgttatataactcctttgattggagcctttatagctgatgcttaccttggacgatattggactattgcaacttttgttttcatctatgtctccggtatgactcttttgacattatcagcttcagttcctggacttaaaccaggtaactgcaatgctgatacttgtcatccaaattctagtcagactgctgttttctttgtcgcgctttatatgattgctcttggaactggcggtataaagccgtgtgtttcgtcctttggagctgatcagtttgatgagaatgatgagaatgagaagatcaagaaaagttctttcttcaactggttttacttctccattaatgttggagctctcattgctgcaactgttctcgtctggatacaaatgaatgttggttggggatggggtttcggtgttccaacagtcgcgatggttatcgcggtttgctttttcttcttcggaagccgtttttacagacttcagagacctggagggagtccacttactaggatctttcaggttatagtagcggcttttcggaagataagtgttaaggttccagaggacaagtctctgctctttgaaactgcagatgatgagagtaacatcaaaggtagccggaaacttgtgcacacagataacttaaagttttttgacaaggcagcggttgagagtcaatctgatagcatcaaagacggggaagtcaatccatggagactatgttctgttactcaagttgaagaacttaagtcaataatcacacttcttccagtttgggccacaggaatagtcttcgccacagtgtacagccaaatgagcacaatgtttgtgttacaaggaaacacaatggaccaacacatgggaaaaaactttgaaatcccatcagcttcactctcacttttcgacactgtcagtgtactcttctggactcctgtctatgaccagttcattatcccgctggcaagaaagttcacacgcaatgaacgaggcttcactcagcttcaacgtatgggtataggtcttgtggtctccatctttgccatgatcactgcaggagtcttggaggttgtcaggcttgattatgtcaaaactcacaatgcatatgaccaaaaacagatccatatgtcgatattctggcagataccgcagtatttacttatcggttgtgcagaagttttcacctttataggtcagcttgagtttttctatgatcaggctcctgatgccatgagaagtctctgctctgctttgtcgttgaccacggttgcgttggggaactatttgagcacagttcttgtgacggttgtgatgaagataacgaagaagaacggtaaaccgggttggataccggataacttgaaccgaggccatcttgattactttttctacttgttggcaactctcagtttcctcaacttcttagtgtacctctggatttcaaaacgctacaaatacaagaaagctgttggtcgagcacattgatcaagaaactggtgtggaagatatttggagttaacagtatttgtttgaaaagtgttttgcttgtaaatgttttttgtatgtggtctagttgttgttggtgtgttaggtttgttttggttttgcttatgtatttctgaatacttccagtcttccacttatatgtaaaaggctattggtaactattttatgagctttttgcttaaagctttttgaccg

SEQ ID NO: 84708 - protein, 570 aa, Arabidopsis thaliana; identical to SEQ ID NO: 40911
  peptide (1)..(570): Ceres Seq. ID no. 12676586
  misc_feature (96)..(499): Pfam Name: POT family Pfam Description: POT family
  misc_feature (1)..(570): Homolog of NCBI NO: 15232435 NR Description: peptide transport - like protein; protein id: supported by cDNA: 117581., supported by cDNA: gi_13430485,
  misc_feature (2)..(569): Homolog of NCBI NO: 15240905 NR Description: oligopeptide transporter - like protein; protein At5g01180.1 [Arabidopsis thaliana] >gi|11358593|pir||T45958
  misc_feature (4)..(564): Homolog of NCBI NO: 34895718 NR Description: putative peptide transport protein [Oryza sativa
  misc_feature (5)..(567): Homolog of NCBI NO: 7489404 NR Description: peptide transport protein - barley
  misc_feature (59)..(569): Homolog of NCBI NO: 28973642 NR Description: putative oligopeptide transporter protein
  misc_feature (2)..(565): Homolog of NCBI NO: 4102839 NR Description: LeOPT1 [Lycopersicon esculentum]
  misc_feature (7)..(565): Homolog of NCBI NO: 15076661 NR Description: peptide transporter [Oryza sativa (japonica >gi|15076663|dbj|BAB62327.1| peptide transporter [Oryza sativa
  misc_feature (1)..(565): Homolog of NCBI NO: 15226861 NR Description: histidine transport protein (PTR2-B); protein id: supported by cDNA: gi_13937184, supported by cDNA: gi_633939
  misc_feature (1)..(565): Homolog of NCBI NO: 1076331 NR Description: histidine transport protein - Arabidopsis thaliana
  misc_feature (1)..(565): Homolog of NCBI NO: 26451333 NR Description: putative peptide transporter [Arabidopsis

SEQ ID NO: 84709 - protein, 523 aa, Arabidopsis thaliana; identical to SEQ ID NO: 40912
  peptide (1)..(523): Ceres Seq. ID no. 12676587
  misc_feature (49)..(452): Pfam Name: POT family Pfam Description: POT family
  misc_feature (1)..(523): Homolog of NCBI NO: 15232435 NR Description: peptide transport - like protein; protein id: supported by cDNA: 117581., supported by cDNA: gi_13430485,
  misc_feature (1)..(522): Homolog of NCBI NO: 15240905 NR Description: oligopeptide transporter - like protein; protein At5g01180.1 [Arabidopsis thaliana] >gi|11358593|pir||T45958
  misc_feature (1)..(517): Homolog of NCBI NO: 34895718 NR Description: putative peptide transport protein [Oryza sativa
  misc_feature (1)..(520): Homolog of NCBI NO: 7489404 NR Description: peptide transport protein - barley
  misc_feature (12)..(522): Homolog of NCBI NO: 28973642 NR Description: putative oligopeptide transporter protein
  misc_feature (1)..(518): Homolog of NCBI NO: 4102839 NR Description: LeOPT1 [Lycopersicon esculentum]
  misc_feature (1)..(518): Homolog of NCBI NO: 15076661 NR Description: peptide transporter [Oryza sativa (japonica >gi|15076663|dbj|BAB62327.1| peptide transporter [Oryza sativa
  misc_feature (1)..(518): Homolog of NCBI NO: 15226861 NR Description: histidine transport protein (PTR2-B); protein id: supported by cDNA: gi_13937184, supported by cDNA: gi_633939
  misc_feature (1)..(518): Homolog of NCBI NO: 1076331 NR Description: histidine transport protein - Arabidopsis thaliana
  misc_feature (1)..(518): Homolog of NCBI NO: 26451333 NR Description: putative peptide transporter [Arabidopsis

SEQ ID NO: 84710 - protein, 461 aa, Arabidopsis thaliana; identical to SEQ ID NO: 40913
  peptide (1)..(461): Ceres Seq. ID no. 12676588
  misc_feature (1)..(390): Pfam Name: POT family Pfam Description: POT family
  misc_feature (1)..(461): Homolog of NCBI NO: 15232435 NR Description: peptide transport - like protein; protein id: supported by cDNA: 117581., supported by cDNA: gi_13430485,
  misc_feature (1)..(460): Homolog of NCBI NO: 15240905 NR Description: oligopeptide transporter - like protein; protein At5g01180.1 [Arabidopsis thaliana] >gi|11358593|pir||T45958
  misc_feature (1)..(455): Homolog of NCBI NO: 34895718 NR Description: putative peptide transport protein [Oryza sativa
  misc_feature (1)..(458): Homolog of NCBI NO: 7489404 NR Description: peptide transport protein - barley
  misc_feature (1)..(460): Homolog of NCBI NO: 28973642 NR Description: putative oligopeptide transporter protein
  misc_feature (1)..(456): Homolog of NCBI NO: 4102839 NR Description: LeOPT1 [Lycopersicon esculentum]
  misc_feature (1)..(456): Homolog of NCBI NO: 15076661 NR Description: peptide transporter [Oryza sativa (japonica >gi|15076663|dbj|BAB62327.1| peptide transporter [Oryza sativa
  misc_feature (1)..(456): Homolog of NCBI NO: 15226861 NR Description: histidine transport protein (PTR2-B); protein id: supported by cDNA: gi_13937184, supported by cDNA: gi_633939
  misc_feature (1)..(456): Homolog of NCBI NO: 1076331 NR Description: histidine transport protein - Arabidopsis thaliana
  misc_feature (1)..(456): Homolog of NCBI NO: 26451333 NR Description: putative peptide transporter [Arabidopsis

SEQ ID NO: 84711 - DNA, 952 bp, Arabidopsis thaliana
  misc_feature (1)..(952): Ceres Seq. ID no. 12676597
  misc_feature: MA Experiment ID: 108501 Result: Down-regulated in Transcription
  misc_feature: MA Experiment 108501 PARAMETER Experiment Name: At_ap2_floral_buds_cDNA_P Parameter: Plant Line Value: ap2 (Ler.)
  misc_feature: MA Experiment 108501 PARAMETER Experiment Name: At_ap2_floral_buds_cDNA_P Parameter: Tissue Value: Closed Flower
  misc_feature: MA Experiment ID: 20000113 Result: Down-regulated in Transcription
  misc_feature: MA Experiment 20000113 PARAMETER Experiment Name: At_42deg_Heat_cDNA_P Parameter: Temperature (deg C) Value: 42 vs. 22
  misc_feature: MA Experiment 20000113 PARAMETER Experiment Name: At_42deg_Heat_cDNA_P Parameter: Timepoint (hr) Value: 8
  misc_feature: MA Experiment 20000113 PARAMETER Experiment Name: At_42deg_Heat_cDNA_P Parameter: Tissue Value: Aerial
  misc_feature: MA Experiment ID: 20000234 Result: Up-regulated in Transcription
  misc_feature: MA Experiment 20000234 PARAMETER Experiment Name: At_Siliques_P Parameter: Age (day) Value: 21
  misc_feature: MA Experiment 20000234 PARAMETER Experiment Name: At_Siliques_P Parameter: Organism Value: A. thaliana
  misc_feature: MA Experiment 20000234 PARAMETER Experiment Name: At_Siliques_P Parameter: Plant Line Value: WS
  misc_feature: MA Experiment 20000234 PARAMETER Experiment Name: At_Siliques_P Parameter: Tissue Value: Less Than 5mm Siliques vs. Whole Plant
  misc_feature: MA Experiment ID: 20000235 Result: Up-regulated in Transcription
  misc_feature: MA Experiment 20000235 PARAMETER Experiment Name: At_Siliques_P Parameter: Age (day) Value: 21
  misc_feature: MA Experiment 20000235 PARAMETER Experiment Name: At_Siliques_P Parameter: Organism Value: A. thaliana
  misc_feature: MA Experiment 20000235 PARAMETER Experiment Name: At_Siliques_P Parameter: Plant Line Value: WS
  misc_feature: MA Experiment 20000235 PARAMETER Experiment Name: At_Siliques_P Parameter: Tissue Value: 5-10mm Siliques vs. Whole Plant
  misc_feature: MA Experiment ID: 20000264 Result: Up-regulated in Transcription
  misc_feature: MA Experiment 20000264 PARAMETER Experiment Name: At_Open_Flower_P Parameter: Age (day) Value: 21
  misc_feature: MA Experiment 20000264 PARAMETER Experiment Name: At_Open_Flower_P Parameter: Plant Line Value: WS
  misc_feature: MA Experiment 20000264 PARAMETER Experiment Name: At_Open_Flower_P Parameter: Tissue Value: Open Flower vs. Whole Plant
  misc_feature: MA Experiment ID: 20000265 Result: Up-regulated in Transcription
  misc_feature: MA Experiment 20000265 PARAMETER Experiment Name: At_Open_Flower_P Parameter: Age (day) Value: 21
  misc_feature: MA Experiment 20000265 PARAMETER Experiment Name: At_Open_Flower_P Parameter: Plant Line Value: WS
  misc_feature: MA Experiment 20000265 PARAMETER Experiment Name: At_Open_Flower_P Parameter: Tissue Value: Closed Flower vs. Whole Plant
  misc_feature: MA Experiment ID: 20000286 Result: Up-regulated in Transcription
  misc_feature: MA Experiment 20000286 PARAMETER Experiment Name: At_Open_Flower_P Parameter: Age (day) Value: 21
  misc_feature: MA Experiment 20000286 PARAMETER Experiment Name: At_Open_Flower_P Parameter: Plant Line Value: WS
  misc_feature: MA Experiment 20000286 PARAMETER Experiment Name: At_Open_Flower_P Parameter: Tissue Value: Half Open vs. Whole Plant
  misc_feature: MA Experiment ID: 20000794 Result: Up-regulated in Transcription
  misc_feature: MA Experiment 20000794 PARAMETER Experiment Name: At_Petals_P Parameter: Age (day) Value: 23-25 days
  misc_feature: MA Experiment 20000794 PARAMETER Experiment Name: At_Petals_P Parameter: Plant Line Value: WS
  misc_feature: MA Experiment 20000794 PARAMETER Experiment Name: At_Petals_P Parameter: Tissue Value: Petals vs. Whole plant
aacaaaaagattaaacaaagagagaagaatatggcgagagggaagatccagatcaagaggatagagaaccagacaaacagacaagtgacgtattcaaagagaagaaatggtttattcaagaaagcacatgagctcacggttttgtgtgatgctagggtttcgattatcatgttctctagctccaacaagcttcatgagtatatcagccctaacaccacaacgaaggagatcgtagatctgtaccaaactatttctgatgtcgatgtttgggccactcaatatgagcgaatgcaagaaaccaagaggaaactgttggagacaaatagaaatctccggactcagatcaagcagaggctaggtgagtgtttggacgagcttgacattcaggagctgcgtcgtcttgaggatgaaatggaaaacactttcaaactcgttcgcgagcgcaagttcaaatctcttgggaatcagatcgagaccaccaagaaaaagaacaaaagtcaacaagacatacaaaagaatctcatacatgagctgactaagagctgaagatcctcactatggactagtagacaatggaggagattacgactcagttcttggataccaaatcgaagggtcacgtgcttacgctcttcgtttccaccagaaccatcaccactattaccccaaccatggccttcatgcaccctctgcctctgacatcattaccttccatcttcttgaataattaaaggctaaaaggtttgctggtgccatcattgtctatctaattatttagtaactacttaaaacataaggcatggtgttgctaaaaccttaaactgtcatgtttcttagttatgtattttaaagcctaaagaaatatggattgtgtgatcagtagtgcttaggcttattgtgtgtggaatgttttcaagacttttatcatgtatcgtattattatattgaccac

SEQ ID NO: 84712 - protein, 181 aa, Arabidopsis thaliana
  peptide (1)..(181): Ceres Seq. ID no. 12676598
  misc_feature (81)..(178): Pfam Name: K-box region Pfam Description: K-box region
  misc_feature (11)..(175): Homolog of NCBI NO: 33090197 NR Description: APETALA3-1 [Brassica napus]
  misc_feature (11)..(178): Homolog of NCBI NO: 1384044 NR Description: APETALA3 [Arabidopsis thaliana]
  misc_feature (11)..(178): Homolog of NCBI NO: 15232493 NR Description: floral homeotic protein APETALA3 (AP3); protein At3g54340.1, supported by cDNA: 34635., supported by cDNA: supported by cDNA: gi_17979334 [Arabidopsis thaliana]
  misc_feature (11)..(178): Homolog of NCBI NO: 5805230 NR Description: floral homeotic protein AP3 [Arabidopsis thaliana]
  misc_feature (11)..(178): Homolog of NCBI NO: 5805210 NR Description: floral homeotic protein AP3 [Arabidopsis >gi|5805220|gb|AAD51892.1| floral homeotic protein AP3
  misc_feature (11)..(178): Homolog of NCBI NO: 5805226 NR Description: floral homeotic protein AP3 [Arabidopsis thaliana]
  misc_feature (11)..(178): Homolog of NCBI NO: 5805234 NR Description: floral homeotic protein AP3 [Arabidopsis thaliana]
  misc_feature (11)..(178): Homolog of NCBI NO: 5805228 NR Description: floral homeotic protein AP3 [Arabidopsis thaliana]
  misc_feature (11)..(178): Homolog of NCBI NO: 5805240 NR Description: floral homeotic protein AP3 [Arabidopsis thaliana]
  misc_feature (11)..(178): Homolog of NCBI NO: 5805238 NR Description: floral homeotic protein AP3 [Arabidopsis thaliana]
NKKIKQREKNMARGKIQIKRIENQTNRQVTYSKRRNGLFKKAHELTVLCDARVSIIMFSSSNKLHEYISPNTTTKEIVDLYQTISDVDVWATQYERMQETKRKLLETNRNLRTQIKQRLGECLDELDIQELRRLEDEMENTFKLVRERKFKSLGNQIETTKKKNKSQQDIQKNLIHELTKS

SEQ ID NO: 84713 - protein, 171 aa, Arabidopsis thaliana
  peptide (1)..(171): Ceres Seq. ID no. 12676599
  misc_feature (71)..(168): Pfam Name: K-box region Pfam Description: K-box region
  misc_feature (1)..(165): Homolog of NCBI NO: 33090197 NR Description: APETALA3-1 [Brassica napus]
  misc_feature (1)..(168): Homolog of NCBI NO: 1384044 NR Description: APETALA3 [Arabidopsis thaliana]
  misc_feature (1)..(168): Homolog of NCBI NO: 15232493 NR Description: floral homeotic protein APETALA3 (AP3); protein At3g54340.1, supported by cDNA: 34635., supported by cDNA: supported by cDNA: gi_17979334 [Arabidopsis thaliana]
  misc_feature (1)..(168): Homolog of NCBI NO: 5805230 NR Description: floral homeotic protein AP3 [Arabidopsis thaliana]
  misc_feature (1)..(168): Homolog of NCBI NO: 5805210 NR Description: floral homeotic protein AP3 [Arabidopsis >gi|5805220|gb|AAD51892.1| floral homeotic protein AP3
  misc_feature (1)..(168): Homolog of NCBI NO: 5805226 NR Description: floral homeotic protein AP3 [Arabidopsis thaliana]
  misc_feature (1)..(168): Homolog of NCBI NO: 5805234 NR Description: floral homeotic protein AP3 [Arabidopsis thaliana]
  misc_feature (1)..(168): Homolog of NCBI NO: 5805228 NR Description: floral homeotic protein AP3 [Arabidopsis thaliana]
  misc_feature (1)..(168): Homolog of NCBI NO: 5805240 NR Description: floral homeotic protein AP3 [Arabidopsis thaliana]
  misc_feature (1)..(168): Homolog of NCBI NO: 5805238 NR Description: floral homeotic protein AP3 [Arabidopsis thaliana]
MARGKIQIKRIENQTNRQVTYSKRRNGLFKKAHELTVLCDARVSIIMFSSSNKLHEYISPNTTTKEIVDLYQTISDVDVWATQYERMQETKRKLLETNRNLRTQIKQRLGECLDELDIQELRRLEDEMENTFKLVRERKFKSLGNQIETTKKKNKSQQDIQKNLIHELTKS

SEQ ID NO: 84714 - protein, 125 aa, Arabidopsis thaliana
  peptide (1)..(125): Ceres Seq. ID no. 12676600
  misc_feature (25)..(122): Pfam Name: K-box region Pfam Description: K-box region
  misc_feature (1)..(119): Homolog of NCBI NO: 33090197 NR Description: APETALA3-1 [Brassica napus]
  misc_feature (1)..(122): Homolog of NCBI NO: 1384044 NR Description: APETALA3 [Arabidopsis thaliana]
  misc_feature (1)..(122): Homolog of NCBI NO: 15232493 NR Description: floral homeotic protein APETALA3 (AP3); protein At3g54340.1, supported by cDNA: 34635., supported by cDNA: supported by cDNA: gi_17979334 [Arabidopsis thaliana]
  misc_feature (1)..(122): Homolog of NCBI NO: 5805230 NR Description: floral homeotic protein AP3 [Arabidopsis thaliana]
  misc_feature (1)..(122): Homolog of NCBI NO: 5805210 NR Description: floral homeotic protein AP3 [Arabidopsis >gi|5805220|gb|AAD51892.1| floral homeotic protein AP3
  misc_feature (1)..(122): Homolog of NCBI NO: 5805226 NR Description: floral homeotic protein AP3 [Arabidopsis thaliana]
  misc_feature (1)..(122): Homolog of NCBI NO: 5805234 NR Description: floral homeotic protein AP3 [Arabidopsis thaliana]
  misc_feature (1)..(122): Homolog of NCBI NO: 5805228 NR Description: floral homeotic protein AP3 [Arabidopsis thaliana]
  misc_feature (1)..(122): Homolog of NCBI NO: 5805240 NR Description: floral homeotic protein AP3 [Arabidopsis thaliana]
  misc_feature (1)..(122): Homolog of NCBI NO: 5805238 NR Description: floral homeotic protein AP3 [Arabidopsis thaliana]
MFSSSNKLHEYISPNTTTKEIVDLYQTISDVDVWATQYERMQETKRKLLETNRNLRTQIKQRLGECLDELDIQELRRLEDEMENTFKLVRERKFKSLGNQIETTKKKNKSQQDIQKNLIHELTKS

SEQ ID NO: 84715 - DNA, 1380 bp, Arabidopsis thaliana
  misc_feature (1)..(1380): Ceres Seq. ID no. 12676620
  misc_feature: MA Experiment ID: 20000438 Result: Down-regulated in Transcription
  misc_feature: MA Experiment 20000438 PARAMETER Experiment Name: At_Shoots__P Parameter: Age (day) Value: 14
  misc_feature: MA Experiment 20000438 PARAMETER Experiment Name: At_Shoots__P Parameter: Tissue Value: Shoots vs. Whole Plant
agagagagagagaaaaaagaagaagaagaatttgaggcgattgggtaagcgatgcacatcgtcttctctgtcgatgatttgaccgaatccttctggcctgttcccgctccggcgccgtcgccgggatcgtcatcgactccgtcaccgacgcagaacgtggcggatgggatgactcgaagtcaatcggagtgggcgttccacaggcttatcaatgagttgtctggttccgattcgagccctacgactaacacaatcgagagatcacctccaccggttcagtctctttcgagattagaagaaaccgttgacgaaaccgaagatgttgttgagattcagaaaccgcagaatcatcgacggctccctgttgatgatcaagggaagaatcggaatcgtgctccgtcgtctgatccggttgattcttcagctcctgttgttgttgatcctaatcagtatcatgcgattcttaagagcaagctcgagcttgcttgcgctgctgttgctcgtcgtgtgggaactgtgaaaccggaagattcgagtgcttcagctagcaatcaaaaacaagctcaaggctccattgtggcacaaacctcacctggtgcttcatctgttagattttctcccacaacaagcacgcaaaagaaacctgatgttccagccagacaaactagtatttcatcacgagatgattctgatgacgatgatcttgatggagacgcagataatggagatcctactgatgtgaagcgtgctaggaggatgctctcaaaccgagaatccgctaggcgctctaggagaagaaagcaagaacaaatgaatgaatttgatacacaggtaggccaattaagagccgagcattcaactttaattaatcgtcttagtgacatgaatcataagtatgatgcagctgctgttgacaacagaattctaagagctgatatcgaaactttgagaacaaaggttaagatggcagaggaaactgtgaaaagagtgacaggagtgaaccctttgcattggtcaagaccaaacatgggcataccattcagcaacacaccgagtgcttcctctagtattccgccaaactctaaccacattttgaaaccagcaaattcaagtaccaacaccagtgctggtttagcacaaaatcagagagtggagacggcaaatttcttgccggaacaggtgaaccgtgaaggcatgcagaatccatttgctcctgattctaatctgtatgaaaccctaccccattggaatcacaagcattaaccagaaaaagagtcattggttttgtgattttgattgaggtaactattgtctgtatttttatttactgtatgactcagcgacggtaaactcttaatattatatatatgattggacatg

SEQ ID NO: 84716 - protein, 403 aa, Arabidopsis thaliana
  peptide (1)..(403): Ceres Seq. ID no. 12676621
  misc_feature (227)..(291): Pfam Name: bZIP transcription factor Pfam Description: bZIP transcription factor
  misc_feature (1)..(403): Homolog of NCBI NO: 30694089 NR Description: bZIP transcription factor-related protein
  misc_feature (1)..(260): Homolog of NCBI NO: 15451130 NR Description: bZIP transcription factor-like protein thaliana] >gi|20148331|gb|AAM10056.1| unknown protein
  misc_feature (1)..(403): Homolog of NCBI NO: 30679226 NR Description: bZIP protein [Arabidopsis thaliana]
  misc_feature (1)..(403): Homolog of NCBI NO: 15235433 NR Description: bZIP protein; protein id: At4g02640.1, supported
  misc_feature (8)..(403): Homolog of NCBI NO: 19423919 NR Description: unknown protein [Arabidopsis thaliana]
  misc_feature (1)..(385): Homolog of NCBI NO: 16797791 NR Description: bZIP transcription factor [Nicotiana tabacum]
  misc_feature (1)..(339): Homolog of NCBI NO: 542188 NR Description: OHP2 protein - maize >gi|168428|gb|AAA33439.1|
  misc_feature (17)..(339): Homolog of NCBI NO: 542187 NR Description: OHP1 protein - maize >gi|168530|gb|AAA33488.1|
  misc_feature (17)..(339): Homolog of NCBI NO: 2130145 NR Description: seed storage protein opaque-2 - maize
  misc_feature (123)..(383): Homolog of NCBI NO: 30691978 NR Description: bZIP family transcription factor [Arabidopsis
MHIVFSVDDLTESFWPVPAPAPSPGSSSTPSPTQNVADGMTRSQSEWAFHRLINELSGSDSSPTTNTIERSPPPVQSLSRLEETVDETEDVVEIQKPQNHRRLPVDDQGKNRNRAPSSDPVDSSAPVVVDPNQYHAILKSKLELACAAVARRVGTVKPEDSSASASNQKQAQGSIVAQTSPGASSVRFSPTTSTQKKPDVPARQTSISSRDDSDDDDLDGDADNGDPTDVKRARRMLSNRESARRSRRRKQEQMNEFDTQVGQLRAEHSTLINRLSDMNHKYDAAAVDNRILRADIETLRTKVKMAEETVKRVTGVNPLHWSRPNMGIPFSNTPSASSSIPPNSNHILKPANSSTNTSAGLAQNQRVETANFLPEQVNREGMQNPFAPDSNLYETLPHWNHKH

SEQ ID NO: 84717 - protein, 364 aa, Arabidopsis thaliana
  peptide (1)..(364): Ceres Seq. ID no. 12676622
  misc_feature (188)..(252): Pfam Name: bZIP transcription factor Pfam Description: bZIP transcription factor
  misc_feature (1)..(364): Homolog of NCBI NO: 30694089 NR Description: bZIP transcription factor-related protein
  misc_feature (1)..(221): Homolog of NCBI NO: 15451130 NR Description: bZIP transcription factor-like protein thaliana] >gi|20148331|gb|AAM10056.1| unknown protein
  misc_feature (1)..(364): Homolog of NCBI NO: 30679226 NR Description: bZIP protein [Arabidopsis thaliana]
  misc_feature (1)..(364): Homolog of NCBI NO: 15235433 NR Description: bZIP protein; protein id: At4g02640.1, supported
  misc_feature (1)..(364): Homolog of NCBI NO: 19423919 NR Description: unknown protein [Arabidopsis thaliana]
  misc_feature (1)..(346): Homolog of NCBI NO: 16797791 NR Description: bZIP transcription factor [Nicotiana tabacum]
  misc_feature (1)..(300): Homolog of NCBI NO: 542188 NR Description: OHP2 protein - maize >gi|168428|gb|AAA33439.1|
  misc_feature (1)..(300): Homolog of NCBI NO: 542187 NR Description: OHP1 protein - maize >gi|168530|gb|AAA33488.1|
  misc_feature (1)..(300): Homolog of NCBI NO: 2130145 NR Description: seed storage protein opaque-2 - maize
  misc_feature (84)..(344): Homolog of NCBI NO: 30691978 NR Description: bZIP family transcription factor [Arabidopsis
MTRSQSEWAFHRLINELSGSDSSPTTNTIERSPPPVQSLSRLEETVDETEDVVEIQKPQNHRRLPVDDQGKNRNRAPSSDPVDSSAPVVVDPNQYHAILKSKLELACAAVARRVGTVKPEDSSASASNQKQAQGSIVAQTSPGASSVRFSPTTSTQKKPDVPARQTSISSRDDSDDDDLDGDADNGDPTDVKRARRMLSNRESARRSRRRKQEQMNEFDTQVGQLRAEHSTLINRLSDMNHKYDAAAVDNRILRADIETLRTKVKMAEETVKRVTGVNPLHWSRPNMGIPFSNTPSASSSIPPNSNHILKPANSSTNTSAGLAQNQRVETANFLPEQVNREGMQNPFAPDSNLYETLPHWNHKH

SEQ ID NO: 84718 - DNA, 1294 bp, Arabidopsis thaliana
  misc_feature (1)..(1294): Ceres Seq. ID no. 12676636
  misc_feature: MA Experiment ID: 20000184 Result: Up-regulated in Transcription
  misc_feature: MA Experiment 20000184 PARAMETER Experiment Name: At_Shoots__P Parameter: Age (day) Value: 7
  misc_feature: MA Experiment 20000184 PARAMETER Experiment Name: At_Shoots__P Parameter: Tissue Value: Shoots vs. Whole Plant
  misc_feature: MA Experiment ID: 20000234 Result: Down-regulated in Transcription
  misc_feature: MA Experiment 20000234 PARAMETER Experiment Name: At_Siliques_P Parameter: Age (day) Value: 21
  misc_feature: MA Experiment 20000234 PARAMETER Experiment Name: At_Siliques_P Parameter: Organism Value: A. thaliana
  misc_feature: MA Experiment 20000234 PARAMETER Experiment Name: At_Siliques_P Parameter: Plant Line Value: WS
  misc_feature: MA Experiment 20000234 PARAMETER Experiment Name: At_Siliques_P Parameter: Tissue Value: Less Than 5mm Siliques vs. Whole Plant
  misc_feature: MA Experiment ID: 20000235 Result: Down-regulated in Transcription
  misc_feature: MA Experiment 20000235 PARAMETER Experiment Name: At_Siliques_P Parameter: Age (day) Value: 21
  misc_feature: MA Experiment 20000235 PARAMETER Experiment Name: At_Siliques_P Parameter: Organism Value: A. thaliana
  misc_feature: MA Experiment 20000235 PARAMETER Experiment Name: At_Siliques_P Parameter: Plant Line Value: WS
  misc_feature: MA Experiment 20000235 PARAMETER Experiment Name: At_Siliques_P Parameter: Tissue Value: 5-10mm Siliques vs. Whole Plant
  misc_feature: MA Experiment ID: 20000264 Result: Down-regulated in Transcription
  misc_feature: MA Experiment 20000264 PARAMETER Experiment Name: At_Open_Flower_P Parameter: Age (day) Value: 21
  misc_feature: MA Experiment 20000264 PARAMETER Experiment Name: At_Open_Flower_P Parameter: Plant Line Value: WS
  misc_feature: MA Experiment 20000264 PARAMETER Experiment Name: At_Open_Flower_P Parameter: Tissue Value: Open Flower vs. Whole Plant
  misc_feature: MA Experiment ID: 20000265 Result: Down-regulated in Transcription
  misc_feature: MA Experiment 20000265 PARAMETER Experiment Name: At_Open_Flower_P Parameter: Age (day) Value: 21
  misc_feature: MA Experiment 20000265 PARAMETER Experiment Name: At_Open_Flower_P Parameter: Plant Line Value: WS
  misc_feature: MA Experiment 20000265 PARAMETER Experiment Name: At_Open_Flower_P Parameter: Tissue Value: Closed Flower vs. Whole Plant
  misc_feature: MA Experiment ID: 20000437 Result: Up-regulated in Transcription
  misc_feature: MA Experiment 20000437 PARAMETER Experiment Name: At_Drought_P Parameter: Age (day) Value: 8
  misc_feature: MA Experiment 20000437 PARAMETER Experiment Name: At_Drought_P Parameter: Organism Value: A. thaliana
  misc_feature: MA Experiment 20000437 PARAMETER Experiment Name: At_Drought_P Parameter: Plant Line Value: WS
  misc_feature: MA Experiment 20000437 PARAMETER Experiment Name: At_Drought_P Parameter: Timepoint (hr) Value: 24
  misc_feature: MA Experiment 20000437 PARAMETER Experiment Name: At_Drought_P Parameter: Tissue Value: Whole Plant
  misc_feature: MA Experiment 20000437 PARAMETER Experiment Name: At_Drought_P Parameter: Treatment Value: Drought vs. No Drought
  misc_feature: MA Experiment ID: 20001248 Result: Down-regulated in Transcription
  misc_feature: MA Experiment 20001248 PARAMETER Experiment Name: At_Far-red-induction_P Parameter: Age (day) Value: 7
  misc_feature: MA Experiment 20001248 PARAMETER Experiment Name: At_Far-red-induction_P Parameter: Light Value: Far-red vs. White
  misc_feature: MA Experiment 20001248 PARAMETER Experiment Name: At_Far-red-induction_P Parameter: Organism Value: A. thaliana
  misc_feature: MA Experiment 20001248 PARAMETER Experiment Name: At_Far-red-induction_P Parameter: Plant Line Value: Columbia
  misc_feature: MA Experiment 20001248 PARAMETER Experiment Name: At_Far-red-induction_P Parameter: Timepoint (hr) Value: 4
  misc_feature: MA Experiment 20001248 PARAMETER Experiment Name: At_Far-red-induction_P Parameter: Tissue Value: Whole Plant
  misc_feature: MA Experiment ID: 20001451 Result: Up-regulated in Transcription
  misc_feature: MA Experiment 20001451 PARAMETER Experiment Name: At_Far-red-induction_P Parameter: Age (day) Value: 7
  misc_feature: MA Experiment 20001451 PARAMETER Experiment Name: At_Far-red-induction_P Parameter: Light Value: Far-red vs. White
  misc_feature: MA Experiment 20001451 PARAMETER Experiment Name: At_Far-red-induction_P Parameter: Organism Value: A. thaliana
  misc_feature: MA Experiment 20001451 PARAMETER Experiment Name: At_Far-red-induction_P Parameter: Plant Line Value: Columbia
  misc_feature: MA Experiment 20001451 PARAMETER Experiment Name: At_Far-red-induction_P Parameter: Timepoint (hr) Value: 24
  misc_feature: MA Experiment 20001451 PARAMETER Experiment Name: At_Far-red-induction_P Parameter: Tissue Value: Whole Plant
  misc_feature: MA Experiment ID: 20001906 Result: Up-regulated in Transcription
  misc_feature: MA Experiment 20001906 PARAMETER Experiment Name: At_Drought_Reproduction_P Parameter: Age (day) Value: 35
  misc_feature: MA Experiment 20001906 PARAMETER Experiment Name: At_Drought_Reproduction_P Parameter: Organism Value: A. thaliana
  misc_feature: MA Experiment 20001906 PARAMETER Experiment Name: At_Drought_Reproduction_P Parameter: Plant Line Value: WS
  misc_feature: MA Experiment 20001906 PARAMETER Experiment Name: At_Drought_Reproduction_P Parameter: Timepoint (day) Value: 5
  misc_feature: MA Experiment 20001906 PARAMETER Experiment Name: At_Drought_Reproduction_P Parameter: Tissue Value: Siliques
  misc_feature: MA Experiment 20001906 PARAMETER Experiment Name: At_Drought_Reproduction_P Parameter: Treatment Value: Drought vs. No Drought
agggactcagtaaggccacctcaaaacaagacccatcgataacagcgatcatggtggctaaagccttagcacagctgataacatgcatcatcttattctgccacgttgtagcttccgtagaagacctcaccatacgccaagtcacggccgacaatcggcgaattcgcccgaatcttctcgggactcacacagagagtaaattccggcttttcatgtccgattacggcaagaactactccacgagggaggagtacatccaccgcctcggaatatttgccaaaaacgtccttaaggccgcagagcaccagatgatggacccctccgccgtccacggagtcacacagttctctgacctcacggaagaggagttcaagcggatgtacactggagtagccgatgttggcggcagccgtggcggtacggttggagcggaggcacctatggttgaggttgatggattgcctgaagattttgactggagggagaagggtggagttactgaggttaagaatcaaggtgcatgtggatcgtgctgggcttttagcacaacgggagcagctgaaggagcccatttcgtctccaccgggaagctcctcagtcttagcgaacaacaacttgtcgattgtgatcaagcgtcgatccaaaggacaagaaagcatgcgacaatggatgtggcgggggactgatgacaaatgcctacgagtatttgatggaggcaggaggattagaagaagaaagatcatatccttacactggtaaacgaggccattgcaagtttgatcctgagaaggttgcggtaagagtactgaacttcacgactataccactggatgagaaccaaatcgcagcaaacttagttcggcatggtcccttagcagtgggattaaacgccgtgttcatgcaaacatatataggaggagtgtcatgtccgcttatatgcagcaagcgaaacgttaaccacggagtacttcttgttgggtacggatcaaaagggttttcgatcttgcggcttagtaataaaccttattggattatcaaaaactcgtgggggaaaaagtggggagagaatggatactacaagctgtgtcgtgggcacgatatatgtgggattaactcgatggtatctgcagtagccacccaagtttcctcgtagatgggtcttgtctttcctctgctctcttgttttctaatctagggtttgatcatgttttaggagtggagtttggggtttgaatattgggttgtttctttccgtgaccgttcttgtagtaaaagtgggtgattatttccgttt

SEQ ID NO: 84719 - protein, 227 aa, Arabidopsis thaliana
  peptide (1)..(227): Ceres Seq. ID no. 12676637
  misc_feature (153)..(218): Pfam Name: Papain family cysteine protease Pfam Description: Papain family cysteine protease
  misc_feature (17)..(218): Homolog of NCBI NO: 17979125 NR Description: putative cysteine proteinase [Arabidopsis
  misc_feature (17)..(211): Homolog of NCBI NO: 7435812 NR Description: cysteine proteinase (EC 3.4.22.-) F28P10.80 -
GLSKATSKQDPSITAIMVAKALAQLITCIILFCHVVASVEDLTIRQVTADNRRIRPNLLGTHTESKFRLFMSDYGKNYSTREEYIHRLGIFAKNVLKAAEHQMMDPSAVHGVTQFSDLTEEEFKRMYTGVADVGGSRGGTVGAEAPMVEVDGLPEDFDWREKGGVTEVKNQGACGSCWAFSTTGAAEGAHFVSTGKLLSLSEQQLVDCDQASIQRTRKHATMDVAGD

SEQ ID NO: 84720 - protein, 211 aa, Arabidopsis thaliana
  peptide (1)..(211): Ceres Seq. ID no. 12676638
  misc_feature (137)..(202): Pfam Name: Papain family cysteine protease Pfam Description: Papain family cysteine protease
  misc_feature (1)..(202): Homolog of NCBI NO: 17979125 NR Description: putative cysteine proteinase [Arabidopsis
  misc_feature (1)..(195): Homolog of NCBI NO: 7435812 NR Description: cysteine proteinase (EC 3.4.22.-) F28P10.80 -
MVAKALAQLITCIILFCHVVASVEDLTIRQVTADNRRIRPNLLGTHTESKFRLFMSDYGKNYSTREEYIHRLGIFAKNVLKAAEHQMMDPSAVHGVTQFSDLTEEEFKRMYTGVADVGGSRGGTVGAEAPMVEVDGLPEDFDWREKGGVTEVKNQGACGSCWAFSTTGAAEGAHFVSTGKLLSLSEQQLVDCDQASIQRTRKHATMDVAGD

SEQ ID NO: 84721 - protein, 157 aa, Arabidopsis thaliana
  peptide (1)..(157): Ceres Seq. ID no. 12676639
  misc_feature (83)..(148): Pfam Name: Papain family cysteine protease Pfam Description: Papain family cysteine protease
  misc_feature (1)..(148): Homolog of NCBI NO: 17979125 NR Description: putative cysteine proteinase [Arabidopsis
  misc_feature (1)..(141): Homolog of NCBI NO: 7435812 NR Description: cysteine proteinase (EC 3.4.22.-) F28P10.80 -
MSDYGKNYSTREEYIHRLGIFAKNVLKAAEHQMMDPSAVHGVTQFSDLTEEEFKRMYTGVADVGGSRGGTVGAEAPMVEVDGLPEDFDWREKGGVTEVKNQGACGSCWAFSTTGAAEGAHFVSTGKLLSLSEQQLVDCDQASIQRTRKHATMDVAGD

SEQ ID NO: 84722 - DNA, 3046 bp, Arabidopsis thaliana
  misc_feature (1)..(3046): Ceres Seq. ID no. 12676644
  misc_feature: MA Experiment ID: 20000182 Result: Up-regulated in Transcription
  misc_feature: MA Experiment 20000182 PARAMETER Experiment Name: At_2mM_SA_P Parameter: Age (day) Value: 14
  misc_feature: MA Experiment 20000182 PARAMETER Experiment Name: At_2mM_SA_P Parameter: Organism Value: A. thaliana
  misc_feature: MA Experiment 20000182 PARAMETER Experiment Name: At_2mM_SA_P Parameter: Plant Line Value: WS
  misc_feature: MA Experiment 20000182 PARAMETER Experiment Name: At_2mM_SA_P Parameter: Timepoint (hr) Value: 6
  misc_feature: MA Experiment 20000182 PARAMETER Experiment Name: At_2mM_SA_P Parameter: Tissue Value: Aerial
  misc_feature: MA Experiment 20000182 PARAMETER Experiment Name: At_2mM_SA_P Parameter: Treatment Value: 2mM SA vs. No Treatment
  misc_feature: MA Experiment ID: 20000234 Result: Down-regulated in Transcription
  misc_feature: MA Experiment 20000234 PARAMETER Experiment Name: At_Siliques_P Parameter: Age (day) Value: 21
  misc_feature: MA Experiment 20000234 PARAMETER Experiment Name: At_Siliques_P Parameter: Organism Value: A. thaliana
  misc_feature: MA Experiment 20000234 PARAMETER Experiment Name: At_Siliques_P Parameter: Plant Line Value: WS
  misc_feature: MA Experiment 20000234 PARAMETER Experiment Name: At_Siliques_P Parameter: Tissue Value: Less Than 5mm Siliques vs. Whole Plant
  misc_feature: MA Experiment ID: 20000709 Result: Up-regulated in Transcription
  misc_feature: MA Experiment 20000709 PARAMETER Experiment Name: At_15mM_NH4NO3_L-to-H_P Parameter: Age (hr) Value: 14
  misc_feature: MA Experiment 20000709 PARAMETER Experiment Name: At_15mM_NH4NO3_L-to-H_P Parameter: Organism Value: A. thaliana
  misc_feature: MA Experiment 20000709 PARAMETER Experiment Name: At_15mM_NH4NO3_L-to-H_P Parameter: Plant Line Value: WS
  misc_feature: MA Experiment 20000709 PARAMETER Experiment Name: At_15mM_NH4NO3_L-to-H_P Parameter: Timepoint (hr) Value: 4
  misc_feature: MA Experiment 20000709 PARAMETER Experiment Name: At_15mM_NH4NO3_L-to-H_P Parameter: Tissue Value: Aerial
  misc_feature: MA Experiment 20000709 PARAMETER Experiment Name: At_15mM_NH4NO3_L-to-H_P Parameter: Treatment Value: 15mM NH4NO3 vs. 30mM Mannitol
agatttatagcagaggaaagtgaaatcatgaaagggattctagggtttgaatacgggatagttcaggcgccattaggaccagatatctccggaccagagcttgtagccgccgtcgctaatgcaggagggattggtcttctcagatgtcctgattgggagtgtcctgattacttgagagagcttataagaaagacaaagacattgacagagaaaccatttgggatcggtgttgttcttgcgtttcctcatgatttgaacattaagacaatcttagaagagaaagtggctgtcttgcagctttattggggtgattgttcacaggagcttgtggatgatgctcactttgccggtgtcaaagttattcctcagttaacttttgaaaggtggggaatgtcgaagaagctagaaaggctgttgctgtaggagtagacgccattattgtccaagggcgtgaagcaggtgggcatgttattggcaaggatggtctcttttcattgttgccaagagtggtggatttagttggggaacgcgatattcccgttattgctgctggaggaattgtggatggacgcggttatgttgcagctttgtcacttggggctcaaggggtctgtctaggcacaagatttgtggcgactcatgaaagctatgcacacccaatatacaaaaggaagttgattgaatatgaaaaaaccgaatacacggatgtatttggaagagcaaggtggcctggtgcgcctcaacgtgttctggagacgcctttctttgatgactggaggtctcttccggctcatgagaatgaagttaaccaacctattattggacgttccaccatacatggcgttgaaaaggagataagaagattttcaggaacagtaccaaacatgacgacaacaggcgacttagagagtatggctatgtatgcaggccaaagcgtaggccttatcaaggagattttaccggctggagaggtagtgaaaagtcttgtggaagaagctcaggctctgatcctccaaaagttcaacaatgctactactacatgatgcagtcccagcctcaaatcatgagaaaacataaactttactgcttttggaatcgggatgaaaatagtctcatctaatgtaaataaggtacataaacttctgtatctctcgtgttgttttcaactagaaaaattgtgtccatcatgtgtaatccagcaatagaccttgtgtattggattaagtatacttcttatggttgtttgtttcctgtgaaactttccacacatttcatttcattttaaatttcttagcgaatcaattatttcatagctttattgctcgtaagaagagagaggctatgcaacataatcattacatgatacatacacatagaaacgtttccgagctatttgcagcatcatatgtacagcattcagagtacaaactttgtcgcgtacacgtcaaattcctcagatgatgttagcagtggctcctgggagatacgatattcaatcattcagaatgtaagtttcagataatacaagttgtttattaacttaccgcggatgcatcagagcttgtgtagtccccgttaaaggcgaggcgagactgggcctctcgtattgcagaacacataaggttaagcaggtggccatacgtgggtgctggtccagctgtcttcaccgcctttatgaagctataagtcatggctcctgtgttcttccccgtgaacacctgaaacagcacgaaatgatccagttaacatacggagaggtatgtgtgcttagttgcatgatgatgaatgatataatggaagcatacaggagtgtaaccactggattcatcatcgtcacaagcactgaaacagaaagctgctccaccatctgttcctttgtaagctctgactgatctatggtcttcccattcataagaaccattcctgatttttcacaaacgcaccacaagtttctttttcagattcagtctaagtagaagtgagcagaatgatttataagtttacctctccatcctgcaaatgaagggtaaatcaaggacagtcccgctgttacaggcgtcgatgacagcgtgaagcttagctccatggacgagaggcctcacgagtatccggttaatctcgtcatcaatgatttttccttctgtttcatggtctaaagggcacaaggcttcatcttgaccatcgatctcgtctccgttgtagtcattctgctgagatccatgaccagagaaatggaacactagtgagtcccttgctctgttcccttcaactaaccatctcatcgccttcctaatgtttctcttcgtcggtattctctgcgggctggcttcatcttctgcaacaataacacaacactcatcatcaggaagaaagaaacagagagttttaattagagaaatggaaaacaaacaaaaaacgaaaaacctgtgagcatgagaatagagtcaatagggaaacccatttgttgaaccaataaagatctcatggacttagcatcactgatgcaacctttcaagctataactttttcccttatagttcacgccgcataaaactgctctcttcttcccaaacggcgagggaagaggctcaagcagccgtggtggcggttgagccatcatttgttgttgttgttgttcatgatgttgcggttggtgttgtctaagtagctgttgaaacccatgaattatgcggtttgcaccgcgagctatgtccactagcgagtagagctgcgtgacggtgtggcaggttgagcattggacggtacgggcgtctggttgaacccacatccgtctgccgcaccggcaccgtacttctctccgactagccatgattgagctttgttttggttttctttttgcaattgcaacaaatgcatttgagtgatgagtttataaagagaatgatattattcgttcttatctacgaaaagaataaaatgtggaatgttgatttgtccacgttattaagcttccatgcatgttgttatgtgaatcaattcggaacggaatttgattctttgaaagtttttattttattttattatt

SEQ ID NO: 84723 - protein, 140 aa, Arabidopsis thaliana
  peptide (1)..(140): Ceres Seq. ID no. 12676645
  misc_feature (10)..(124): Pfam Name: 2-nitropropane dioxygenase Pfam Description: 2-nitropropane dioxygenase
  misc_feature (10)..(124): Homolog of NCBI NO: 30697982 NR Description: 2-nitropropane dioxygenase-related protein
  misc_feature (53)..(124): Homolog of NCBI NO: 30697978 NR Description: 2-nitropropane dioxygenase-related protein
  misc_feature (29)..(124): Homolog of NCBI NO: 38505809 NR Description: 2-nitropropane dioxygenase [Synechocystis sp. PCC
  misc_feature (13)..(121): Homolog of NCBI NO: 16127609 NR Description: conserved hypothetical protein [Caulobacter
  misc_feature (13)..(136): Homolog of NCBI NO: 20807921 NR Description: Dioxygenases related to 2-nitropropane [Thermoanaerobacter tengcongensis] >gi|20516489|gb|AAM24696.1|
  misc_feature (13)..(138): Homolog of NCBI NO: 16802856 NR Description: similar to oxidoreductases [Listeria
  misc_feature (13)..(138): Homolog of NCBI NO: 16799884 NR Description: similar to oxidoreductases [Listeria innocua]
  misc_feature (14)..(134): Homolog of NCBI NO: 23025170 NR Description: hypothetical protein [Leuconostoc mesenteroides
  misc_feature (13)..(137): Homolog of NCBI NO: 15896810 NR Description: Dioxygenase related to 2-nitropropane dioxygenase
  misc_feature (13)..(122): Homolog of NCBI NO: 28377742 NR Description: 2-nitropropane dioxygenase [Lactobacillus
RFIAEESEIMKGILGFEYGIVQAPLGPDISGPELVAAVANAGGIGLLRCPDWECPDYLRELIRKTKTLTEKPFGIGVVLAFPHDLNIKTILEEKVAVLQLYWGDCSQELVDDAHFAGVKVIPQLTFERWGMSKKLERLLL

SEQ ID NO: 84724 - protein, 131 aa, Arabidopsis thaliana
  peptide (1)..(131): Ceres Seq. ID no. 12676646
  misc_feature (1)..(115): Pfam Name: 2-nitropropane dioxygenase Pfam Description: 2-nitropropane dioxygenase
  misc_feature (1)..(115): Homolog of NCBI NO: 30697982 NR Description: 2-nitropropane dioxygenase-related protein
  misc_feature (44)..(115): Homolog of NCBI NO: 30697978 NR Description: 2-nitropropane dioxygenase-related protein
  misc_feature (20)..(115): Homolog of NCBI NO: 38505809 NR Description: 2-nitropropane dioxygenase [Synechocystis sp. PCC
  misc_feature (4)..(112): Homolog of NCBI NO: 16127609 NR Description: conserved hypothetical protein [Caulobacter
  misc_feature (4)..(127): Homolog of NCBI NO: 20807921 NR Description: Dioxygenases related to 2-nitropropane [Thermoanaerobacter tengcongensis] >gi|20516489|gb|AAM24696.1|
  misc_feature (4)..(129): Homolog of NCBI NO: 16802856 NR Description: similar to oxidoreductases [Listeria
  misc_feature (4)..(129): Homolog of NCBI NO: 16799884 NR Description: similar to oxidoreductases [Listeria innocua]
  misc_feature (5)..(125): Homolog of NCBI NO: 23025170 NR Description: hypothetical protein [Leuconostoc mesenteroides
  misc_feature (4)..(128): Homolog of NCBI NO: 15896810 NR Description: Dioxygenase related to 2-nitropropane dioxygenase
  misc_feature (4)..(113): Homolog of NCBI NO: 28377742 NR Description: 2-nitropropane dioxygenase [Lactobacillus
MKGILGFEYGIVQAPLGPDISGPELVAAVANAGGIGLLRCPDWECPDYLRELIRKTKTLTEKPFGIGVVLAFPHDLNIKTILEEKVAVLQLYWGDCSQELVDDAHFAGVKVIPQLTFERWGMSKKLERLLL

SEQ ID NO: 84725 - DNA, 1382 bp, Arabidopsis thaliana
  misc_feature (1)..(1382): Ceres Seq. ID no. 12676651
  misc_feature: MA Experiment ID: 20000180 Result: Up-regulated in Transcription
  misc_feature: MA Experiment 20000180 PARAMETER Experiment Name: At_Germinating_Seeds_P Parameter: Age (hr) Value: 24 vs. 0
  misc_feature: MA Experiment 20000180 PARAMETER Experiment Name: At_Germinating_Seeds_P Parameter: Tissue Value: Germinating Seeds
  misc_feature: MA Experiment ID: 20000182 Result: Up-regulated in Transcription
  misc_feature: MA Experiment 20000182 PARAMETER Experiment Name: At_2mM_SA_P Parameter: Age (day) Value: 14
  misc_feature: MA Experiment 20000182 PARAMETER Experiment Name: At_2mM_SA_P Parameter: Organism Value: A. thaliana
  misc_feature: MA Experiment 20000182 PARAMETER Experiment Name: At_2mM_SA_P Parameter: Plant Line Value: WS
  misc_feature: MA Experiment 20000182 PARAMETER Experiment Name: At_2mM_SA_P Parameter: Timepoint (hr) Value: 6
  misc_feature: MA Experiment 20000182 PARAMETER Experiment Name: At_2mM_SA_P Parameter: Tissue Value: Aerial
  misc_feature: MA Experiment 20000182 PARAMETER Experiment Name: At_2mM_SA_P Parameter: Treatment Value: 2mM SA vs. No Treatment
  misc_feature: MA Experiment ID: 20000185 Result: Up-regulated in Transcription
  misc_feature: MA Experiment 20000185 PARAMETER Experiment Name: At_Roots__P Parameter: Age (day) Value: 7 vs. 21
  misc_feature: MA Experiment 20000185 PARAMETER Experiment Name: At_Roots__P Parameter: Organism Value: A. thaliana
  misc_feature: MA Experiment 20000185 PARAMETER Experiment Name: At_Roots__P Parameter: Tissue Value: Roots vs. Whole Plant
  misc_feature: MA Experiment ID: 20000227 Result: Down-regulated in Transcription
  misc_feature: MA Experiment 20000227 PARAMETER Experiment Name: At_Root-Tips-vs-Tops_P Parameter: Tissue Value: Root Tips vs. Root Tops
  misc_feature: MA Experiment ID: 20000265 Result: Down-regulated in Transcription
  misc_feature: MA Experiment 20000265 PARAMETER Experiment Name: At_Open_Flower_P Parameter: Age (day) Value: 21
  misc_feature: MA Experiment 20000265 PARAMETER Experiment Name: At_Open_Flower_P Parameter: Plant Line Value: WS
  misc_feature: MA Experiment 20000265 PARAMETER Experiment Name: At_Open_Flower_P Parameter: Tissue Value: Closed Flower vs. Whole Plant
  misc_feature: MA Experiment ID: 20000267 Result: Down-regulated in Transcription
  misc_feature: MA Experiment 20000267 PARAMETER Experiment Name: At_Drought_P Parameter: Age (day) Value: 7
  misc_feature: MA Experiment 20000267 PARAMETER Experiment Name: At_Drought_P Parameter: Organism Value: A. thaliana
  misc_feature: MA Experiment 20000267 PARAMETER Experiment Name: At_Drought_P Parameter: Plant Line Value: WS
  misc_feature: MA Experiment 20000267 PARAMETER Experiment Name: At_Drought_P Parameter: Timepoint (hr) Value: 6
  misc_feature: MA Experiment 20000267 PARAMETER Experiment Name: At_Drought_P Parameter: Tissue Value: Whole Plant
  misc_feature: MA Experiment 20000267 PARAMETER Experiment Name: At_Drought_P Parameter: Treatment Value: Drought vs. No Drought
  misc_feature: MA Experiment ID: 20000268 Result: Down-regulated in Transcription
  misc_feature: MA Experiment 20000268 PARAMETER Experiment Name: At_100mM_NaCl__P Parameter: Age (day) Value: 14
  misc_feature: MA Experiment 20000268 PARAMETER Experiment Name: At_100mM_NaCl__P Parameter: Organism Value: A. thaliana
  misc_feature: MA Experiment 20000268 PARAMETER Experiment Name: At_100mM_NaCl__P Parameter: Plant Line Value: WS
  misc_feature: MA Experiment 20000268 PARAMETER Experiment Name: At_100mM_NaCl__P Parameter: Timepoint (hr) Value: 6
  misc_feature: MA Experiment 20000268 PARAMETER Experiment Name: At_100mM_NaCl__P Parameter: Tissue Value: Whole Plant
  misc_feature: MA Experiment 20000268 PARAMETER Experiment Name: At_100mM_NaCl__P Parameter: Treatment Value: 100mM NaCl vs. No Treatment
  misc_feature: MA Experiment ID: 20000436 Result: Down-regulated in Transcription
  misc_feature: MA Experiment 20000436 PARAMETER Experiment Name: At_Drought_P Parameter: Age (day) Value: 7
  misc_feature: MA Experiment 20000436 PARAMETER Experiment Name: At_Drought_P Parameter: Organism Value: A. thaliana
  misc_feature: MA Experiment 20000436 PARAMETER Experiment Name: At_Drought_P Parameter: Plant Line Value: WS
  misc_feature: MA Experiment 20000436 PARAMETER Experiment Name: At_Drought_P Parameter: Timepoint (hr) Value: 12
  misc_feature: MA Experiment 20000436 PARAMETER Experiment Name: At_Drought_P Parameter: Tissue Value: Whole Plant
  misc_feature: MA Experiment 20000436 PARAMETER Experiment Name: At_Drought_P Parameter: Treatment Value: Drought vs. No Drought
  misc_feature: MA Experiment ID: 20000437 Result: Down-regulated in Transcription
  misc_feature: MA Experiment 20000437 PARAMETER Experiment Name: At_Drought_P Parameter: Age (day) Value: 8
  misc_feature: MA Experiment 20000437 PARAMETER Experiment Name: At_Drought_P Parameter: Organism Value: A. thaliana
  misc_feature: MA Experiment 20000437 PARAMETER Experiment Name: At_Drought_P Parameter: Plant Line Value: WS
  misc_feature: MA Experiment 20000437 PARAMETER Experiment Name: At_Drought_P Parameter: Timepoint (hr) Value: 24
  misc_feature: MA Experiment 20000437 PARAMETER Experiment Name: At_Drought_P Parameter: Tissue Value: Whole Plant
  misc_feature: MA Experiment 20000437 PARAMETER Experiment Name: At_Drought_P Parameter: Treatment Value: Drought vs. No Drought
  misc_feature: MA Experiment ID: 20000439 Result: Up-regulated in Transcription
  misc_feature: MA Experiment 20000439 PARAMETER Experiment Name: At_Roots__P Parameter: Age (day) Value: 14 vs. 21
  misc_feature: MA Experiment 20000439 PARAMETER Experiment Name: At_Roots__P Parameter: Organism Value: A. thaliana
  misc_feature: MA Experiment 20000439 PARAMETER Experiment Name: At_Roots__P Parameter: Tissue Value: Roots vs. Whole Plant
  misc_feature: MA Experiment ID: 20000441 Result: Up-regulated in Transcription
  misc_feature: MA Experiment 20000441 PARAMETER Experiment Name: At_1uM_BR-BRZ__P Parameter: Tissue Value: Shoot Apices
  misc_feature: MA Experiment 20000441 PARAMETER Experiment Name: At_1uM_BR-BRZ__P Parameter: Treatment Value: 1uM BR vs. No Treatment
  misc_feature: MA Experiment ID: 20000443 Result: Up-regulated in Transcription
  misc_feature: MA Experiment 20000443 PARAMETER Experiment Name: At_1uM_BR-BRZ__P Parameter: Tissue Value: Shoot Apices
  misc_feature: MA Experiment 20000443 PARAMETER Experiment Name: At_1uM_BR-BRZ__P Parameter: Treatment Value: 1uM BRZ vs. No Treatment
  misc_feature: MA Experiment ID: 20000573 Result: Up-regulated in Transcription
  misc_feature: MA Experiment 20000573 PARAMETER Experiment Name: At_100uM_ABA_Mutants__P Parameter: Organism Value: A. thaliana
  misc_feature: MA Experiment 20000573 PARAMETER Experiment Name: At_100uM_ABA_Mutants__P Parameter: Plant Line Value: CS22 vs. Ler wt
  misc_feature: MA Experiment 20000573 PARAMETER Experiment Name: At_100uM_ABA_Mutants__P Parameter: Timepoint (hr) Value: N/A
  misc_feature: MA Experiment 20000573 PARAMETER Experiment Name: At_100uM_ABA_Mutants__P Parameter: Tissue Value: Whole Plant
  misc_feature: MA Experiment 20000573 PARAMETER Experiment Name: At_100uM_ABA_Mutants__P Parameter: Treatment Value: None
  misc_feature: MA Experiment ID: 20000574 Result: Up-regulated in Transcription
  misc_feature: MA Experiment 20000574 PARAMETER Experiment Name: At_100uM_ABA_Mutants__P Parameter: Organism Value: A. thaliana
  misc_feature: MA Experiment 20000574 PARAMETER Experiment Name: At_100uM_ABA_Mutants__P Parameter: Plant Line Value: CS23 vs. Ler wt
  misc_feature: MA Experiment 20000574 PARAMETER Experiment Name: At_100uM_ABA_Mutants__P Parameter: Timepoint (hr) Value: N/A
  misc_feature: MA Experiment 20000574 PARAMETER Experiment Name: At_100uM_ABA_Mutants__P Parameter: Tissue Value: Whole Plant
  misc_feature: MA Experiment 20000574 PARAMETER Experiment Name: At_100uM_ABA_Mutants__P Parameter: Treatment Value: None
  misc_feature: MA Experiment ID: 20000576 Result: Down-regulated in Transcription
  misc_feature: MA Experiment 20000576 PARAMETER Experiment Name: At_100uM_ABA_Mutants__P Parameter: Organism Value: A. thaliana
  misc_feature: MA Experiment 20000576 PARAMETER Experiment Name: At_100uM_ABA_Mutants__P Parameter: Plant Line Value: CS23
  misc_feature: MA Experiment 20000576 PARAMETER Experiment Name: At_100uM_ABA_Mutants__P Parameter: Timepoint (hr) Value: 6
  misc_feature: MA Experiment 20000576 PARAMETER Experiment Name: At_100uM_ABA_Mutants__P Parameter: Tissue Value: Whole Plant
  misc_feature: MA Experiment 20000576 PARAMETER Experiment Name: At_100uM_ABA_Mutants__P Parameter: Treatment Value: 1uM ABA vs. No Treatment
  misc_feature: MA Experiment ID: 20000709 Result: Down-regulated in Transcription
  misc_feature: MA Experiment 20000709 PARAMETER Experiment Name: At_15mM_NH4NO3_L-to-H_P Parameter: Age (hr) Value: 14
  misc_feature: MA Experiment 20000709 PARAMETER Experiment Name: At_15mM_NH4NO3_L-to-H_P Parameter: Organism Value: A. thaliana
  misc_feature: MA Experiment 20000709 PARAMETER Experiment Name: At_15mM_NH4NO3_L-to-H_P Parameter: Plant Line Value: WS
  misc_feature: MA Experiment 20000709 PARAMETER Experiment Name: At_15mM_NH4NO3_L-to-H_P Parameter: Timepoint (hr) Value: 4
  misc_feature: MA Experiment 20000709 PARAMETER Experiment Name: At_15mM_NH4NO3_L-to-H_P Parameter: Tissue Value: Aerial
  misc_feature: MA Experiment 20000709 PARAMETER Experiment Name: At_15mM_NH4NO3_L-to-H_P Parameter: Treatment Value: 15mM NH4NO3 vs. 30mM Mannitol
  misc_feature: MA Experiment ID: 20001451 Result: Down-regulated in Transcription
  misc_feature: MA Experiment 20001451 PARAMETER Experiment Name: At_Far-red-induction_P Parameter: Age (day) Value: 7
  misc_feature: MA Experiment 20001451 PARAMETER Experiment Name: At_Far-red-induction_P Parameter: Light Value: Far-red vs. White
  misc_feature: MA Experiment 20001451 PARAMETER Experiment Name: At_Far-red-induction_P Parameter: Organism Value: A. thaliana
  misc_feature: MA Experiment 20001451 PARAMETER Experiment Name: At_Far-red-induction_P Parameter: Plant Line Value: Columbia
  misc_feature: MA Experiment 20001451 PARAMETER Experiment Name: At_Far-red-induction_P Parameter: Timepoint (hr) Value: 24
  misc_feature: MA Experiment 20001451 PARAMETER Experiment Name: At_Far-red-induction_P Parameter: Tissue Value: Whole Plant
  misc_feature: MA Experiment ID: 20001554 Result: Down-regulated in Transcription
  misc_feature: MA Experiment 20001554 PARAMETER Experiment Name: At_Drought_Soil_Dry_P Parameter: Age (day) Value: 21
  misc_feature: MA Experiment 20001554 PARAMETER Experiment Name: At_Drought_Soil_Dry_P Parameter: Organism Value: A. thaliana
  misc_feature: MA Experiment 20001554 PARAMETER Experiment Name: At_Drought_Soil_Dry_P Parameter: Plant Line Value: WS
  misc_feature: MA Experiment 20001554 PARAMETER Experiment Name: At_Drought_Soil_Dry_P Parameter: Post Timepoint (hr) Value: None
  misc_feature: MA Experiment 20001554 PARAMETER Experiment Name: At_Drought_Soil_Dry_P Parameter: Post-Treatment Value: None
  misc_feature: MA Experiment 20001554 PARAMETER Experiment Name: At_Drought_Soil_Dry_P Parameter: Timepoint (day) Value: 7
  misc_feature: MA Experiment 20001554 PARAMETER Experiment Name: At_Drought_Soil_Dry_P Parameter: Treatment Value: Drought vs. No Drought
  misc_feature: MA Experiment ID: 20001556 Result: Down-regulated in Transcription
  misc_feature: MA Experiment 20001556 PARAMETER Experiment Name: At_Drought_Soil_Dry_P Parameter: Age (day) Value: 26
  misc_feature: MA Experiment 20001556 PARAMETER Experiment Name: At_Drought_Soil_Dry_P Parameter: Organism Value: A. thaliana
  misc_feature: MA Experiment 20001556 PARAMETER Experiment Name: At_Drought_Soil_Dry_P Parameter: Plant Line Value: WS
  misc_feature: MA Experiment 20001556 PARAMETER Experiment Name: At_Drought_Soil_Dry_P Parameter: Post Timepoint (hr) Value: None
  misc_feature: MA Experiment 20001556 PARAMETER Experiment Name: At_Drought_Soil_Dry_P Parameter: Post-Treatment Value: None
  misc_feature: MA Experiment 20001556 PARAMETER Experiment Name: At_Drought_Soil_Dry_P Parameter: Timepoint (day) Value: 12
  misc_feature: MA Experiment 20001556 PARAMETER Experiment Name: At_Drought_Soil_Dry_P Parameter: Treatment Value: Drought vs. No Drought
  misc_feature: MA Experiment ID: 20001557 Result: Up-regulated in Transcription
  misc_feature: MA Experiment 20001557 PARAMETER Experiment Name: At_Drought_Soil_Dry_P Parameter: Age (day) Value: 27
  misc_feature: MA Experiment 20001557 PARAMETER Experiment Name: At_Drought_Soil_Dry_P Parameter: Organism Value: A. thaliana
  misc_feature: MA Experiment 20001557 PARAMETER Experiment Name: At_Drought_Soil_Dry_P Parameter: Plant Line Value: WS
  misc_feature: MA Experiment 20001557 PARAMETER Experiment Name: At_Drought_Soil_Dry_P Parameter: Post Timepoint (hr) Value: 3
  misc_feature: MA Experiment 20001557 PARAMETER Experiment Name: At_Drought_Soil_Dry_P Parameter: Post-Treatment Value: Re-Water vs. No Drought
  misc_feature: MA Experiment 20001557 PARAMETER Experiment Name: At_Drought_Soil_Dry_P Parameter: Timepoint (day) Value: 13
  misc_feature: MA Experiment 20001557 PARAMETER Experiment Name: At_Drought_Soil_Dry_P Parameter: Treatment Value: Drought vs. No Drought
  misc_feature: MA Experiment ID: 20001558 Result: Up-regulated in Transcription
  misc_feature: MA Experiment 20001558 PARAMETER Experiment Name: At_Drought_Soil_Dry_P Parameter: Age (day) Value: 27
  misc_feature: MA Experiment 20001558 PARAMETER Experiment Name: At_Drought_Soil_Dry_P Parameter: Organism Value: A. thaliana
  misc_feature: MA Experiment 20001558 PARAMETER Experiment Name: At_Drought_Soil_Dry_P Parameter: Plant Line Value: WS
  misc_feature: MA Experiment 20001558 PARAMETER Experiment Name: At_Drought_Soil_Dry_P Parameter: Post Timepoint (hr) Value: 6
  misc_feature: MA Experiment 20001558 PARAMETER Experiment Name: At_Drought_Soil_Dry_P Parameter: Post-Treatment Value: Re-Water vs. No Drought
  misc_feature: MA Experiment 20001558 PARAMETER Experiment Name: At_Drought_Soil_Dry_P Parameter: Timepoint (day) Value: 13
  misc_feature: MA Experiment 20001558 PARAMETER Experiment Name: At_Drought_Soil_Dry_P Parameter: Treatment Value: Drought vs. No Drought
  misc_feature: MA Experiment ID: 20001560 Result: Up-regulated in Transcription
  misc_feature: MA Experiment 20001560 PARAMETER Experiment Name: At_Drought_Soil_Dry_P Parameter: Age (day) Value: 28
  misc_feature: MA Experiment 20001560 PARAMETER Experiment Name: At_Drought_Soil_Dry_P Parameter: Organism Value: A. thaliana
  misc_feature: MA Experiment 20001560 PARAMETER Experiment Name: At_Drought_Soil_Dry_P Parameter: Plant Line Value: WS
  misc_feature: MA Experiment 20001560 PARAMETER Experiment Name: At_Drought_Soil_Dry_P Parameter: Post Timepoint (hr) Value: None
  misc_feature: MA Experiment 20001560 PARAMETER Experiment Name: At_Drought_Soil_Dry_P Parameter: Post-Treatment Value: None
  misc_feature: MA Experiment 20001560 PARAMETER Experiment Name: At_Drought_Soil_Dry_P Parameter: Timepoint (day) Value: 14
  misc_feature: MA Experiment 20001560 PARAMETER Experiment Name: At_Drought_Soil_Dry_P Parameter: Treatment Value: Drought vs. No Drought
  misc_feature: MA Experiment ID: 20001904 Result: Down-regulated in Transcription
  misc_feature: MA Experiment 20001904 PARAMETER Experiment Name: At_Drought_Reproduction_P Parameter: Age (day) Value: 37
  misc_feature: MA Experiment 20001904 PARAMETER Experiment Name: At_Drought_Reproduction_P Parameter: Organism Value: A. thaliana
  misc_feature: MA Experiment 20001904 PARAMETER Experiment Name: At_Drought_Reproduction_P Parameter: Plant Line Value: WS
  misc_feature: MA Experiment 20001904 PARAMETER Experiment Name: At_Drought_Reproduction_P Parameter: Timepoint (day) Value: 7
  misc_feature: MA Experiment 20001904 PARAMETER Experiment Name: At_Drought_Reproduction_P Parameter: Tissue Value: Rosettes
  misc_feature: MA Experiment 20001904 PARAMETER Experiment Name: At_Drought_Reproduction_P Parameter: Treatment Value: Drought vs. No Drought
  misc_feature: MA Experiment ID: 20001910 Result: Down-regulated in Transcription
  misc_feature: MA Experiment 20001910 PARAMETER Experiment Name: At_Drought_Reproduction_P Parameter: Age (day) Value: 37
  misc_feature: MA Experiment 20001910 PARAMETER Experiment Name: At_Drought_Reproduction_P Parameter: Organism Value: A. thaliana
  misc_feature: MA Experiment 20001910 PARAMETER Experiment Name: At_Drought_Reproduction_P Parameter: Plant Line Value: WS
  misc_feature: MA Experiment 20001910 PARAMETER Experiment Name: At_Drought_Reproduction_P Parameter: Timepoint (day) Value: 7
  misc_feature: MA Experiment 20001910 PARAMETER Experiment Name: At_Drought_Reproduction_P Parameter: Tissue Value: Flowers
  misc_feature: MA Experiment 20001910 PARAMETER Experiment Name: At_Drought_Reproduction_P Parameter: Treatment Value: Drought vs. No Drought
cacacacttcatcttctctaaaaccctaaaatttaaacacaagatgggtttggttagatcattgtgcttattaataaccttccttaattgtctcatcatctcggttcatggccaagccaccgcaaggcctggtcctgtttccggcactaggattgggttttacttaactacgtgtcctagagctgagactattgtccgaaacgccgtgaatgctggtttcagttctgaccccagaatcgcacccggaatactgagaatgcatttccacgactgttttgtccaaggttgtgacggttcgatccttatatccggagctaacaccgagagaaccgccggtccgaacctcaatctccaaggatttgaagtcatagacaacgccaaaacgcagctcgaagccgcgtgtcctggagttgtctcttgtgctgatattttagcattagccgctcgtgacacagtcattctcgtaagccttaattatttcataaacgttatacgtaattaatgcattatcattacttttataagtttacatgtatataacgttatacatgcatgggttattgtgcatgcagactcaaggaacaggctggcaagtaccaacgggacgtagagatggtagagtttctttggcttcgaatgctaacaatctccctggtccccgtgactccgttgccgttcaacaacagaaattctccgccttgggactcaatactcgtgatctcgtcgtcctcgtcggaggacacacgatcggaacagcaggatgtggtgtattcaggaacaggctattcaataccaccggacaaaccgcagatccaaccatcgacccaacatttttggcgcagcttcaaacacaatgtccccaaaacggcgacggttcagtgcgcgtggatctcgacaccggaagcggaagcacttgggacacttcttactacaacaacctaagccgtgggcgtggagttctccaatccgatcaagtcctttggaccgatccagccactagacccatagtgcaacaattgatggctcctagaagcaccttcaacgttgagtttgcgaggtcaatggtcagaatgagtaatatcggtgtggttaccggagctaatggggaaatccgtagggtttgctctgcggttaattaattaaccgattagaatctgtcgtgataaactttcatgacgcaaagtacttgtttcgagtgtggttttaatctgaacaataaataaaccaatagaaaacgacatacaaagaaaaaacccaaaagtgggttgatgaaaattgtatctataaggtgttggtattcgatttcttttggttttagttaaaaaaaactgtaatgtcttcacaaaaatattataatgagtttggtcctagtttggattctt

SEQ ID NO: 84726 - protein, 202 aa, Arabidopsis thaliana
  peptide (1)..(202): Ceres Seq. ID no. 12676652
  misc_feature (15)..(166): Pfam Name: Peroxidase Pfam Description: Peroxidase
  misc_feature (15)..(202): Homolog of NCBI NO: 15237615 NR Description: peroxidase, putative; protein id: At5g64120.1, by cDNA: 23349., supported by cDNA: gi_16226218 [Arabidopsis >gi|26397643|sp|Q43387|PE71_ARATH Peroxidase 71 precursor
  misc_feature (15)..(202): Homolog of NCBI NO: 21592403 NR Description: peroxidase [Arabidopsis thaliana]
  misc_feature (15)..(202): Homolog of NCBI NO: 15241812 NR Description: peroxidase, putative; protein id: At5g39580.1 thaliana] >gi|26397795|sp|Q9FKA4|PE62_ARATH Peroxidase 62 (Atperox P62) (ATP24a) >gi|9758333|dbj|BAB08889.1| peroxidase
  misc_feature (15)..(202): Homolog of NCBI NO: 18558997 NR Description: bacterial-induced peroxidase [Gossypium hirsutum]
  misc_feature (15)..(202): Homolog of NCBI NO: 1890313 NR Description: peroxidase ATP24a [Arabidopsis thaliana]
  misc_feature (15)..(202): Homolog of NCBI NO: 7433065 NR Description: peroxidase (EC 1.11.1.7) precursor, - tomato >gi|1161566|emb|CAA64413.1| peroxidase [Lycopersicon
  misc_feature (17)..(202): Homolog of NCBI NO: 129808 NR Description: Cationic peroxidase 2 precursor (PNPC2)
  misc_feature (15)..(202): Homolog of NCBI NO: 19698452 NR Description: bacterial-induced gaiacol peroxidase [Gossypium
  misc_feature (15)..(202): Homolog of NCBI NO: 5381255 NR Description: peroxidase [Nicotiana tabacum]
  misc_feature (17)..(202): Homolog of NCBI NO: 1232069 NR Description: cationic peroxidase [Stylosanthes humilis]
MYITLYMHGLLCMQTQGTGWQVPTGRRDGRVSLASNANNLPGPRDSVAVQQQKFSALGLNTRDLVVLVGGHTIGTAGCGVFRNRLFNTTGQTADPTIDPTFLAQLQTQCPQNGDGSVRVDLDTGSGSTWDTSYYNNLSRGRGVLQSDQVLWTDPATRPIVQQLMAPRSTFNVEFARSMVRMSNIGVVTGANGEIRRVCSAVN

SEQ ID NO: 84727 - protein, 196 aa, Arabidopsis thaliana
  peptide (1)..(196): Ceres Seq. ID no. 12676653
  misc_feature (9)..(160): Pfam Name: Peroxidase Pfam Description: Peroxidase
  misc_feature (9)..(196): Homolog of NCBI NO: 15237615 NR Description: peroxidase, putative; protein id: At5g64120.1, by cDNA: 23349., supported by cDNA: gi_16226218 [Arabidopsis >gi|26397643|sp|Q43387|PE71_ARATH Peroxidase 71 precursor
  misc_feature (9)..(196): Homolog of NCBI NO: 21592403 NR Description: peroxidase [Arabidopsis thaliana]
  misc_feature (9)..(196): Homolog of NCBI NO: 15241812 NR Description: peroxidase, putative; protein id: At5g39580.1 thaliana] >gi|26397795|sp|Q9FKA4|PE62_ARATH Peroxidase 62 (Atperox P62) (ATP24a) >gi|9758333|dbj|BAB08889.1| peroxidase
  misc_feature (9)..(196): Homolog of NCBI NO: 18558997 NR Description: bacterial-induced peroxidase [Gossypium hirsutum]
  misc_feature (9)..(196): Homolog of NCBI NO: 1890313 NR Description: peroxidase ATP24a [Arabidopsis thaliana]
  misc_feature (9)..(196): Homolog of NCBI NO: 7433065 NR Description: peroxidase (EC 1.11.1.7) precursor, - tomato >gi|1161566|emb|CAA64413.1| peroxidase [Lycopersicon
  misc_feature (11)..(196): Homolog of NCBI NO: 129808 NR Description: Cationic peroxidase 2 precursor (PNPC2)
  misc_feature (9)..(196): Homolog of NCBI NO: 19698452 NR Description: bacterial-induced gaiacol peroxidase [Gossypium
  misc_feature (9)..(196): Homolog of NCBI NO: 5381255 NR Description: peroxidase [Nicotiana tabacum]
  misc_feature (11)..(196): Homolog of NCBI NO: 1232069 NR Description: cationic peroxidase [Stylosanthes humilis]
MHGLLCMQTQGTGWQVPTGRRDGRVSLASNANNLPGPRDSVAVQQQKFSALGLNTRDLVVLVGGHTIGTAGCGVFRNRLFNTTGQTADPTIDPTFLAQLQTQCPQNGDGSVRVDLDTGSGSTWDTSYYNNLSRGRGVLQSDQVLWTDPATRPIVQQLMAPRSTFNVEFARSMVRMSNIGVVTGANGEIRRVCSAVN

SEQ ID NO: 84728 - protein, 190 aa, Arabidopsis thaliana
  peptide (1)..(190): Ceres Seq. ID no. 12676654
  misc_feature (3)..(154): Pfam Name: Peroxidase Pfam Description: Peroxidase
  misc_feature (3)..(190): Homolog of NCBI NO: 15237615 NR Description: peroxidase, putative; protein id: At5g64120.1, by cDNA: 23349., supported by cDNA: gi_16226218 [Arabidopsis >gi|26397643|sp|Q43387|PE71_ARATH Peroxidase 71 precursor
  misc_feature (3)..(190): Homolog of NCBI NO: 21592403 NR Description: peroxidase [Arabidopsis thaliana]
  misc_feature (3)..(190): Homolog of NCBI NO: 15241812 NR Description: peroxidase, putative; protein id: At5g39580.1 thaliana] >gi|26397795|sp|Q9FKA4|PE62_ARATH Peroxidase 62 (Atperox P62) (ATP24a) >gi|9758333|dbj|BAB08889.1| peroxidase
  misc_feature (3)..(190): Homolog of NCBI NO: 18558997 NR Description: bacterial-induced peroxidase [Gossypium hirsutum]
  misc_feature (3)..(190): Homolog of NCBI NO: 1890313 NR Description: peroxidase ATP24a [Arabidopsis thaliana]
  misc_feature (3)..(190): Homolog of NCBI NO: 7433065 NR Description: peroxidase (EC 1.11.1.7) precursor, - tomato >gi|1161566|emb|CAA64413.1| peroxidase [Lycopersicon
  misc_feature (5)..(190): Homolog of NCBI NO: 129808 NR Description: Cationic peroxidase 2 precursor (PNPC2)
  misc_feature (3)..(190): Homolog of NCBI NO: 19698452 NR Description: bacterial-induced gaiacol peroxidase [Gossypium
  misc_feature (3)..(190): Homolog of NCBI NO: 5381255 NR Description: peroxidase [Nicotiana tabacum]
  misc_feature (5)..(190): Homolog of NCBI NO: 1232069 NR Description: cationic peroxidase [Stylosanthes humilis]
MQTQGTGWQVPTGRRDGRVSLASNANNLPGPRDSVAVQQQKFSALGLNTRDLVVLVGGHTIGTAGCGVFRNRLFNTTGQTADPTIDPTFLAQLQTQCPQNGDGSVRVDLDTGSGSTWDTSYYNNLSRGRGVLQSDQVLWTDPATRPIVQQLMAPRSTFNVEFARSMVRMSNIGVVTGANGEIRRVCSAVN

SEQ ID NO: 84729 - DNA, 1236 bp, Arabidopsis thaliana
  misc_feature (1)..(1236): Ceres Seq. ID no. 12676655
  misc_feature: MA Experiment ID: 108434 Result: Down-regulated in Transcription
  misc_feature: MA Experiment 108434 PARAMETER Experiment Name: At_Root_Tips_cDNA_P Parameter: Tissue Value: Root Tips
  misc_feature: MA Experiment ID: 20000184 Result: Up-regulated in Transcription
  misc_feature: MA Experiment 20000184 PARAMETER Experiment Name: At_Shoots__P Parameter: Age (day) Value: 7
  misc_feature: MA Experiment 20000184 PARAMETER Experiment Name: At_Shoots__P Parameter: Tissue Value: Shoots vs. Whole Plant
  misc_feature: MA Experiment ID: 20000185 Result: Up-regulated in Transcription
  misc_feature: MA Experiment 20000185 PARAMETER Experiment Name: At_Roots__P Parameter: Age (day) Value: 7 vs. 21
  misc_feature: MA Experiment 20000185 PARAMETER Experiment Name: At_Roots__P Parameter: Organism Value: A. thaliana
  misc_feature: MA Experiment 20000185 PARAMETER Experiment Name: At_Roots__P Parameter: Tissue Value: Roots vs. Whole Plant
  misc_feature: MA Experiment ID: 20000224 Result: Down-regulated in Transcription
  misc_feature: MA Experiment ID: 20000265 Result: Down-regulated in Transcription
  misc_feature: MA Experiment 20000265 PARAMETER Experiment Name: At_Open_Flower_P Parameter: Age (day) Value: 21
  misc_feature: MA Experiment 20000265 PARAMETER Experiment Name: At_Open_Flower_P Parameter: Plant Line Value: WS
  misc_feature: MA Experiment 20000265 PARAMETER Experiment Name: At_Open_Flower_P Parameter: Tissue Value: Closed Flower vs. Whole Plant
  misc_feature: MA Experiment ID: 20000267 Result: Down-regulated in Transcription
  misc_feature: MA Experiment 20000267 PARAMETER Experiment Name: At_Drought_P Parameter: Age (day) Value: 7
  misc_feature: MA Experiment 20000267 PARAMETER Experiment Name: At_Drought_P Parameter: Organism Value: A. thaliana
  misc_feature: MA Experiment 20000267 PARAMETER Experiment Name: At_Drought_P Parameter: Plant Line Value: WS
  misc_feature: MA Experiment 20000267 PARAMETER Experiment Name: At_Drought_P Parameter: Timepoint (hr) Value: 6
  misc_feature: MA Experiment 20000267 PARAMETER Experiment Name: At_Drought_P Parameter: Tissue Value: Whole Plant
  misc_feature: MA Experiment 20000267 PARAMETER Experiment Name: At_Drought_P Parameter: Treatment Value: Drought vs. No Drought
  misc_feature: MA Experiment ID: 20000268 Result: Down-regulated in Transcription
  misc_feature: MA Experiment 20000268 PARAMETER Experiment Name: At_100mM_NaCl__P Parameter: Age (day) Value: 14
  misc_feature: MA Experiment 20000268 PARAMETER Experiment Name: At_100mM_NaCl__P Parameter: Organism Value: A. thaliana
  misc_feature: MA Experiment 20000268 PARAMETER Experiment Name: At_100mM_NaCl__P Parameter: Plant Line Value: WS
  misc_feature: MA Experiment 20000268 PARAMETER Experiment Name: At_100mM_NaCl__P Parameter: Timepoint (hr) Value: 6
  misc_feature: MA Experiment 20000268 PARAMETER Experiment Name: At_100mM_NaCl__P Parameter: Tissue Value: Whole Plant
  misc_feature: MA Experiment 20000268 PARAMETER Experiment Name: At_100mM_NaCl__P Parameter: Treatment Value: 100mM NaCl vs. No Treatment
  misc_feature: MA Experiment ID: 20000436 Result: Down-regulated in Transcription
  misc_feature: MA Experiment 20000436 PARAMETER Experiment Name: At_Drought_P Parameter: Age (day) Value: 7
  misc_feature: MA Experiment 20000436 PARAMETER Experiment Name: At_Drought_P Parameter: Organism Value: A. thaliana
  misc_feature: MA Experiment 20000436 PARAMETER Experiment Name: At_Drought_P Parameter: Plant Line Value: WS
  misc_feature: MA Experiment 20000436 PARAMETER Experiment Name: At_Drought_P Parameter: Timepoint (hr) Value: 12
  misc_feature: MA Experiment 20000436 PARAMETER Experiment Name: At_Drought_P Parameter: Tissue Value: Whole Plant
  misc_feature: MA Experiment 20000436 PARAMETER Experiment Name: At_Drought_P Parameter: Treatment Value: Drought vs. No Drought
  misc_feature: MA Experiment ID: 20000437 Result: Down-regulated in Transcription
  misc_feature: MA Experiment 20000437 PARAMETER Experiment Name: At_Drought_P Parameter: Age (day) Value: 8
  misc_feature: MA Experiment 20000437 PARAMETER Experiment Name: At_Drought_P Parameter: Organism Value: A. thaliana
  misc_feature: MA Experiment 20000437 PARAMETER Experiment Name: At_Drought_P Parameter: Plant Line Value: WS
  misc_feature: MA Experiment 20000437 PARAMETER Experiment Name: At_Drought_P Parameter: Timepoint (hr) Value: 24
  misc_feature: MA Experiment 20000437 PARAMETER Experiment Name: At_Drought_P Parameter: Tissue Value: Whole Plant
  misc_feature: MA Experiment 20000437 PARAMETER Experiment Name: At_Drought_P Parameter: Treatment Value: Drought vs. No Drought
  misc_feature: MA Experiment ID: 20000439 Result: Up-regulated in Transcription
  misc_feature: MA Experiment 20000439 PARAMETER Experiment Name: At_Roots__P Parameter: Age (day) Value: 14 vs. 21
  misc_feature: MA Experiment 20000439 PARAMETER Experiment Name: At_Roots__P Parameter: Organism Value: A. thaliana
  misc_feature: MA Experiment 20000439 PARAMETER Experiment Name: At_Roots__P Parameter: Tissue Value: Roots vs. Whole Plant
acacaacaaacacaacttctacaagactcaaatagtttctatttaattactaaaaagaaaaatgggtcgtggttacaatttgctattcgttctagtaacgtttttagtattggttgcagctgtaaccgcacaagggaaccgtggctcaaacagcggtggtggtcgaagaccacatgttgggttttatgggaatagatgccgaaacgtagagtctattgtgagatctgtagttcagtctcatgtccggtctatcccggctaatgcacctggaattttgcgaatgcatttccacgattgctttgtccatggctgcgatggctcggttctcctcgctggtaacacctcagagagaaccgcagttccgaaccgttcattgagagggttcgaagttattgaagaagctaaggctcggcttgagaaggcttgtcctcgtaccgtttcttgtgctgatattctcacccttgcagcccgagacgccgtcgtttaccggtggacaacgctgggaagtgcccttgggacgtctcgacggccgaatctcgcaagcctcagacgtgaacttgcccggaccaagcgactccgttgctaagcagaagcaagacttcgctgctaaaactctcaacacattagacctcgtgactcttgttggcggacacacaataggaactgctggctgcggtctagtaaggggaaggttcgttaacttcaacggcacaggacaacctgacccatcaatcgacccgagttttgtgccgctgattctggctcagtgccctcaaaatggaggcacccgagtggagttagacgagggaagtgttgacaagtttgacacatcgttcctaaggaaggtgacgtcaagtcgcgtggttctccaatccgatctagtcctatggaaggatcccgagacccgagccatcattgaacgtttattaggattacgccgaccatccttgaggttcggaaccgagttcgggaagtcgatggtcaaaatgagtctcatagaagttaagactggatcagatggggagattcgtcgggtttgttccgccatcaactaagatttaaaaaaacacaaatgtgagctttgtttttcatttatgaattcgttaattaataatcacttgttttaaataaaagcttgctacagcattttgtggtcgatggttacgttttgattttcaagtgtaagattgtacttgtaaacaaaaaatgtattatataaaagtgttatttgtttct

SEQ ID NO: 84730 - protein, 174 aa, Arabidopsis thaliana
  peptide (1)..(174): Ceres Seq. ID no. 12676656
  misc_feature (53)..(141): Pfam Name: Peroxidase Pfam Description: Peroxidase
  misc_feature (1)..(141): Homolog of NCBI NO: 15237613 NR Description: peroxidase, putative; protein id: At5g64100.1, by cDNA: 3459., supported by cDNA: gi_20260225 [Arabidopsis >gi|26397728|sp|Q96511|PE69_ARATH Peroxidase 69 precursor
  misc_feature (6)..(140): Homolog of NCBI NO: 15237614 NR Description: peroxidase, putative; protein id: At5g64110.1, by cDNA: 2577., supported by cDNA: gi_17473851 [Arabidopsis >gi|26397808|sp|Q9FMI7|PE70_ARATH Peroxidase 70 precursor
  misc_feature (5)..(141): Homolog of NCBI NO: 7433065 NR Description: peroxidase (EC 1.11.1.7) precursor, - tomato >gi|1161566|emb|CAA64413.1| peroxidase [Lycopersicon
  misc_feature (6)..(141): Homolog of NCBI NO: 129808 NR Description: Cationic peroxidase 2 precursor (PNPC2)
  misc_feature (34)..(141): Homolog of NCBI NO: 5381255 NR Description: peroxidase [Nicotiana tabacum]
  misc_feature (34)..(161): Homolog of NCBI NO: 17066703 NR Description: peroxidase [Capsicum annuum]
  misc_feature (9)..(162): Homolog of NCBI NO: 18558997 NR Description: bacterial-induced peroxidase [Gossypium hirsutum]
  misc_feature (4)..(161): Homolog of NCBI NO: 1232069 NR Description: cationic peroxidase [Stylosanthes humilis]
  misc_feature (8)..(162): Homolog of NCBI NO: 21592403 NR Description: peroxidase [Arabidopsis thaliana]
  misc_feature (8)..(162): Homolog of NCBI NO: 15237615 NR Description: peroxidase, putative; protein id: At5g64120.1, by cDNA: 23349., supported by cDNA: gi_16226218 [Arabidopsis >gi|26397643|sp|Q43387|PE71_ARATH Peroxidase 71 precursor
MGRGYNLLFVLVTFLVLVAAVTAQGNRGSNSGGGRRPHVGFYGNRCRNVESIVRSVVQSHVRSIPANAPGILRMHFHDCFVHGCDGSVLLAGNTSERTAVPNRSLRGFEVIEEAKARLEKACPRTVSCADILTLAARDAVVYRWTTLGSALGTSRRPNLASLRRELARTKRLRC

SEQ ID NO: 84731 - protein, 101 aa, Arabidopsis thaliana
  peptide (1)..(101): Ceres Seq. ID no. 12676657
  misc_feature (1)..(68): Pfam Name: Peroxidase Pfam Description: Peroxidase
  misc_feature (1)..(68): Homolog of NCBI NO: 15237613 NR Description: peroxidase, putative; protein id: At5g64100.1, by cDNA: 3459., supported by cDNA: gi_20260225 [Arabidopsis >gi|26397728|sp|Q96511|PE69_ARATH Peroxidase 69 precursor
  misc_feature (1)..(67): Homolog of NCBI NO: 15237614 NR Description: peroxidase, putative; protein id: At5g64110.1, by cDNA: 2577., supported by cDNA: gi_17473851 [Arabidopsis >gi|26397808|sp|Q9FMI7|PE70_ARATH Peroxidase 70 precursor
  misc_feature (1)..(68): Homolog of NCBI NO: 7433065 NR Description: peroxidase (EC 1.11.1.7) precursor, - tomato >gi|1161566|emb|CAA64413.1| peroxidase [Lycopersicon
  misc_feature (1)..(68): Homolog of NCBI NO: 129808 NR Description: Cationic peroxidase 2 precursor (PNPC2)
  misc_feature (1)..(68): Homolog of NCBI NO: 5381255 NR Description: peroxidase [Nicotiana tabacum]
  misc_feature (1)..(88): Homolog of NCBI NO: 17066703 NR Description: peroxidase [Capsicum annuum]
  misc_feature (1)..(89): Homolog of NCBI NO: 18558997 NR Description: bacterial-induced peroxidase [Gossypium hirsutum]
  misc_feature (1)..(88): Homolog of NCBI NO: 1232069 NR Description: cationic peroxidase [Stylosanthes humilis]
  misc_feature (1)..(89): Homolog of NCBI NO: 21592403 NR Description: peroxidase [Arabidopsis thaliana]
  misc_feature (1)..(89): Homolog of NCBI NO: 15237615 NR Description: peroxidase, putative; protein id: At5g64120.1, by cDNA: 23349., supported by cDNA: gi_16226218 [Arabidopsis >gi|26397643|sp|Q43387|PE71_ARATH Peroxidase 71 precursor
MHFHDCFVHGCDGSVLLAGNTSERTAVPNRSLRGFEVIEEAKARLEKACPRTVSCADILTLAARDAVVYRWTTLGSALGTSRRPNLASLRRELARTKRLRC

SEQ ID NO: 84732 - DNA, 1389 bp, Arabidopsis thaliana
  misc_feature (1)..(1389): Ceres Seq. ID no. 12676658
  misc_feature: MA Experiment ID: 20000180 Result: Up-regulated in Transcription
  misc_feature: MA Experiment 20000180 PARAMETER Experiment Name: At_Germinating_Seeds_P Parameter: Age (hr) Value: 24 vs. 0
  misc_feature: MA Experiment 20000180 PARAMETER Experiment Name: At_Germinating_Seeds_P Parameter: Tissue Value: Germinating Seeds
  misc_feature: MA Experiment ID: 20000182 Result: Up-regulated in Transcription
  misc_feature: MA Experiment 20000182 PARAMETER Experiment Name: At_2mM_SA_P Parameter: Age (day) Value: 14
  misc_feature: MA Experiment 20000182 PARAMETER Experiment Name: At_2mM_SA_P Parameter: Organism Value: A. thaliana
  misc_feature: MA Experiment 20000182 PARAMETER Experiment Name: At_2mM_SA_P Parameter: Plant Line Value: WS
  misc_feature: MA Experiment 20000182 PARAMETER Experiment Name: At_2mM_SA_P Parameter: Timepoint (hr) Value: 6
  misc_feature: MA Experiment 20000182 PARAMETER Experiment Name: At_2mM_SA_P Parameter: Tissue Value: Aerial
  misc_feature: MA Experiment 20000182 PARAMETER Experiment Name: At_2mM_SA_P Parameter: Treatment Value: 2mM SA vs. No Treatment
  misc_feature: MA Experiment ID: 20000185 Result: Up-regulated in Transcription
  misc_feature: MA Experiment 20000185 PARAMETER Experiment Name: At_Roots__P Parameter: Age (day) Value: 7 vs. 21
  misc_feature: MA Experiment 20000185 PARAMETER Experiment Name: At_Roots__P Parameter: Organism Value: A. thaliana
  misc_feature: MA Experiment 20000185 PARAMETER Experiment Name: At_Roots__P Parameter: Tissue Value: Roots vs. Whole Plant
  misc_feature: MA Experiment ID: 20000439 Result: Up-regulated in Transcription
  misc_feature: MA Experiment 20000439 PARAMETER Experiment Name: At_Roots__P Parameter: Age (day) Value: 14 vs. 21
  misc_feature: MA Experiment 20000439 PARAMETER Experiment Name: At_Roots__P Parameter: Organism Value: A. thaliana
  misc_feature: MA Experiment 20000439 PARAMETER Experiment Name: At_Roots__P Parameter: Tissue Value: Roots vs. Whole Plant
  misc_feature: MA Experiment ID: 20000794 Result: Up-regulated in Transcription
  misc_feature: MA Experiment 20000794 PARAMETER Experiment Name: At_Petals_P Parameter: Age (day) Value: 23-25 days
  misc_feature: MA Experiment 20000794 PARAMETER Experiment Name: At_Petals_P Parameter: Plant Line Value: WS
  misc_feature: MA Experiment 20000794 PARAMETER Experiment Name: At_Petals_P Parameter: Tissue Value: Petals vs. Whole plant
  misc_feature: MA Experiment ID: 20001557 Result: Down-regulated in Transcription
  misc_feature: MA Experiment 20001557 PARAMETER Experiment Name: At_Drought_Soil_Dry_P Parameter: Age (day) Value: 27
  misc_feature: MA Experiment 20001557 PARAMETER Experiment Name: At_Drought_Soil_Dry_P Parameter: Organism Value: A. thaliana
  misc_feature: MA Experiment 20001557 PARAMETER Experiment Name: At_Drought_Soil_Dry_P Parameter: Plant Line Value: WS
  misc_feature: MA Experiment 20001557 PARAMETER Experiment Name: At_Drought_Soil_Dry_P Parameter: Post Timepoint (hr) Value: 3
  misc_feature: MA Experiment 20001557 PARAMETER Experiment Name: At_Drought_Soil_Dry_P Parameter: Post-Treatment Value: Re-Water vs. No Drought
  misc_feature: MA Experiment 20001557 PARAMETER Experiment Name: At_Drought_Soil_Dry_P Parameter: Timepoint (day) Value: 13
  misc_feature: MA Experiment 20001557 PARAMETER Experiment Name: At_Drought_Soil_Dry_P Parameter: Treatment Value: Drought vs. No Drought
  misc_feature: MA Experiment ID: 20001558 Result: Down-regulated in Transcription
  misc_feature: MA Experiment 20001558 PARAMETER Experiment Name: At_Drought_Soil_Dry_P Parameter: Age (day) Value: 27
  misc_feature: MA Experiment 20001558 PARAMETER Experiment Name: At_Drought_Soil_Dry_P Parameter: Organism Value: A. thaliana
  misc_feature: MA Experiment 20001558 PARAMETER Experiment Name: At_Drought_Soil_Dry_P Parameter: Plant Line Value: WS
  misc_feature: MA Experiment 20001558 PARAMETER Experiment Name: At_Drought_Soil_Dry_P Parameter: Post Timepoint (hr) Value: 6
  misc_feature: MA Experiment 20001558 PARAMETER Experiment Name: At_Drought_Soil_Dry_P Parameter: Post-Treatment Value: Re-Water vs. No Drought
  misc_feature: MA Experiment 20001558 PARAMETER Experiment Name: At_Drought_Soil_Dry_P Parameter: Timepoint (day) Value: 13
  misc_feature: MA Experiment 20001558 PARAMETER Experiment Name: At_Drought_Soil_Dry_P Parameter: Treatment Value: Drought vs. No Drought
  misc_feature: MA Experiment ID: 20001560 Result: Down-regulated in Transcription
  misc_feature: MA Experiment 20001560 PARAMETER Experiment Name: At_Drought_Soil_Dry_P Parameter: Age (day) Value: 28
  misc_feature: MA Experiment 20001560 PARAMETER Experiment Name: At_Drought_Soil_Dry_P Parameter: Organism Value: A. thaliana
  misc_feature: MA Experiment 20001560 PARAMETER Experiment Name: At_Drought_Soil_Dry_P Parameter: Plant Line Value: WS
  misc_feature: MA Experiment 20001560 PARAMETER Experiment Name: At_Drought_Soil_Dry_P Parameter: Post Timepoint (hr) Value: None
  misc_feature: MA Experiment 20001560 PARAMETER Experiment Name: At_Drought_Soil_Dry_P Parameter: Post-Treatment Value: None
  misc_feature: MA Experiment 20001560 PARAMETER Experiment Name: At_Drought_Soil_Dry_P Parameter: Timepoint (day) Value: 14
  misc_feature: MA Experiment 20001560 PARAMETER Experiment Name: At_Drought_Soil_Dry_P Parameter: Treatment Value: Drought vs. No Drought
atggatcatatgatatcagaaaacggagaaacaagtgccgaaggatcgatttgcggctatgattcgctgcatcaactcttatcagcgaatcttaagcccgagctctatcaggaggtaaaccggttgctccttggacgtaactgtgggagatcgcttgaacagattgttctgccggagtctgctaaagccttgtcttcaaaacatgattttgatctccaggctgctagcttttcagctgataaagagcaaatgagaaatcctcgagtggtcagagttggtctcattcaaaactccattgctcttccaaccactgctccattctcggaccaaacaagaggaatattcgacaagttgaagccgataatcgatgctgcgggtgttgctggtgttaacatactgtgcttgcaggaagcttggaccatgccatttgcattttgcactagggagaggagatggtgtgagtttgcagagcctgttgatggcgaatcgacaaagtttcttcaagaactcgctaaaaagtataacatggtgattgttagtcctattctcgaaagagatattgatcacggtgaagtgctttggaataccgctgtgattatagggaataatggaaatatcattggcaagcatcgaaagaaccatatacctagggtaggagatttcaacgagagcacctattacatggaaggagacacaggccatcctgtgtttgagacggtgtttgggaaaattgcggttaatatatgttatggcagacaccatcctctgaattggttagcttttggtctaaatggtgcagagattgtcttcaacccttcagcaactgttggtgaactcagtgaaccaatgtggcctattgaggcacgaaatgccgcaatagcaaacagttactttgttggatccattaaccgagttggaaccgaagtattccccaatccttttacgtcaggtgatggaaaaccgcaacacaatgatttcgggcatttctatgggtcaagccatttttctgcaccagatgcttcttgcacaccgtctttgtcccgttacaaagatggtttattgatctcggacatggatctcaatctctgccggcaatacaaggacaagtggggatttagaatgactgcaagatacgaagtctatgccgatcttttggcaaagtacataaagccagacttcaagcctcaagtcgtctctgacccattgctccacaagaattctacataagaagaaaatttcactctgtgaatcttcaaagaagaaaagtccaataatcaatgttcaatcatttgtgtaaatgtaacggtaactgaaaatctgtttgtagctgaatatatgttgatgccaaaaggcagctcctttgcttttataatcgaaccggtttataat

SEQ ID NO: 84733 - protein, 408 aa, Arabidopsis thaliana
  peptide (1)..(408): Ceres Seq. ID no. 12676659
  misc_feature (1)..(408): Homolog of NCBI NO: 30698009 NR Description: beta-ureidopropionase [Arabidopsis thaliana]
  misc_feature (7)..(407): Homolog of NCBI NO: 22775671 NR Description: contains ESTs
  misc_feature (20)..(401): Homolog of NCBI NO: 14334061 NR Description: beta-alanine synthase [Dictyostelium discoideum]
  misc_feature (22)..(400): Homolog of NCBI NO: 21358471 NR Description: CG3027-PA [Drosophila melanogaster]
  misc_feature (22)..(400): Homolog of NCBI NO: 40215848 NR Description: LD13390p [Drosophila melanogaster]
  misc_feature (20)..(400): Homolog of NCBI NO: 7706509 NR Description: beta-ureidopropionase [Homo sapiens]
  misc_feature (20)..(400): Homolog of NCBI NO: 6288790 NR Description: beta-ureidopropionase [Homo sapiens]
  misc_feature (20)..(403): Homolog of NCBI NO: 16758704 NR Description: ureidopropionase, beta [Rattus norvegicus]
  misc_feature (20)..(403): Homolog of NCBI NO: 19527212 NR Description: expressed sequence AI195023 [Mus musculus]
  misc_feature (21)..(397): Homolog of NCBI NO: 39597058 NR Description: Hypothetical protein CBG02618 [Caenorhabditis
MDHMISENGETSAEGSICGYDSLHQLLSANLKPELYQEVNRLLLGRNCGRSLEQIVLPESAKALSSKHDFDLQAASFSADKEQMRNPRVVRVGLIQNSIALPTTAPFSDQTRGIFDKLKPIIDAAGVAGVNILCLQEAWTMPFAFCTRERRWCEFAEPVDGESTKFLQELAKKYNMVIVSPILERDIDHGEVLWNTAVIIGNNGNIIGKHRKNHIPRVGDFNESTYYMEGDTGHPVFETVFGKIAVNICYGRHHPLNWLAFGLNGAEIVFNPSATVGELSEPMWPIEARNAAIANSYFVGSINRVGTEVFPNPFTSGDGKPQHNDFGHFYGSSHFSAPDASCTPSLSRYKDGLLISDMDLNLCRQYKDKWGFRMTARYEVYADLLAKYIKPDFKPQVVSDPLLHKNST

SEQ ID NO: 84734 - protein, 405 aa, Arabidopsis thaliana
  peptide (1)..(405): Ceres Seq. ID no. 12676660
  misc_feature (1)..(405): Homolog of NCBI NO: 30698009 NR Description: beta-ureidopropionase [Arabidopsis thaliana]
  misc_feature (4)..(404): Homolog of NCBI NO: 22775671 NR Description: contains ESTs
  misc_feature (17)..(398): Homolog of NCBI NO: 14334061 NR Description: beta-alanine synthase [Dictyostelium discoideum]
  misc_feature (19)..(397): Homolog of NCBI NO: 21358471 NR Description: CG3027-PA [Drosophila melanogaster]
  misc_feature (19)..(397): Homolog of NCBI NO: 40215848 NR Description: LD13390p [Drosophila melanogaster]
  misc_feature (17)..(397): Homolog of NCBI NO: 7706509 NR Description: beta-ureidopropionase [Homo sapiens]
  misc_feature (17)..(397): Homolog of NCBI NO: 6288790 NR Description: beta-ureidopropionase [Homo sapiens]
  misc_feature (17)..(400): Homolog of NCBI NO: 16758704 NR Description: ureidopropionase, beta [Rattus norvegicus]
  misc_feature (17)..(400): Homolog of NCBI NO: 19527212 NR Description: expressed sequence AI195023 [Mus musculus]
  misc_feature (18)..(394): Homolog of NCBI NO: 39597058 NR Description: Hypothetical protein CBG02618 [Caenorhabditis
MISENGETSAEGSICGYDSLHQLLSANLKPELYQEVNRLLLGRNCGRSLEQIVLPESAKALSSKHDFDLQAASFSADKEQMRNPRVVRVGLIQNSIALPTTAPFSDQTRGIFDKLKPIIDAAGVAGVNILCLQEAWTMPFAFCTRERRWCEFAEPVDGESTKFLQELAKKYNMVIVSPILERDIDHGEVLWNTAVIIGNNGNIIGKHRKNHIPRVGDFNESTYYMEGDTGHPVFETVFGKIAVNICYGRHHPLNWLAFGLNGAEIVFNPSATVGELSEPMWPIEARNAAIANSYFVGSINRVGTEVFPNPFTSGDGKPQHNDFGHFYGSSHFSAPDASCTPSLSRYKDGLLISDMDLNLCRQYKDKWGFRMTARYEVYADLLAKYIKPDFKPQVVSDPLLHKNST

SEQ ID NO: 84735 - protein, 325 aa, Arabidopsis thaliana
  peptide (1)..(325): Ceres Seq. ID no. 12676661
  misc_feature (1)..(325): Homolog of NCBI NO: 30698009 NR Description: beta-ureidopropionase [Arabidopsis thaliana]
  misc_feature (1)..(324): Homolog of NCBI NO: 22775671 NR Description: contains ESTs
  misc_feature (1)..(318): Homolog of NCBI NO: 14334061 NR Description: beta-alanine synthase [Dictyostelium discoideum]
  misc_feature (1)..(317): Homolog of NCBI NO: 21358471 NR Description: CG3027-PA [Drosophila melanogaster]
  misc_feature (1)..(317): Homolog of NCBI NO: 40215848 NR Description: LD13390p [Drosophila melanogaster]
  misc_feature (1)..(317): Homolog of NCBI NO: 7706509 NR Description: beta-ureidopropionase [Homo sapiens]
  misc_feature (1)..(317): Homolog of NCBI NO: 6288790 NR Description: beta-ureidopropionase [Homo sapiens]
  misc_feature (1)..(320): Homolog of NCBI NO: 16758704 NR Description: ureidopropionase, beta [Rattus norvegicus]
  misc_feature (1)..(320): Homolog of NCBI NO: 19527212 NR Description: expressed sequence AI195023 [Mus musculus]
  misc_feature (1)..(314): Homolog of NCBI NO: 39597058 NR Description: Hypothetical protein CBG02618 [Caenorhabditis
MRNPRVVRVGLIQNSIALPTTAPFSDQTRGIFDKLKPIIDAAGVAGVNILCLQEAWTMPFAFCTRERRWCEFAEPVDGESTKFLQELAKKYNMVIVSPILERDIDHGEVLWNTAVIIGNNGNIIGKHRKNHIPRVGDFNESTYYMEGDTGHPVFETVFGKIAVNICYGRHHPLNWLAFGLNGAEIVFNPSATVGELSEPMWPIEARNAAIANSYFVGSINRVGTEVFPNPFTSGDGKPQHNDFGHFYGSSHFSAPDASCTPSLSRYKDGLLISDMDLNLCRQYKDKWGFRMTARYEVYADLLAKYIKPDFKPQVVSDPLLHKNST

SEQ ID NO: 84736 - DNA, 942 bp, Arabidopsis thaliana
  misc_feature (1)..(942): Ceres Seq. ID no. 12676669
  misc_feature: MA Experiment ID: 108573 Result: Up-regulated in Transcription
  misc_feature: MA Experiment 108573 PARAMETER Experiment Name: At_Drought_cDNA_P Parameter: Timepoint (hr) Value: 6
  misc_feature: MA Experiment 108573 PARAMETER Experiment Name: At_Drought_cDNA_P Parameter: Tissue Value: Aerial
  misc_feature: MA Experiment 108573 PARAMETER Experiment Name: At_Drought_cDNA_P Parameter: Treatment Value: Drought vs. No Drought
  misc_feature: MA Experiment ID: 108577 Result: Up-regulated in Transcription
  misc_feature: MA Experiment 108577 PARAMETER Experiment Name: At_42deg_Heat_cDNA_P Parameter: Temperature (deg C) Value: 42 vs. 22
  misc_feature: MA Experiment 108577 PARAMETER Experiment Name: At_42deg_Heat_cDNA_P Parameter: Timepoint (hr) Value: 6
  misc_feature: MA Experiment 108577 PARAMETER Experiment Name: At_42deg_Heat_cDNA_P Parameter: Tissue Value: Aerial
  misc_feature: MA Experiment ID: 108585 Result: Up-regulated in Transcription
  misc_feature: MA Experiment 108585 PARAMETER Experiment Name: At_5mM_NaNP_cDNA_P Parameter: Timepoint (hr) Value: 6
  misc_feature: MA Experiment 108585 PARAMETER Experiment Name: At_5mM_NaNP_cDNA_P Parameter: Tissue Value: Aerial
  misc_feature: MA Experiment 108585 PARAMETER Experiment Name: At_5mM_NaNP_cDNA_P Parameter: Treatment Value: null
atgtcgcacttcggaaggtcaggtccaccggatatcagcgacacctactcacttctcgtccttaacatcaccttccgtacgactgctgatgatctctatcctctattcgcaaagtatggaaaggtcgttgatgtgtttattcccagagatcgaaggactggtgattcgcgtggttttgcgtttgttcggtataagtataaagacgaagctcacaaagcagtggaaaggcttgatggaagagttgttgatggcagagaaataactgttcagtttgcgaaatatgggccaaatgctgaaaaaatttccaaaggaagagttgtggaaccaccgccgaagtcacgaagatctagaagccgtagtcctaggcggagtcgtagtcctaggaggagccgtagcccgcctagacgtcgtagtcccagaagaagccgcagtcctcgtaggaggtcccgagatgactatagggaaaaagactaccggaagcggagcaggagcagaagctatgacaggcgtgaaaggcatgaggagaaggatagagatcatcgtcgtcgcactaggtctcgtagtgccagcccagatgaaaaacgcagagtcagaggccgttatgataatgagagccgcagtcacagtcgttccttgagtgcatctcctgctcgccgcagccctagaagttcctccccacagaaaacctctcctgctagagaagtttctcctgataagcgtagcaatgagaggtctccatctcctcgtcgcagcctcagcccaagaagccctgctttgcaaaaggcctctccttctaaggagatgtctcctgaaaggcgtagcaatgagaggtccccatctcctggtagccctgctcctctgcgcaaagttgatgctgcttctcgaagtcaatctccttatgctgcggaatgactgcagccacttgtgaaagtgatacggtgt

SEQ ID NO: 84737 - protein, 303 aa, Arabidopsis thaliana; identical to SEQ ID NO: 35347
  peptide (1)..(303): Ceres Seq. ID no. 12676670
  misc_feature (18)..(89): Pfam Name: RNA recognition motif. (a.k.a. RRM, RBD, or RNP domain) Pfam Description: RNA recognition motif. (a.k.a. RRM, RBD, or RNP
  misc_feature (1)..(303): Homolog of NCBI NO: 15237641 NR Description: arginine/serine-rich splicing factor SC35; id: At5g64200.1, supported by cDNA: gi_17380867 [Arabidopsis >gi|17380868|gb|AAL36246.1| unknown protein [Arabidopsis
  misc_feature (1)..(303): Homolog of NCBI NO: 9843653 NR Description: splicing factor SC35 [Arabidopsis thaliana]
  misc_feature (1)..(280): Homolog of NCBI NO: 33146621 NR Description: putative splicing factor, arginine/serine-rich 2
  misc_feature (1)..(288): Homolog of NCBI NO: 7446336 NR Description: probable arginine/serine-rich splicing factor -
  misc_feature (4)..(216): Homolog of NCBI NO: 28279759 NR Description: Similar to splicing factor, arginine/serine-rich
  misc_feature (4)..(234): Homolog of NCBI NO: 266991 NR Description: Splicing factor, arginine/serine-rich 2 (Splicing
  misc_feature (4)..(234): Homolog of NCBI NO: 6755478 NR Description: splicing factor, arginine/serine-rich 2; DNA Chr 11, Wayne State University 175, expressed; splicing factor [Mus musculus] >gi|27691222|ref|XP_213556.1| similar to
  misc_feature (4)..(234): Homolog of NCBI NO: 4506899 NR Description: splicing factor, arginine/serine-rich 2 [Homo
  misc_feature (5)..(279): Homolog of NCBI NO: 15055543 NR Description: 46kD arginine/serine-rich splicing factor [Homo
  misc_feature (4)..(221): Homolog of NCBI NO: 39794351 NR Description: Unknown (protein for MGC:75633) [Silurana

SEQ ID NO: 84738 - DNA, 1078 bp, Arabidopsis thaliana
  misc_feature (1)..(1078): Ceres Seq. ID no. 12676710
  misc_feature: MA Experiment ID: 108434 Result: Up-regulated in Transcription
  misc_feature: MA Experiment 108434 PARAMETER Experiment Name: At_Root_Tips_cDNA_P Parameter: Tissue Value: Root Tips
  misc_feature: MA Experiment ID: 108462 Result: Down-regulated in Transcription
  misc_feature: MA Experiment 108462 PARAMETER Experiment Name: At_Germinating_Seeds_cDNA_P Parameter: Age (day) Value: 2 vs. 0
  misc_feature: MA Experiment 108462 PARAMETER Experiment Name: At_Germinating_Seeds_cDNA_P Parameter: Tissue Value: Germinating Seeds
  misc_feature: MA Experiment ID: 108463 Result: Down-regulated in Transcription
  misc_feature: MA Experiment 108463 PARAMETER Experiment Name: At_Germinating_Seeds_cDNA_P Parameter: Age (day) Value: 3 vs. 0
  misc_feature: MA Experiment 108463 PARAMETER Experiment Name: At_Germinating_Seeds_cDNA_P Parameter: Tissue Value: Germinating Seeds
  misc_feature: MA Experiment ID: 108464 Result: Down-regulated in Transcription
  misc_feature: MA Experiment 108464 PARAMETER Experiment Name: At_Germinating_Seeds_cDNA_P Parameter: Age (day) Value: 4 vs. 0
  misc_feature: MA Experiment 108464 PARAMETER Experiment Name: At_Germinating_Seeds_cDNA_P Parameter: Tissue Value: Germinating Seeds
  misc_feature: MA Experiment ID: 108573 Result: Up-regulated in Transcription
  misc_feature: MA Experiment 108573 PARAMETER Experiment Name: At_Drought_cDNA_P Parameter: Timepoint (hr) Value: 6
  misc_feature: MA Experiment 108573 PARAMETER Experiment Name: At_Drought_cDNA_P Parameter: Tissue Value: Aerial
  misc_feature: MA Experiment 108573 PARAMETER Experiment Name: At_Drought_cDNA_P Parameter: Treatment Value: Drought vs. No Drought
gtttcaggcgagagagatgagcgcgacggagctgccgacgaaggaggcacacatacttaaaggccacgagggggcggttttagcggcgaggtttaacggtgacggaaactacgctctcacctgtggcaaggatcgaactatccgcctctggaacccgcaccgtggaatcttaatcaagacctacaaatctcatggccgcgaagtccgcgacgttcatgttacttcagacaatgccaaattttgctcatgtggtggtgatcggcaagtttactactgggatgtttcaactggacgtgtaatccgtaaattccgtggtcatgatggagaggtcaatgcagtgaagttcaatgattcgtcgtctgtggttgtatcagctgggttcgatcgttcgctacgtgtatgggactgcagatctcacagtgttgagccagtacagatcattgatacatttttggatacagtcatgtctgttgttttaacaaagactgagattattggtggtagtgtcgatggaacagttcgcacatttgacatgcgtatcggtagggagatgtcagataacctaggccaaccggttaactgtatatcgatatcaaatgatggaaactgcgttttagctggttgcttggattctactctgcgtctacttgacaggaccacaggagagctactccaagtctataaaggtcatatttccaagtcatttaaaacggattgttgcctcacgaattcggatgcacatgtgattggaggatcagaggatggattggttttcttttgggatttggtagatgcaaaagtgctatcgaaatttagagctcacgatttagtggtgacaagcgtgagttaccacccgaaggaagactgtatgttgacttcttcggtcgatggtacaattcgtgtctggaaaaaatgaagaaacaacaaatcttgacttcgattgattttgttatttacgtctcaaactcacctttcttcttctactataggctatagctggttttttggagttggaaagttgaaatattttgtagagtacttgtatcattgtatgtgaaggaaaactttttttaggcct

SEQ ID NO: 84739 - protein, 304 aa, Arabidopsis thaliana; identical to SEQ ID NO: 23166
  peptide (1)..(304): Ceres Seq. ID no. 12676711
  misc_feature (6)..(277): Homolog of NCBI NO: 10177204 NR Description: contains similarity to unknown
  misc_feature (6)..(304): Homolog of NCBI NO: 18424859 NR Description: G-protein beta-subunit (transducin) family; id: At5g64730.1, supported by cDNA: gi_15028246, supported by gi_21281168 [Arabidopsis thaliana] >gi|15028247|gb|AAK76712.1|
  misc_feature (8)..(304): Homolog of NCBI NO: 12838548 NR Description: unnamed protein product [Mus musculus]
  misc_feature (10)..(304): Homolog of NCBI NO: 14150114 NR Description: hypothetical protein MGC4238 [Homo sapiens]
  misc_feature (8)..(304): Homolog of NCBI NO: 34851410 NR Description: similar to RIKEN cDNA 1500041N16 [Rattus
  misc_feature (8)..(304): Homolog of NCBI NO: 18044039 NR Description: RIKEN cDNA 1500041N16 gene [Mus musculus]
  misc_feature (8)..(304): Homolog of NCBI NO: 13385884 NR Description: RIKEN cDNA 1500041N16 [Mus musculus]
  misc_feature (9)..(302): Homolog of NCBI NO: 39596796 NR Description: Hypothetical protein CBG02300 [Caenorhabditis
  misc_feature (9)..(302): Homolog of NCBI NO: 17533647 NR Description: Deoxyhypusine synthase [Caenorhabditis elegans]
  misc_feature (23)..(291): Homolog of NCBI NO: 24584567 NR Description: CG4935-PA [Drosophila melanogaster] symbol=BG:DS02740.2; cDNA=method:''sim4'', score:''1000.0'',

SEQ ID NO: 84740 - protein, 299 aa, Arabidopsis thaliana; identical to SEQ ID NO: 23167
  peptide (1)..(299): Ceres Seq. ID no. 12676712
  misc_feature (1)..(272): Homolog of NCBI NO: 10177204 NR Description: contains similarity to unknown
  misc_feature (1)..(299): Homolog of NCBI NO: 18424859 NR Description: G-protein beta-subunit (transducin) family; id: At5g64730.1, supported by cDNA: gi_15028246, supported by gi_21281168 [Arabidopsis thaliana] >gi|15028247|gb|AAK76712.1|
  misc_feature (3)..(299): Homolog of NCBI NO: 12838548 NR Description: unnamed protein product [Mus musculus]
  misc_feature (5)..(299): Homolog of NCBI NO: 14150114 NR Description: hypothetical protein MGC4238 [Homo sapiens]
  misc_feature (3)..(299): Homolog of NCBI NO: 34851410 NR Description: similar to RIKEN cDNA 1500041N16 [Rattus
  misc_feature (3)..(299): Homolog of NCBI NO: 18044039 NR Description: RIKEN cDNA 1500041N16 gene [Mus musculus]
  misc_feature (3)..(299): Homolog of NCBI NO: 13385884 NR Description: RIKEN cDNA 1500041N16 [Mus musculus]
  misc_feature (4)..(297): Homolog of NCBI NO: 39596796 NR Description: Hypothetical protein CBG02300 [Caenorhabditis
  misc_feature (4)..(297): Homolog of NCBI NO: 17533647 NR Description: Deoxyhypusine synthase [Caenorhabditis elegans]
  misc_feature (18)..(286): Homolog of NCBI NO: 24584567 NR Description: CG4935-PA [Drosophila melanogaster] symbol=BG:DS02740.2; cDNA=method:''sim4'', score:''1000.0'',

SEQ ID NO: 84741 - DNA, 2693 bp, Arabidopsis thaliana
  misc_feature (1)..(2693): Ceres Seq. ID no. 12676720
  misc_feature: MA Experiment ID: 20000315 Result: Down-regulated in Transcription
  misc_feature: MA Experiment 20000315 PARAMETER Experiment Name: At_14day_Shoots-Roots_Sub_P Parameter: Age (day) Value: 14
  misc_feature: MA Experiment 20000315 PARAMETER Experiment Name: At_14day_Shoots-Roots_Sub_P Parameter: Organism Value: A. thaliana
  misc_feature: MA Experiment 20000315 PARAMETER Experiment Name: At_14day_Shoots-Roots_Sub_P Parameter: Plant Line Value: WS
  misc_feature: MA Experiment 20000315 PARAMETER Experiment Name: At_14day_Shoots-Roots_Sub_P Parameter: Tissue Value: Shoots vs. Whole Plant
  misc_feature: MA Experiment ID: 20000328 Result: Down-regulated in Transcription
  misc_feature: MA Experiment 20000328 PARAMETER Experiment Name: At_42deg_Heat_Sub_P Parameter: Age (day) Value: 14
  misc_feature: MA Experiment 20000328 PARAMETER Experiment Name: At_42deg_Heat_Sub_P Parameter: Organism Value: A. thaliana
  misc_feature: MA Experiment 20000328 PARAMETER Experiment Name: At_42deg_Heat_Sub_P Parameter: Plant Line Value: WS
  misc_feature: MA Experiment 20000328 PARAMETER Experiment Name: At_42deg_Heat_Sub_P Parameter: Temperature (deg C) Value: 42 vs. 22
  misc_feature: MA Experiment 20000328 PARAMETER Experiment Name: At_42deg_Heat_Sub_P Parameter: Timepoint (hr) Value: 6
  misc_feature: MA Experiment 20000328 PARAMETER Experiment Name: At_42deg_Heat_Sub_P Parameter: Tissue Value: Aerial
  misc_feature: MA Experiment ID: 20001807 Result: Down-regulated in Transcription
  misc_feature: MA Experiment 20001807 PARAMETER Experiment Name: At_50mM_NH4NO3_L-to-H_Sub_P Parameter: Timepoint (hr) Value: 6
  misc_feature: MA Experiment 20001807 PARAMETER Experiment Name: At_50mM_NH4NO3_L-to-H_Sub_P Parameter: Tissue Value: Leaf
  misc_feature: MA Experiment 20001807 PARAMETER Experiment Name: At_50mM_NH4NO3_L-to-H_Sub_P Parameter: Treatment Value: 50mM NH4NO3 vs 100mM Mannitol
actgtcataattgcgatttgtttcgaaagacttttccatctaacaacagctccaacaaatgtaaacgaagaaagaaaatcaaaagtttggtttttctttgtaaaagacagagttttacagttttactttctcttcctaaagagttttcaactagccgaagtggaaccatccaagcctaagtattgttggttttattcgtcgagtgaatctttcttgctggaattattctctttccctttttggattttcttctccgcatcgatttttttttttgttgggcactttctttttctttttgctgttcccaaatctgagtttctcaaattttcttgagatttggggtcaatatctctgtttttccgtgaaaactgaagaattctctgagttatttggatttttatcttttgggtaactgaaaaaagttcgtttttttattactattgtagaattttgaatttagaaagtctcggattcctatagtaaatccactctatctaatctacaaacttaaaaatatgttttaacttttgtttcaaaggtttcttgtagatgtcacaatttcttagagaatccaacgttttcaattttggtagctcttagaaaaatggctctgcttattatcactgccttagtttttagtagtttatggtcatctgtgtcaccagatgctcaaggggatgcattatttgcgttgaggagctcgttacgtgcatctcctgaacagcttagtgattggaaccagaatcaagtcgatccttgtacttggtctcaagttatttgtgatgacaagaaacatgttacttctgtaaccttgtcttacatgaacttctcctcgggaacactgtcttcaggaataggaatcttgacaactctcaagactcttacattgaagggaaatggaataatgggtggaataccagaatccattggaaatctgtctagcttgaccagcttagatttggaggataatcacttaactgatcgcattccatccactctcggtaatctcaagaatctacagttcttgaccttgagtaggaataaccttaatggttctatcccggattcacttacaggtctatcaaaactgataaatattctgctcgactcaaataatctcagtggtgagattcctcagagtttattcaaaatcccaaaatacaatctttcaaatttatagtttcacagcaaacaacttgagctgtggtggcactttcccgcaaccttgtgtaaccgagtccagtccttcaggtgattcaagcagtagaaaaactggaatcatcgctggagttgttagcggaatagcggttattctactaggattcttcttctttttcttctgcaaggataaacataaaggatataaacgagacgtatttgtggatgttgcaggtgaagtggacagaaggattgcttttggacagttgagaagatttgcatggagagagcttcagttggctacagatgagttcagtgaaaagaatgttctcggacaaggaggctttgggaaagtttacaaaggattgctttcggatggcaccaaagtcgctgtaaaaagattgactgattttgaacgtccaggaggagatgaagctttccagagagaagttgagatgataagtgtagctgttcataggaatctgcttcgccttatcggcttttgtacaacacaaactgaacgacttttggtgtatcctttcatgcagaatctaagtgttgcatattgcttaagagagattaaacccggggatccagttctggattggttcaggaggaaacagattgcgttaggtgcagcacgaggactcgaatatcttcatgaacattgcaacccgaagatcatacacagagatgtgaaagctgcaaatgtgttactagatgaagactttgaagcagtggttggtgattttggtttagccaagttggtagatgttagaaggactaatgtaaccactcaggtccgaggaacaatgggtcatattgcaccagaatgtatatccacagggaaatcgtcagagaaaaccgatgttttcgggtacggaattatgcttctggagcttgtaactggacaaagagcaattgatttctcgcggttagaggaagaagatgatgtcttattgctagaccatgtgaagaaactggaaagagagaagagattagaagacatagtagataagaagcttgatgaggattatataaaggaagaagttgaaatgatgatacaagtagctctgctatgcacacaagcagcaccggaagaacgaccagcgatgtcggaagtagtaagaatgctagaaggagaagggcttgcagagagatgggaagagtggcagaatcttgaagtgacgagacaagaagagtttcagaggttgcagaggagatttgattggggtgaagattccattaataatcaagatgctattgaattatctggtggaagatagaaacaaaaaatacttttgattcaaaagatagaagaatcacacactgtaaagtagaagaagaaacaactagttttggtttcaaacatgaatgaagttttggtttcgcagtttatatgtatcggcgaatgaatcacgcgccattataatgttcacttgtgtatttatgttgtaacgttttcgatccaaatgtttgaaactttgtgacagaacataataatgtcctttgtaacttgtatcaatgaaattttc

SEQ ID NO: 84742 - protein, 276 aa, Arabidopsis thaliana; identical to SEQ ID NO: 79231
  peptide (1)..(276): Ceres Seq. ID no. 12676721
  misc_feature (1)..(276): Homolog of NCBI NO: 22326703 NR Description: protein serine/threonine kinase-like protein; id: At5g10290.1, supported by cDNA: gi_20260259 [Arabidopsis
  misc_feature (1)..(276): Homolog of NCBI NO: 20260260 NR Description: protein serine/threonine kinase-like protein
  misc_feature (1)..(276): Homolog of NCBI NO: 11358729 NR Description: protein serine/threonine kinase-like protein -
  misc_feature (1)..(276): Homolog of NCBI NO: 5596996 NR Description: putative protein serine /threonine kinase
  misc_feature (1)..(276): Homolog of NCBI NO: 18424740 NR Description: leucine-rich repeat transmembrane protein kinase, protein id: At5g63710.1, supported by cDNA: gi_16974576 thaliana] >gi|16974577|gb|AAL31184.1| AT5g63710/MBK5_19
  misc_feature (1)..(276): Homolog of NCBI NO: 10177052 NR Description: receptor-like protein kinase [Arabidopsis
  misc_feature (1)..(276): Homolog of NCBI NO: 15217584 NR Description: protein kinase, putative; protein id:
  misc_feature (1)..(276): Homolog of NCBI NO: 15081616 NR Description: At1g71830/F14O23_24 [Arabidopsis thaliana]
  misc_feature (1)..(276): Homolog of NCBI NO: 13897310 NR Description: SERK2 protein [Zea mays]
  misc_feature (1)..(238): Homolog of NCBI NO: 11862956 NR Description: putative protein kinase [Oryza sativa (japonica

SEQ ID NO: 84743 - protein, 247 aa, Arabidopsis thaliana; identical to SEQ ID NO: 79232
  peptide (1)..(247): Ceres Seq. ID no. 12676722
  misc_feature (1)..(247): Homolog of NCBI NO: 22326703 NR Description: protein serine/threonine kinase-like protein; id: At5g10290.1, supported by cDNA: gi_20260259 [Arabidopsis
  misc_feature (1)..(247): Homolog of NCBI NO: 20260260 NR Description: protein serine/threonine kinase-like protein
  misc_feature (1)..(247): Homolog of NCBI NO: 11358729 NR Description: protein serine/threonine kinase-like protein -
  misc_feature (1)..(247): Homolog of NCBI NO: 5596996 NR Description: putative protein serine /threonine kinase
  misc_feature (1)..(247): Homolog of NCBI NO: 18424740 NR Description: leucine-rich repeat transmembrane protein kinase, protein id: At5g63710.1, supported by cDNA: gi_16974576 thaliana] >gi|16974577|gb|AAL31184.1| AT5g63710/MBK5_19
  misc_feature (1)..(247): Homolog of NCBI NO: 10177052 NR Description: receptor-like protein kinase [Arabidopsis
  misc_feature (1)..(247): Homolog of NCBI NO: 15217584 NR Description: protein kinase, putative; protein id:
  misc_feature (1)..(247): Homolog of NCBI NO: 15081616 NR Description: At1g71830/F14O23_24 [Arabidopsis thaliana]
  misc_feature (1)..(247): Homolog of NCBI NO: 13897310 NR Description: SERK2 protein [Zea mays]
  misc_feature (1)..(209): Homolog of NCBI NO: 11862956 NR Description: putative protein kinase [Oryza sativa (japonica

SEQ ID NO: 84744 - protein, 191 aa, Arabidopsis thaliana
  peptide (1)..(191): Ceres Seq. ID no. 12676723
  misc_feature (1)..(190): Homolog of NCBI NO: 22326703 NR Description: protein serine/threonine kinase-like protein; id: At5g10290.1, supported by cDNA: gi_20260259 [Arabidopsis
  misc_feature (1)..(190): Homolog of NCBI NO: 20260260 NR Description: protein serine/threonine kinase-like protein
  misc_feature (4)..(190): Homolog of NCBI NO: 11358729 NR Description: protein serine/threonine kinase-like protein -
  misc_feature (114)..(191): Homolog of NCBI NO: 11358729 NR Description: protein serine/threonine kinase-like protein -
  misc_feature (114)..(191): Homolog of NCBI NO: 22326703 NR Description: protein serine/threonine kinase-like protein; id: At5g10290.1, supported by cDNA: gi_20260259 [Arabidopsis
  misc_feature (114)..(191): Homolog of NCBI NO: 20260260 NR Description: protein serine/threonine kinase-like protein
  misc_feature (58)..(149): Homolog of NCBI NO: 11358729 NR Description: protein serine/threonine kinase-like protein -
  misc_feature (58)..(149): Homolog of NCBI NO: 22326703 NR Description: protein serine/threonine kinase-like protein; id: At5g10290.1, supported by cDNA: gi_20260259 [Arabidopsis
  misc_feature (58)..(149): Homolog of NCBI NO: 20260260 NR Description: protein serine/threonine kinase-like protein
  misc_feature (1)..(189): Homolog of NCBI NO: 5596996 NR Description: putative protein serine /threonine kinase
MALLIITALVFSSLWSSVSPDAQGDALFALRSSLRASPEQLSDWNQNQVDPCTWSQVICDDKKHVTSVTLSYMNFSSGTLSSGIGILTTLKTLTLKGNGIMGGIPESIGNLSSLTSLDLEDNHLTDRIPSTLGNLKNLQFLTLSRNNLNGSIPDSLTGLSKLINILLDSNNLSGEIPQSLFKIPKYNLSNL

SEQ ID NO: 84745 - DNA, 887 bp, Arabidopsis thaliana
  misc_feature (1)..(887): Ceres Seq. ID no. 12676728
  misc_feature: MA Experiment ID: 108434 Result: Down-regulated in Transcription
  misc_feature: MA Experiment 108434 PARAMETER Experiment Name: At_Root_Tips_cDNA_P Parameter: Tissue Value: Root Tips
  misc_feature: MA Experiment ID: 108464 Result: Down-regulated in Transcription
  misc_feature: MA Experiment 108464 PARAMETER Experiment Name: At_Germinating_Seeds_cDNA_P Parameter: Age (day) Value: 4 vs. 0
  misc_feature: MA Experiment 108464 PARAMETER Experiment Name: At_Germinating_Seeds_cDNA_P Parameter: Tissue Value: Germinating Seeds
  misc_feature: MA Experiment ID: 108573 Result: Down-regulated in Transcription
  misc_feature: MA Experiment 108573 PARAMETER Experiment Name: At_Drought_cDNA_P Parameter: Timepoint (hr) Value: 6
  misc_feature: MA Experiment 108573 PARAMETER Experiment Name: At_Drought_cDNA_P Parameter: Tissue Value: Aerial
  misc_feature: MA Experiment 108573 PARAMETER Experiment Name: At_Drought_cDNA_P Parameter: Treatment Value: Drought vs. No Drought
  misc_feature: MA Experiment ID: 108577 Result: Down-regulated in Transcription
  misc_feature: MA Experiment 108577 PARAMETER Experiment Name: At_42deg_Heat_cDNA_P Parameter: Temperature (deg C) Value: 42 vs. 22
  misc_feature: MA Experiment 108577 PARAMETER Experiment Name: At_42deg_Heat_cDNA_P Parameter: Timepoint (hr) Value: 6
  misc_feature: MA Experiment 108577 PARAMETER Experiment Name: At_42deg_Heat_cDNA_P Parameter: Tissue Value: Aerial
  misc_feature: MA Experiment ID: 20000113 Result: Down-regulated in Transcription
  misc_feature: MA Experiment 20000113 PARAMETER Experiment Name: At_42deg_Heat_cDNA_P Parameter: Temperature (deg C) Value: 42 vs. 22
  misc_feature: MA Experiment 20000113 PARAMETER Experiment Name: At_42deg_Heat_cDNA_P Parameter: Timepoint (hr) Value: 8
  misc_feature: MA Experiment 20000113 PARAMETER Experiment Name: At_42deg_Heat_cDNA_P Parameter: Tissue Value: Aerial
  misc_feature: MA Experiment ID: 20000495 Result: Down-regulated in Transcription
  misc_feature: MA Experiment 20000495 PARAMETER Experiment Name: At_Guard_Cells_P Parameter: Harvest Date Value: 8/2/2002
  misc_feature: MA Experiment 20000495 PARAMETER Experiment Name: At_Guard_Cells_P Parameter: Organism Value: A. thaliana
  misc_feature: MA Experiment 20000495 PARAMETER Experiment Name: At_Guard_Cells_P Parameter: Tissue Value: Guard Cells vs. Leaves
  misc_feature: MA Experiment ID: 20001557 Result: Up-regulated in Transcription
  misc_feature: MA Experiment 20001557 PARAMETER Experiment Name: At_Drought_Soil_Dry_P Parameter: Age (day) Value: 27
  misc_feature: MA Experiment 20001557 PARAMETER Experiment Name: At_Drought_Soil_Dry_P Parameter: Organism Value: A. thaliana
  misc_feature: MA Experiment 20001557 PARAMETER Experiment Name: At_Drought_Soil_Dry_P Parameter: Plant Line Value: WS
  misc_feature: MA Experiment 20001557 PARAMETER Experiment Name: At_Drought_Soil_Dry_P Parameter: Post Timepoint (hr) Value: 3
  misc_feature: MA Experiment 20001557 PARAMETER Experiment Name: At_Drought_Soil_Dry_P Parameter: Post-Treatment Value: Re-Water vs. No Drought
  misc_feature: MA Experiment 20001557 PARAMETER Experiment Name: At_Drought_Soil_Dry_P Parameter: Timepoint (day) Value: 13
  misc_feature: MA Experiment 20001557 PARAMETER Experiment Name: At_Drought_Soil_Dry_P Parameter: Treatment Value: Drought vs. No Drought
  misc_feature: MA Experiment ID: 20001560 Result: Up-regulated in Transcription
  misc_feature: MA Experiment 20001560 PARAMETER Experiment Name: At_Drought_Soil_Dry_P Parameter: Age (day) Value: 28
  misc_feature: MA Experiment 20001560 PARAMETER Experiment Name: At_Drought_Soil_Dry_P Parameter: Organism Value: A. thaliana
  misc_feature: MA Experiment 20001560 PARAMETER Experiment Name: At_Drought_Soil_Dry_P Parameter: Plant Line Value: WS
  misc_feature: MA Experiment 20001560 PARAMETER Experiment Name: At_Drought_Soil_Dry_P Parameter: Post Timepoint (hr) Value: None
  misc_feature: MA Experiment 20001560 PARAMETER Experiment Name: At_Drought_Soil_Dry_P Parameter: Post-Treatment Value: None
  misc_feature: MA Experiment 20001560 PARAMETER Experiment Name: At_Drought_Soil_Dry_P Parameter: Timepoint (day) Value: 14
  misc_feature: MA Experiment 20001560 PARAMETER Experiment Name: At_Drought_Soil_Dry_P Parameter: Treatment Value: Drought vs. No Drought
  misc_feature: MA Experiment ID: 20001911 Result: Down-regulated in Transcription
  misc_feature: MA Experiment 20001911 PARAMETER Experiment Name: At_Drought_Reproduction_P Parameter: Age (day) Value: 40
  misc_feature: MA Experiment 20001911 PARAMETER Experiment Name: At_Drought_Reproduction_P Parameter: Organism Value: A. thaliana
  misc_feature: MA Experiment 20001911 PARAMETER Experiment Name: At_Drought_Reproduction_P Parameter: Plant Line Value: WS
  misc_feature: MA Experiment 20001911 PARAMETER Experiment Name: At_Drought_Reproduction_P Parameter: Timepoint (day) Value: 10
  misc_feature: MA Experiment 20001911 PARAMETER Experiment Name: At_Drought_Reproduction_P Parameter: Tissue Value: Flowers
  misc_feature: MA Experiment 20001911 PARAMETER Experiment Name: At_Drought_Reproduction_P Parameter: Treatment Value: Drought vs. No Drought
aaaagcttaaaacagaggatttagcaagagaggatttagcgagagagagacgttgaagaagatgactagtggaggaggatacggagatccgtcgcagaagattgattatgtgttcaaagtggtgttgatcggcgattccgcggttgggaaatcacagatactggctcgttatgctagagacgaattcagtttggattctaaggccaccatcggcgttgagtttcagactcggacgcttgttatcgatcacaagagtgttaaggctcagatctgggataccgccggccaagaacgatacagagcagtaacaagtgcatattaccgaggagcggttggggcgatgttggtgtatgacataaccagacgccaaacctttgaccatatcccaagatggttagaagaactacgtgctcatgcagataagaacattgtgataatccttattgggaacaagtcagatcttgtggatcaacgagctataccgacagaagatgcgaaagaatttgcggagaaagaaggtttgttcttcttggagacatctgcatttaacgcaaccaatgttgagagcgctttctccacggttttgactgagatcttcaacattgtgaacaagaaaagtctggctgcgagtgaagatcaagagaatggtaatcccgggtcgcttgctggtaagaagattgatattgttccaggtcctggtcaagtgataccaaacaagagtaacatgtgttgtaactcttagataaaccaattcaattcttgaatgttacttgataacaacaatatatagatgttttaaagactctgattgggatatttctcctatctagagctgtgtgattcatttgttgcttaatgagcagtttttgtggggttttggggtgttg

SEQ ID NO: 84746 - protein, 226 aa, Arabidopsis thaliana; identical to SEQ ID NO: 21570
  peptide (1)..(226): Ceres Seq. ID no. 12676729
  misc_feature (19)..(180): Pfam Name: Ras family Pfam Description: Ras family
  misc_feature (1)..(226): Homolog of NCBI NO: 15238392 NR Description: GTP-binding protein, putative; protein id: supported by cDNA: 30437., supported by cDNA: gi_15028288,
  misc_feature (1)..(226): Homolog of NCBI NO: 3024500 NR Description: RAS-RELATED PROTEIN RAB11A
  misc_feature (6)..(226): Homolog of NCBI NO: 3024505 NR Description: RAS-RELATED PROTEIN RAB11D
  misc_feature (1)..(226): Homolog of NCBI NO: 7438430 NR Description: GTP-binding protein - garden pea
  misc_feature (6)..(226): Homolog of NCBI NO: 3024503 NR Description: RAS-RELATED PROTEIN RAB11C

SEQ ID NO: 84747 - protein, 133 aa, Arabidopsis thaliana; identical to SEQ ID NO: 21571
  peptide (1)..(133): Ceres Seq. ID no. 12676730
  misc_feature (1)..(87): Pfam Name: Ras family Pfam Description: Ras family
  misc_feature (1)..(133): Homolog of NCBI NO: 15238392 NR Description: GTP-binding protein, putative; protein id: supported by cDNA: 30437., supported by cDNA: gi_15028288,
  misc_feature (1)..(133): Homolog of NCBI NO: 3024500 NR Description: RAS-RELATED PROTEIN RAB11A
  misc_feature (1)..(133): Homolog of NCBI NO: 3024505 NR Description: RAS-RELATED PROTEIN RAB11D
  misc_feature (1)..(133): Homolog of NCBI NO: 7438430 NR Description: GTP-binding protein - garden pea
  misc_feature (1)..(133): Homolog of NCBI NO: 3024503 NR Description: RAS-RELATED PROTEIN RAB11C

SEQ ID NO: 84748 - DNA, 1120 bp, Arabidopsis thaliana
  misc_feature (1)..(1120): Ceres Seq. ID no. 12676731
  misc_feature: MA Experiment ID: 108561 Result: Up-regulated in Transcription
  misc_feature: MA Experiment 108561 PARAMETER Experiment Name: At_100uM_ABA_cDNA_P Parameter: Timepoint (hr) Value: 6
  misc_feature: MA Experiment 108561 PARAMETER Experiment Name: At_100uM_ABA_cDNA_P Parameter: Tissue Value: Aerial
  misc_feature: MA Experiment 108561 PARAMETER Experiment Name: At_100uM_ABA_cDNA_P Parameter: Treatment Value: 100uM ABA vs. No Treatment
  misc_feature: MA Experiment ID: 108573 Result: Up-regulated in Transcription
  misc_feature: MA Experiment 108573 PARAMETER Experiment Name: At_Drought_cDNA_P Parameter: Timepoint (hr) Value: 6
  misc_feature: MA Experiment 108573 PARAMETER Experiment Name: At_Drought_cDNA_P Parameter: Tissue Value: Aerial
  misc_feature: MA Experiment 108573 PARAMETER Experiment Name: At_Drought_cDNA_P Parameter: Treatment Value: Drought vs. No Drought
  misc_feature: MA Experiment ID: 108574 Result: Up-regulated in Transcription
  misc_feature: MA Experiment 108574 PARAMETER Experiment Name: At_Wounding__cDNA_P Parameter: Timepoint (hr) Value: 1
  misc_feature: MA Experiment 108574 PARAMETER Experiment Name: At_Wounding__cDNA_P Parameter: Tissue Value: Aerial
  misc_feature: MA Experiment 108574 PARAMETER Experiment Name: At_Wounding__cDNA_P Parameter: Treatment Value: Wounding vs. No Wounding
  misc_feature: MA Experiment ID: 108579 Result: Up-regulated in Transcription
  misc_feature: MA Experiment 108579 PARAMETER Experiment Name: At_4deg_Cold_cDNA_P Parameter: Temperature (deg C) Value: 4 vs. 22
  misc_feature: MA Experiment 108579 PARAMETER Experiment Name: At_4deg_Cold_cDNA_P Parameter: Timepoint (hr) Value: 6
  misc_feature: MA Experiment 108579 PARAMETER Experiment Name: At_4deg_Cold_cDNA_P Parameter: Tissue Value: Aerial
  misc_feature: MA Experiment ID: 108585 Result: Up-regulated in Transcription
  misc_feature: MA Experiment 108585 PARAMETER Experiment Name: At_5mM_NaNP_cDNA_P Parameter: Timepoint (hr) Value: 6
  misc_feature: MA Experiment 108585 PARAMETER Experiment Name: At_5mM_NaNP_cDNA_P Parameter: Tissue Value: Aerial
  misc_feature: MA Experiment 108585 PARAMETER Experiment Name: At_5mM_NaNP_cDNA_P Parameter: Treatment Value: null
  misc_feature: MA Experiment ID: 20000171 Result: Up-regulated in Transcription
  misc_feature: MA Experiment 20000171 PARAMETER Experiment Name: At_42deg_Heat_P Parameter: Age (day) Value: 14
  misc_feature: MA Experiment 20000171 PARAMETER Experiment Name: At_42deg_Heat_P Parameter: Organism Value: A. thaliana
  misc_feature: MA Experiment 20000171 PARAMETER Experiment Name: At_42deg_Heat_P Parameter: Plant Line Value: WS
  misc_feature: MA Experiment 20000171 PARAMETER Experiment Name: At_42deg_Heat_P Parameter: Temperature (deg C) Value: 42 vs. 22
  misc_feature: MA Experiment 20000171 PARAMETER Experiment Name: At_42deg_Heat_P Parameter: Timepoint (hr) Value: 1
  misc_feature: MA Experiment 20000171 PARAMETER Experiment Name: At_42deg_Heat_P Parameter: Tissue Value: Aerial
  misc_feature: MA Experiment ID: 20000173 Result: Up-regulated in Transcription
  misc_feature: MA Experiment 20000173 PARAMETER Experiment Name: At_42deg_Heat_P Parameter: Age (day) Value: 14
  misc_feature: MA Experiment 20000173 PARAMETER Experiment Name: At_42deg_Heat_P Parameter: Organism Value: A. thaliana
  misc_feature: MA Experiment 20000173 PARAMETER Experiment Name: At_42deg_Heat_P Parameter: Plant Line Value: WS
  misc_feature: MA Experiment 20000173 PARAMETER Experiment Name: At_42deg_Heat_P Parameter: Temperature (deg C) Value: 42 vs. 22
  misc_feature: MA Experiment 20000173 PARAMETER Experiment Name: At_42deg_Heat_P Parameter: Timepoint (hr) Value: 6
  misc_feature: MA Experiment 20000173 PARAMETER Experiment Name: At_42deg_Heat_P Parameter: Tissue Value: Aerial
  misc_feature: MA Experiment ID: 20000179 Result: Down-regulated in Transcription
  misc_feature: MA Experiment 20000179 PARAMETER Experiment Name: At_Germinating_Seeds_P Parameter: Age (hr) Value: 6 vs. 0
  misc_feature: MA Experiment 20000179 PARAMETER Experiment Name: At_Germinating_Seeds_P Parameter: Tissue Value: Germinating Seeds
  misc_feature: MA Experiment ID: 20000436 Result: Up-regulated in Transcription
  misc_feature: MA Experiment 20000436 PARAMETER Experiment Name: At_Drought_P Parameter: Age (day) Value: 7
  misc_feature: MA Experiment 20000436 PARAMETER Experiment Name: At_Drought_P Parameter: Organism Value: A. thaliana
  misc_feature: MA Experiment 20000436 PARAMETER Experiment Name: At_Drought_P Parameter: Plant Line Value: WS
  misc_feature: MA Experiment 20000436 PARAMETER Experiment Name: At_Drought_P Parameter: Timepoint (hr) Value: 12
  misc_feature: MA Experiment 20000436 PARAMETER Experiment Name: At_Drought_P Parameter: Tissue Value: Whole Plant
  misc_feature: MA Experiment 20000436 PARAMETER Experiment Name: At_Drought_P Parameter: Treatment Value: Drought vs. No Drought
  misc_feature: MA Experiment ID: 20000437 Result: Up-regulated in Transcription
  misc_feature: MA Experiment 20000437 PARAMETER Experiment Name: At_Drought_P Parameter: Age (day) Value: 8
  misc_feature: MA Experiment 20000437 PARAMETER Experiment Name: At_Drought_P Parameter: Organism Value: A. thaliana
  misc_feature: MA Experiment 20000437 PARAMETER Experiment Name: At_Drought_P Parameter: Plant Line Value: WS
  misc_feature: MA Experiment 20000437 PARAMETER Experiment Name: At_Drought_P Parameter: Timepoint (hr) Value: 24
  misc_feature: MA Experiment 20000437 PARAMETER Experiment Name: At_Drought_P Parameter: Tissue Value: Whole Plant
  misc_feature: MA Experiment 20000437 PARAMETER Experiment Name: At_Drought_P Parameter: Treatment Value: Drought vs. No Drought
  misc_feature: MA Experiment ID: 20000451 Result: Up-regulated in Transcription
  misc_feature: MA Experiment 20000451 PARAMETER Experiment Name: At_CS6879_Shoots-Roots_P Parameter: Age (day) Value: 14
  misc_feature: MA Experiment 20000451 PARAMETER Experiment Name: At_CS6879_Shoots-Roots_P Parameter: Organism Value: A. thaliana
  misc_feature: MA Experiment 20000451 PARAMETER Experiment Name: At_CS6879_Shoots-Roots_P Parameter: Plant Line Value: CS6879 vs. WS
  misc_feature: MA Experiment 20000451 PARAMETER Experiment Name: At_CS6879_Shoots-Roots_P Parameter: Tissue Value: Roots
  misc_feature: MA Experiment ID: 20000456 Result: Up-regulated in Transcription
  misc_feature: MA Experiment 20000456 PARAMETER Experiment Name: At_100uM_BA_P Parameter: Age (day) Value: 14
  misc_feature: MA Experiment 20000456 PARAMETER Experiment Name: At_100uM_BA_P Parameter: Organism Value: A. thaliana
  misc_feature: MA Experiment 20000456 PARAMETER Experiment Name: At_100uM_BA_P Parameter: Plant Line Value: WS
  misc_feature: MA Experiment 20000456 PARAMETER Experiment Name: At_100uM_BA_P Parameter: Timepoint (hr) Value: 6
  misc_feature: MA Experiment 20000456 PARAMETER Experiment Name: At_100uM_BA_P Parameter: Tissue Value: Aerial
  misc_feature: MA Experiment 20000456 PARAMETER Experiment Name: At_100uM_BA_P Parameter: Treatment Value: 100uM BA vs. No Treatment
aaactatctcgtctcttcgaacacttcaaaaaacatagcaacttcacttcttcctcctccttcctagtttctcgtttggtctcattctctttaattacctcctcctctgttctgctcatcccctgtttttatagttttatataaaatggtgagccaaaacgtcgtcgtatcagacgccaagaccgggatcataacggtctctacagtctctaactcctctgtctttactcctaccgctcaaaaaccaccgactgctcctggttacatctcagtttccaagaaaaaactcctcaaaaaccttgaaatcaatggagctgatcaaagtcaaagacttaactcttgggttgactccatgagagcttcttctcctacccatctcaaatcactttcctctttctcttccgaagaagaacacaattcttggatcaaacgacatccatcagcacttaacatgttcgaacgaatcatcgaagaagcaagaggaaaacaaatcgtcatgtttcttgattatgacggtactctttctccgatcgtggatgatccagacagagctttcatgactagcaagatgagaagaacagtgaaaaaaatggctaagtgttttccaacttccatagttactggtagatgcatcgacaaggtttatagctttgtgaagctagcagaactgtattatgctggaagccatgggatggatattaaaggcccaactaaaggtttctcaagatacaataaggataaaccatccgttctttaccaaccagccggcgactttcttcccatgatcgatgaggtttataaacaattagtggagaaaaccaaatctacaccaggagccaaagtggagaacaacaagttctgtctttctgtgcacttccgttgtgttgacgagaagaaatggagcgagctggcttcaaaagttcggtcggtggtaaagaactatccgacgttgaaactgtctcaaggtcgaaaggtttttgaaatccgacctataattaaatggaacaaaggcaaggctcttgagtttttgttagagtcactcggtgagactctctttggtcgtttgttgaattttatttttgcttatttaaactctttcatcaacaataatattagctcg

SEQ ID NO: 84749 - protein, 325 aa, Arabidopsis thaliana; identical to SEQ ID NO: 21321
  peptide (1)..(325): Ceres Seq. ID no. 12676732
  misc_feature (119)..(300): Pfam Name: Trehalose-phosphatase Pfam Description: Trehalose-phosphatase
  misc_feature (1)..(300): Homolog of NCBI NO: 15238360 NR Description: trehalose-6-phosphate phosphatase; protein id:
  misc_feature (3)..(315): Homolog of NCBI NO: 11282598 NR Description: trehalose-6-phosphate phosphatase-like protein -
  misc_feature (3)..(315): Homolog of NCBI NO: 30683008 NR Description: trehalose-6-phosphate phosphatase, putative
  misc_feature (41)..(300): Homolog of NCBI NO: 30692524 NR Description: trehalose-6-phosphate phosphatase, putative thaliana] >gi|26452744|dbj|BAC43453.1| putative protein thaliana] >gi|28973301|gb|AAO63975.1| unknown protein
  misc_feature (1)..(300): Homolog of NCBI NO: 18399940 NR Description: trehalose-phosphatase, putative; protein id:
  misc_feature (1)..(300): Homolog of NCBI NO: 21554408 NR Description: trehalose-phosphatase, putative [Arabidopsis
  misc_feature (1)..(300): Homolog of NCBI NO: 25354597 NR Description: probable trehalose-phosphatase [imported] -
  misc_feature (1)..(300): Homolog of NCBI NO: 15218205 NR Description: trehalose-6-phosphate phosphatase (AtTPPB); id: At1g78090.1, supported by cDNA: gi_2944179 [Arabidopsis
  misc_feature (1)..(300): Homolog of NCBI NO: 25354595 NR Description: trehalose-phosphatase (EC 3.1.3.12) B [imported] -
  misc_feature (103)..(300): Homolog of NCBI NO: 15227161 NR Description: putative trehalose-6-phosphate phosphatase;

SEQ ID NO: 84750 - protein, 256 aa, Arabidopsis thaliana; identical to SEQ ID NO: 21322
  peptide (1)..(256): Ceres Seq. ID no. 12676733
  misc_feature (50)..(231): Pfam Name: Trehalose-phosphatase Pfam Description: Trehalose-phosphatase
  misc_feature (1)..(231): Homolog of NCBI NO: 15238360 NR Description: trehalose-6-phosphate phosphatase; protein id:
  misc_feature (1)..(246): Homolog of NCBI NO: 11282598 NR Description: trehalose-6-phosphate phosphatase-like protein -
  misc_feature (1)..(246): Homolog of NCBI NO: 30683008 NR Description: trehalose-6-phosphate phosphatase, putative
  misc_feature (1)..(231): Homolog of NCBI NO: 30692524 NR Description: trehalose-6-phosphate phosphatase, putative thaliana] >gi|26452744|dbj|BAC43453.1| putative protein thaliana] >gi|28973301|gb|AAO63975.1| unknown protein
  misc_feature (1)..(231): Homolog of NCBI NO: 18399940 NR Description: trehalose-phosphatase, putative; protein id:
  misc_feature (1)..(231): Homolog of NCBI NO: 21554408 NR Description: trehalose-phosphatase, putative [Arabidopsis
  misc_feature (1)..(231): Homolog of NCBI NO: 25354597 NR Description: probable trehalose-phosphatase [imported] -
  misc_feature (1)..(231): Homolog of NCBI NO: 15218205 NR Description: trehalose-6-phosphate phosphatase (AtTPPB); id: At1g78090.1, supported by cDNA: gi_2944179 [Arabidopsis
  misc_feature (1)..(231): Homolog of NCBI NO: 25354595 NR Description: trehalose-phosphatase (EC 3.1.3.12) B [imported] -
  misc_feature (34)..(231): Homolog of NCBI NO: 15227161 NR Description: putative trehalose-6-phosphate phosphatase;

SEQ ID NO: 84751 - protein, 223 aa, Arabidopsis thaliana; identical to SEQ ID NO: 21323
  peptide (1)..(223): Ceres Seq. ID no. 12676734
  misc_feature (17)..(198): Pfam Name: Trehalose-phosphatase Pfam Description: Trehalose-phosphatase
  misc_feature (1)..(198): Homolog of NCBI NO: 15238360 NR Description: trehalose-6-phosphate phosphatase; protein id:
  misc_feature (1)..(213): Homolog of NCBI NO: 11282598 NR Description: trehalose-6-phosphate phosphatase-like protein -
  misc_feature (1)..(213): Homolog of NCBI NO: 30683008 NR Description: trehalose-6-phosphate phosphatase, putative
  misc_feature (1)..(198): Homolog of NCBI NO: 30692524 NR Description: trehalose-6-phosphate phosphatase, putative thaliana] >gi|26452744|dbj|BAC43453.1| putative protein thaliana] >gi|28973301|gb|AAO63975.1| unknown protein
  misc_feature (1)..(198): Homolog of NCBI NO: 18399940 NR Description: trehalose-phosphatase, putative; protein id:
  misc_feature (1)..(198): Homolog of NCBI NO: 21554408 NR Description: trehalose-phosphatase, putative [Arabidopsis
  misc_feature (1)..(198): Homolog of NCBI NO: 25354597 NR Description: probable trehalose-phosphatase [imported] -
  misc_feature (1)..(198): Homolog of NCBI NO: 15218205 NR Description: trehalose-6-phosphate phosphatase (AtTPPB); id: At1g78090.1, supported by cDNA: gi_2944179 [Arabidopsis
  misc_feature (1)..(198): Homolog of NCBI NO: 25354595 NR Description: trehalose-phosphatase (EC 3.1.3.12) B [imported] -
  misc_feature (1)..(198): Homolog of NCBI NO: 15227161 NR Description: putative trehalose-6-phosphate phosphatase;

SEQ ID NO: 84752 - DNA, 1028 bp, Arabidopsis thaliana
  misc_feature (1)..(1028): Ceres Seq. ID no. 12676735
  misc_feature: MA Experiment ID: 20000437 Result: Up-regulated in Transcription
  misc_feature: MA Experiment 20000437 PARAMETER Experiment Name: At_Drought_P Parameter: Age (day) Value: 8
  misc_feature: MA Experiment 20000437 PARAMETER Experiment Name: At_Drought_P Parameter: Organism Value: A. thaliana
  misc_feature: MA Experiment 20000437 PARAMETER Experiment Name: At_Drought_P Parameter: Plant Line Value: WS
  misc_feature: MA Experiment 20000437 PARAMETER Experiment Name: At_Drought_P Parameter: Timepoint (hr) Value: 24
  misc_feature: MA Experiment 20000437 PARAMETER Experiment Name: At_Drought_P Parameter: Tissue Value: Whole Plant
  misc_feature: MA Experiment 20000437 PARAMETER Experiment Name: At_Drought_P Parameter: Treatment Value: Drought vs. No Drought
  misc_feature: MA Experiment ID: 20001459 Result: Down-regulated in Transcription
  misc_feature: MA Experiment 20001459 PARAMETER Experiment Name: At_50mM_NH4NO3_L-to-H_P Parameter: Age (day) Value: Undefined
  misc_feature: MA Experiment 20001459 PARAMETER Experiment Name: At_50mM_NH4NO3_L-to-H_P Parameter: Organism Value: Undefined
  misc_feature: MA Experiment 20001459 PARAMETER Experiment Name: At_50mM_NH4NO3_L-to-H_P Parameter: Plant Line Value: Undefined
  misc_feature: MA Experiment 20001459 PARAMETER Experiment Name: At_50mM_NH4NO3_L-to-H_P Parameter: Timepoint (hr) Value: 4
  misc_feature: MA Experiment 20001459 PARAMETER Experiment Name: At_50mM_NH4NO3_L-to-H_P Parameter: Tissue Value: Siliques
  misc_feature: MA Experiment 20001459 PARAMETER Experiment Name: At_50mM_NH4NO3_L-to-H_P Parameter: Treatment Value: 50mM NH4NO3 vs. 100mM Manitol
agagaatgtcgtctgtcttgcggttgttggggcggagaatctgtaatccagcggcggagaaagtgcgtttgagcagtagcctaagcggtggtggagattttccaatcttaaatggacataaagcggctcaagacttatccaaagatactctaaaatcccaagacataacgaaagagaaagaaggccaacacaaagaagttaagaaggagttcaagatttatagatggaatcctgacaagcctaactctaaaccatttcttcaatctttcttcgttgatctttcctcttgtggtcccatggttttggacgtgctgcagaagataaaagcagaggatgatgccagtttgagttacagaagatcatgtagagaagggatatgtggatcttgttcaatgaacattgacggtactaacactgtcgcatgtcttaaacccataaacccaaacacgtcaaagcccaccataattactccattgcctcacatgtacgtcatcaaagacctagtcgtcgacctcactaatttttaccaacaatacaaatcaatggagccatggttaaagacgaggaagcctccaaaagacggacgcgaacaccggcaatcaccaaaagacaggaagaaactagacgggctatacgaatgcatattgtgcgcgtgttgtaccacatcatgtccttcttattggtggaaccccgaggagtttccaggacctgcggctttactacaagcgtaccgttggatcagcgatagccgcgatgaatacagagaagagaggctacaggcaataactgagagtgaaaccaaagtatatagatgcagagcaatcaagaactgtacggccacttgtcctaaaggacttaacccagctagtgccattttgaaaatgaagtctaagcatttgctctccgatccgttagtgagaacagagagtgtctagcttcaacatgacttggaccggtcatatatattatgtaaaagctctctctctctctctggatactcattgcaataagaatcaatgtttaaaact

SEQ ID NO: 84753 - protein, 310 aa, Arabidopsis thaliana
  peptide (1)..(310): Ceres Seq. ID no. 12676736
  misc_feature (81)..(145): Pfam Name: 2Fe-2S iron-sulfur cluster binding domain Pfam Description: 2Fe-2S iron-sulfur cluster binding domain
  misc_feature (2)..(310): Homolog of NCBI NO: 30698100 NR Description: succinate dehydrogenase, iron-sulphur subunit,
  misc_feature (68)..(295): Homolog of NCBI NO: 40644750 NR Description: succinate dehydrogenase [Uromyces viciae-fabae]
  misc_feature (62)..(295): Homolog of NCBI NO: 2706555 NR Description: succinate dehydrogenase iron-sulfur subunit
  misc_feature (68)..(299): Homolog of NCBI NO: 4803711 NR Description: iron sulfur subunit of succinate dehydrogenase
  misc_feature (68)..(299): Homolog of NCBI NO: 5688947 NR Description: succinate dehydrogenase iron-protein subunit
  misc_feature (68)..(299): Homolog of NCBI NO: 28611029 NR Description: succinate dehydrogenase [Triticum aestivum]
  misc_feature (68)..(295): Homolog of NCBI NO: 15237464 NR Description: succinate dehydrogenase iron-protein subunit protein id: At5g40650.1, supported by cDNA: 36094., supported by
  misc_feature (68)..(295): Homolog of NCBI NO: 21593098 NR Description: succinate dehydrogenase iron-protein subunit-like
  misc_feature (68)..(295): Homolog of NCBI NO: 12049600 NR Description: mitochondrial succinate dehydrogenase
  misc_feature (63)..(295): Homolog of NCBI NO: 6322987 NR Description: Yeast succinate dehydrogenase (SDH) is a tetramer
RMSSVLRLLGRRICNPAAEKVRLSSSLSGGGDFPILNGHKAAQDLSKDTLKSQDITKEKEGQHKEVKKEFKIYRWNPDKPNSKPFLQSFFVDLSSCGPMVLDVLQKIKAEDDASLSYRRSCREGICGSCSMNIDGTNTVACLKPINPNTSKPTIITPLPHMYVIKDLVVDLTNFYQQYKSMEPWLKTRKPPKDGREHRQSPKDRKKLDGLYECILCACCTTSCPSYWWNPEEFPGPAALLQAYRWISDSRDEYREERLQAITESETKVYRCRAIKNCTATCPKGLNPASAILKMKSKHLLSDPLVRTESV

SEQ ID NO: 84754 - protein, 309 aa, Arabidopsis thaliana
  peptide (1)..(309): Ceres Seq. ID no. 12676737
  misc_feature (80)..(144): Pfam Name: 2Fe-2S iron-sulfur cluster binding domain Pfam Description: 2Fe-2S iron-sulfur cluster binding domain
  misc_feature (1)..(309): Homolog of NCBI NO: 30698100 NR Description: succinate dehydrogenase, iron-sulphur subunit,
  misc_feature (67)..(294): Homolog of NCBI NO: 40644750 NR Description: succinate dehydrogenase [Uromyces viciae-fabae]
  misc_feature (61)..(294): Homolog of NCBI NO: 2706555 NR Description: succinate dehydrogenase iron-sulfur subunit
  misc_feature (67)..(298): Homolog of NCBI NO: 4803711 NR Description: iron sulfur subunit of succinate dehydrogenase
  misc_feature (67)..(298): Homolog of NCBI NO: 5688947 NR Description: succinate dehydrogenase iron-protein subunit
  misc_feature (67)..(298): Homolog of NCBI NO: 28611029 NR Description: succinate dehydrogenase [Triticum aestivum]
  misc_feature (67)..(294): Homolog of NCBI NO: 15237464 NR Description: succinate dehydrogenase iron-protein subunit protein id: At5g40650.1, supported by cDNA: 36094., supported by
  misc_feature (67)..(294): Homolog of NCBI NO: 21593098 NR Description: succinate dehydrogenase iron-protein subunit-like
  misc_feature (67)..(294): Homolog of NCBI NO: 12049600 NR Description: mitochondrial succinate dehydrogenase
  misc_feature (62)..(294): Homolog of NCBI NO: 6322987 NR Description: Yeast succinate dehydrogenase (SDH) is a tetramer
MSSVLRLLGRRICNPAAEKVRLSSSLSGGGDFPILNGHKAAQDLSKDTLKSQDITKEKEGQHKEVKKEFKIYRWNPDKPNSKPFLQSFFVDLSSCGPMVLDVLQKIKAEDDASLSYRRSCREGICGSCSMNIDGTNTVACLKPINPNTSKPTIITPLPHMYVIKDLVVDLTNFYQQYKSMEPWLKTRKPPKDGREHRQSPKDRKKLDGLYECILCACCTTSCPSYWWNPEEFPGPAALLQAYRWISDSRDEYREERLQAITESETKVYRCRAIKNCTATCPKGLNPASAILKMKSKHLLSDPLVRTESV

SEQ ID NO: 84755 - protein, 212 aa, Arabidopsis thaliana
  peptide (1)..(212): Ceres Seq. ID no. 12676738
  misc_feature (1)..(212): Homolog of NCBI NO: 30698100 NR Description: succinate dehydrogenase, iron-sulphur subunit,
  misc_feature (1)..(197): Homolog of NCBI NO: 40644750 NR Description: succinate dehydrogenase [Uromyces viciae-fabae]
  misc_feature (1)..(197): Homolog of NCBI NO: 2706555 NR Description: succinate dehydrogenase iron-sulfur subunit
  misc_feature (1)..(201): Homolog of NCBI NO: 4803711 NR Description: iron sulfur subunit of succinate dehydrogenase
  misc_feature (1)..(201): Homolog of NCBI NO: 5688947 NR Description: succinate dehydrogenase iron-protein subunit
  misc_feature (1)..(201): Homolog of NCBI NO: 28611029 NR Description: succinate dehydrogenase [Triticum aestivum]
  misc_feature (1)..(197): Homolog of NCBI NO: 15237464 NR Description: succinate dehydrogenase iron-protein subunit protein id: At5g40650.1, supported by cDNA: 36094., supported by
  misc_feature (1)..(197): Homolog of NCBI NO: 21593098 NR Description: succinate dehydrogenase iron-protein subunit-like
  misc_feature (1)..(197): Homolog of NCBI NO: 12049600 NR Description: mitochondrial succinate dehydrogenase
  misc_feature (1)..(197): Homolog of NCBI NO: 6322987 NR Description: Yeast succinate dehydrogenase (SDH) is a tetramer
MVLDVLQKIKAEDDASLSYRRSCREGICGSCSMNIDGTNTVACLKPINPNTSKPTIITPLPHMYVIKDLVVDLTNFYQQYKSMEPWLKTRKPPKDGREHRQSPKDRKKLDGLYECILCACCTTSCPSYWWNPEEFPGPAALLQAYRWISDSRDEYREERLQAITESETKVYRCRAIKNCTATCPKGLNPASAILKMKSKHLLSDPLVRTESV

SEQ ID NO: 84756 - DNA, 1379 bp, Arabidopsis thaliana
  misc_feature (1)..(1379): Ceres Seq. ID no. 12676753
  misc_feature: MA Experiment ID: 20000234 Result: Up-regulated in Transcription
  misc_feature: MA Experiment 20000234 PARAMETER Experiment Name: At_Siliques_P Parameter: Age (day) Value: 21
  misc_feature: MA Experiment 20000234 PARAMETER Experiment Name: At_Siliques_P Parameter: Organism Value: A. thaliana
  misc_feature: MA Experiment 20000234 PARAMETER Experiment Name: At_Siliques_P Parameter: Plant Line Value: WS
  misc_feature: MA Experiment 20000234 PARAMETER Experiment Name: At_Siliques_P Parameter: Tissue Value: Less Than 5mm Siliques vs. Whole Plant
  misc_feature: MA Experiment ID: 20000235 Result: Up-regulated in Transcription
  misc_feature: MA Experiment 20000235 PARAMETER Experiment Name: At_Siliques_P Parameter: Age (day) Value: 21
  misc_feature: MA Experiment 20000235 PARAMETER Experiment Name: At_Siliques_P Parameter: Organism Value: A. thaliana
  misc_feature: MA Experiment 20000235 PARAMETER Experiment Name: At_Siliques_P Parameter: Plant Line Value: WS
  misc_feature: MA Experiment 20000235 PARAMETER Experiment Name: At_Siliques_P Parameter: Tissue Value: 5-10mm Siliques vs. Whole Plant
  misc_feature: MA Experiment ID: 20000437 Result: Down-regulated in Transcription
  misc_feature: MA Experiment 20000437 PARAMETER Experiment Name: At_Drought_P Parameter: Age (day) Value: 8
  misc_feature: MA Experiment 20000437 PARAMETER Experiment Name: At_Drought_P Parameter: Organism Value: A. thaliana
  misc_feature: MA Experiment 20000437 PARAMETER Experiment Name: At_Drought_P Parameter: Plant Line Value: WS
  misc_feature: MA Experiment 20000437 PARAMETER Experiment Name: At_Drought_P Parameter: Timepoint (hr) Value: 24
  misc_feature: MA Experiment 20000437 PARAMETER Experiment Name: At_Drought_P Parameter: Tissue Value: Whole Plant
  misc_feature: MA Experiment 20000437 PARAMETER Experiment Name: At_Drought_P Parameter: Treatment Value: Drought vs. No Drought
  misc_feature: MA Experiment ID: 20000794 Result: Up-regulated in Transcription
  misc_feature: MA Experiment 20000794 PARAMETER Experiment Name: At_Petals_P Parameter: Age (day) Value: 23-25 days
  misc_feature: MA Experiment 20000794 PARAMETER Experiment Name: At_Petals_P Parameter: Plant Line Value: WS
  misc_feature: MA Experiment 20000794 PARAMETER Experiment Name: At_Petals_P Parameter: Tissue Value: Petals vs. Whole plant
  misc_feature: MA Experiment ID: 20001905 Result: Down-regulated in Transcription
  misc_feature: MA Experiment 20001905 PARAMETER Experiment Name: At_Drought_Reproduction_P Parameter: Age (day) Value: 40
  misc_feature: MA Experiment 20001905 PARAMETER Experiment Name: At_Drought_Reproduction_P Parameter: Organism Value: A. thaliana
  misc_feature: MA Experiment 20001905 PARAMETER Experiment Name: At_Drought_Reproduction_P Parameter: Plant Line Value: WS
  misc_feature: MA Experiment 20001905 PARAMETER Experiment Name: At_Drought_Reproduction_P Parameter: Timepoint (day) Value: 10
  misc_feature: MA Experiment 20001905 PARAMETER Experiment Name: At_Drought_Reproduction_P Parameter: Tissue Value: Rosettes
  misc_feature: MA Experiment 20001905 PARAMETER Experiment Name: At_Drought_Reproduction_P Parameter: Treatment Value: Drought vs. No Drought
aaaaacggcaaaaaaaaaaaaaggggagcagcaacctttttccaattttgcgtgaagcagcagtgaagaaaaaaaggaaaaaaagtgagtgagagaagaagattagaaacgacgatatatacggagaatctcaggatttcgatcctgtttttgttttttctacttttggtactctccatggcgacggagcgtcatcattttgagcttgctaaaggcatcaatggccttgataagatcgttctccgcgagtctcgcggccgctctgcagaggtatacttgtatggaagtcatgtaacttcttggaagaatgagaacggagaggagttacttcacctcagtagcaaggccatattcaagcccccgaaaccaatacgtggagggattcccctatgttttccacaattcagtaactttggtacactcgaatcacatggctttgctagaaataggatctgggaagtcgaggctaacccacctccgttgccattaaattcttgttctagtgcttttgttgacctgatcctaaggccaactgaagacgatctgaaaatctggcctaacaattttgagttcaggctgaggatagccttggggaccgaaggagaattaactctgacatctcgtatcaggaacaccaactctgatggaaagccgtttacattcacatttgcttatcacacctatttctctgtctcagacatcagtgaagtacgggttgaaggattggaaacgttggattatcttgacaacttgaaggacagagaacgttttaccgaacaaggcgatgcgataacttttgaatccgaagttgacaagatttatctaagcacgccaacaaagattgctattttggatcacgagaaaaagaggactttcgttattcgcaaggacgggcttgctgatgctgtggtgtggaatccttgggataagaaatcaaagacgatctctgacttgggagatgaagactataagcatatgctttgtgtggaagctgcggctatcgagagaccgatcacattgaaacccggtgaagaatggaaaggaagactcgaactctctgcagttccttctagttactccagtggacagcttgaccccaagaaagtccttgagtgactctttcaaactccaaaaacagcatctttctcccctctttaattgcagtactataaagaaacgagtgaaggagagcttaaagatcatcggatatactatttaaagaaactgagatattgaataaaaattgttgcttcttagttctcttttgtaaccacagacaataacgatttgcgaactgcgaaccaagcatgcctggtctagcatttgtctggtcagagtccaaaaggaattacaacttataaaatttgtaggttaaactt

SEQ ID NO: 84757 - protein, 312 aa, Arabidopsis thaliana; identical to SEQ ID NO: 43102
  peptide (1)..(312): Ceres Seq. ID no. 12676754
  misc_feature (18)..(294): Pfam Name: Aldose 1-epimerase Pfam Description: Aldose 1-epimerase
  misc_feature (1)..(312): Homolog of NCBI NO: 15242099 NR Description: apospory-associated protein C; protein id:
  misc_feature (12)..(312): Homolog of NCBI NO: 19387263 NR Description: putative apospory-associated protein C [Oryza
  misc_feature (8)..(312): Homolog of NCBI NO: 40253263 NR Description: putative Aldose 1-epimerase [Oryza sativa
  misc_feature (9)..(312): Homolog of NCBI NO: 38344152 NR Description: OSJNBa0041A02.19 [Oryza sativa (japonica
  misc_feature (9)..(311): Homolog of NCBI NO: 2501555 NR Description: POSSIBLE APOSPORY-ASSOCIATED PROTEIN C
  misc_feature (9)..(306): Homolog of NCBI NO: 15233165 NR Description: putative protein; protein id: At3g61610.1
  misc_feature (1)..(299): Homolog of NCBI NO: 21593295 NR Description: possible apospory-associated like protein
  misc_feature (1)..(299): Homolog of NCBI NO: 18416643 NR Description: possible apospory-associated like protein; id: At4g25900.1, supported by cDNA: 37817., supported by cDNA:
  misc_feature (15)..(311): Homolog of NCBI NO: 18395868 NR Description: expressed protein; protein id: At3g01590.1, by cDNA: 41354., supported by cDNA: gi_16612257, supported by gi_20258972 [Arabidopsis thaliana]
  misc_feature (4)..(299): Homolog of NCBI NO: 15236591 NR Description: putative protein; protein id: At4g23730.1, by cDNA: 21949. [Arabidopsis thaliana] >gi|7486738|pir||T05605

SEQ ID NO: 84758 - DNA, 1238 bp, Arabidopsis thaliana
  misc_feature (1)..(1238): Ceres Seq. ID no. 12676801
  misc_feature: MA Experiment ID: 108434 Result: Up-regulated in Transcription
  misc_feature: MA Experiment 108434 PARAMETER Experiment Name: At_Root_Tips_cDNA_P Parameter: Tissue Value: Root Tips
  misc_feature: MA Experiment ID: 108461 Result: Down-regulated in Transcription
  misc_feature: MA Experiment 108461 PARAMETER Experiment Name: At_Germinating_Seeds_cDNA_P Parameter: Age (day) Value: 1 vs. 0
  misc_feature: MA Experiment 108461 PARAMETER Experiment Name: At_Germinating_Seeds_cDNA_P Parameter: Tissue Value: Germinating Seeds
  misc_feature: MA Experiment ID: 108462 Result: Down-regulated in Transcription
  misc_feature: MA Experiment 108462 PARAMETER Experiment Name: At_Germinating_Seeds_cDNA_P Parameter: Age (day) Value: 2 vs. 0
  misc_feature: MA Experiment 108462 PARAMETER Experiment Name: At_Germinating_Seeds_cDNA_P Parameter: Tissue Value: Germinating Seeds
  misc_feature: MA Experiment ID: 108463 Result: Down-regulated in Transcription
  misc_feature: MA Experiment 108463 PARAMETER Experiment Name: At_Germinating_Seeds_cDNA_P Parameter: Age (day) Value: 3 vs. 0
  misc_feature: MA Experiment 108463 PARAMETER Experiment Name: At_Germinating_Seeds_cDNA_P Parameter: Tissue Value: Germinating Seeds
  misc_feature: MA Experiment ID: 108464 Result: Down-regulated in Transcription
  misc_feature: MA Experiment 108464 PARAMETER Experiment Name: At_Germinating_Seeds_cDNA_P Parameter: Age (day) Value: 4 vs. 0
  misc_feature: MA Experiment 108464 PARAMETER Experiment Name: At_Germinating_Seeds_cDNA_P Parameter: Tissue Value: Germinating Seeds
  misc_feature: MA Experiment ID: 108573 Result: Down-regulated in Transcription
  misc_feature: MA Experiment 108573 PARAMETER Experiment Name: At_Drought_cDNA_P Parameter: Timepoint (hr) Value: 6
  misc_feature: MA Experiment 108573 PARAMETER Experiment Name: At_Drought_cDNA_P Parameter: Tissue Value: Aerial
  misc_feature: MA Experiment 108573 PARAMETER Experiment Name: At_Drought_cDNA_P Parameter: Treatment Value: Drought vs. No Drought
  misc_feature: MA Experiment ID: 108576 Result: Up-regulated in Transcription
  misc_feature: MA Experiment 108576 PARAMETER Experiment Name: At_42deg_Heat_cDNA_P Parameter: Temperature (deg C) Value: 42 vs. 22
  misc_feature: MA Experiment 108576 PARAMETER Experiment Name: At_42deg_Heat_cDNA_P Parameter: Timepoint (hr) Value: 1
  misc_feature: MA Experiment 108576 PARAMETER Experiment Name: At_42deg_Heat_cDNA_P Parameter: Tissue Value: Aerial
  misc_feature: MA Experiment ID: 108577 Result: Up-regulated in Transcription
  misc_feature: MA Experiment 108577 PARAMETER Experiment Name: At_42deg_Heat_cDNA_P Parameter: Temperature (deg C) Value: 42 vs. 22
  misc_feature: MA Experiment 108577 PARAMETER Experiment Name: At_42deg_Heat_cDNA_P Parameter: Timepoint (hr) Value: 6
  misc_feature: MA Experiment 108577 PARAMETER Experiment Name: At_42deg_Heat_cDNA_P Parameter: Tissue Value: Aerial
  misc_feature: MA Experiment ID: 108668 Result: Down-regulated in Transcription
  misc_feature: MA Experiment 108668 PARAMETER Experiment Name: At_2mM_SA_cDNA_P Parameter: Plant Line Value: WS
  misc_feature: MA Experiment 108668 PARAMETER Experiment Name: At_2mM_SA_cDNA_P Parameter: Timepoint (hr) Value: 6
  misc_feature: MA Experiment 108668 PARAMETER Experiment Name: At_2mM_SA_cDNA_P Parameter: Treatment Value: 2mM SA vs. No Treatment
  misc_feature: MA Experiment ID: 20000086 Result: Down-regulated in Transcription
  misc_feature: MA Experiment 20000086 PARAMETER Experiment Name: At_100uM_ABA_Mutants_cDNA_P Parameter: Plant Line Value: CS22
  misc_feature: MA Experiment 20000086 PARAMETER Experiment Name: At_100uM_ABA_Mutants_cDNA_P Parameter: Timepoint (hr) Value: 6
  misc_feature: MA Experiment 20000086 PARAMETER Experiment Name: At_100uM_ABA_Mutants_cDNA_P Parameter: Tissue Value: Aerial
  misc_feature: MA Experiment 20000086 PARAMETER Experiment Name: At_100uM_ABA_Mutants_cDNA_P Parameter: Treatment Value: 100uM ABA vs. No Treatment
  misc_feature: MA Experiment ID: 20000087 Result: Down-regulated in Transcription
  misc_feature: MA Experiment 20000087 PARAMETER Experiment Name: At_100uM_ABA_Mutants_cDNA_P Parameter: Plant Line Value: WS
  misc_feature: MA Experiment 20000087 PARAMETER Experiment Name: At_100uM_ABA_Mutants_cDNA_P Parameter: Timepoint (hr) Value: 6
  misc_feature: MA Experiment 20000087 PARAMETER Experiment Name: At_100uM_ABA_Mutants_cDNA_P Parameter: Tissue Value: Aerial
  misc_feature: MA Experiment 20000087 PARAMETER Experiment Name: At_100uM_ABA_Mutants_cDNA_P Parameter: Treatment Value: 100uM ABA vs. No Treatment
  misc_feature: MA Experiment ID: 20000111 Result: Up-regulated in Transcription
  misc_feature: MA Experiment 20000111 PARAMETER Experiment Name: At_42deg_Heat_cDNA_P Parameter: Temperature (deg C) Value: 42 vs. 22
  misc_feature: MA Experiment 20000111 PARAMETER Experiment Name: At_42deg_Heat_cDNA_P Parameter: Timepoint (hr) Value: 6
  misc_feature: MA Experiment 20000111 PARAMETER Experiment Name: At_42deg_Heat_cDNA_P Parameter: Tissue Value: Aerial
  misc_feature: MA Experiment ID: 20000112 Result: Up-regulated in Transcription
  misc_feature: MA Experiment 20000112 PARAMETER Experiment Name: At_42deg_Heat_cDNA_P Parameter: Temperature (deg C) Value: 42 vs. 22
  misc_feature: MA Experiment 20000112 PARAMETER Experiment Name: At_42deg_Heat_cDNA_P Parameter: Timepoint (hr) Value: 2
  misc_feature: MA Experiment 20000112 PARAMETER Experiment Name: At_42deg_Heat_cDNA_P Parameter: Tissue Value: Aerial
  misc_feature: MA Experiment ID: 20000113 Result: Up-regulated in Transcription
  misc_feature: MA Experiment 20000113 PARAMETER Experiment Name: At_42deg_Heat_cDNA_P Parameter: Temperature (deg C) Value: 42 vs. 22
  misc_feature: MA Experiment 20000113 PARAMETER Experiment Name: At_42deg_Heat_cDNA_P Parameter: Timepoint (hr) Value: 8
  misc_feature: MA Experiment 20000113 PARAMETER Experiment Name: At_42deg_Heat_cDNA_P Parameter: Tissue Value: Aerial
  misc_feature: MA Experiment ID: 20000144 Result: Up-regulated in Transcription
  misc_feature: MA Experiment 20000144 PARAMETER Experiment Name: At_42deg_Heat_cDNA_P Parameter: Temperature (deg C) Value: 42 vs. 22
  misc_feature: MA Experiment 20000144 PARAMETER Experiment Name: At_42deg_Heat_cDNA_P Parameter: Timepoint (hr) Value: 1
  misc_feature: MA Experiment 20000144 PARAMETER Experiment Name: At_42deg_Heat_cDNA_P Parameter: Tissue Value: Aerial
  misc_feature: MA Experiment ID: 20000171 Result: Up-regulated in Transcription
  misc_feature: MA Experiment 20000171 PARAMETER Experiment Name: At_42deg_Heat_P Parameter: Age (day) Value: 14
  misc_feature: MA Experiment 20000171 PARAMETER Experiment Name: At_42deg_Heat_P Parameter: Organism Value: A. thaliana
  misc_feature: MA Experiment 20000171 PARAMETER Experiment Name: At_42deg_Heat_P Parameter: Plant Line Value: WS
  misc_feature: MA Experiment 20000171 PARAMETER Experiment Name: At_42deg_Heat_P Parameter: Temperature (deg C) Value: 42 vs. 22
  misc_feature: MA Experiment 20000171 PARAMETER Experiment Name: At_42deg_Heat_P Parameter: Timepoint (hr) Value: 1
  misc_feature: MA Experiment 20000171 PARAMETER Experiment Name: At_42deg_Heat_P Parameter: Tissue Value: Aerial
  misc_feature: MA Experiment ID: 20000173 Result: Up-regulated in Transcription
  misc_feature: MA Experiment 20000173 PARAMETER Experiment Name: At_42deg_Heat_P Parameter: Age (day) Value: 14
  misc_feature: MA Experiment 20000173 PARAMETER Experiment Name: At_42deg_Heat_P Parameter: Organism Value: A. thaliana
  misc_feature: MA Experiment 20000173 PARAMETER Experiment Name: At_42deg_Heat_P Parameter: Plant Line Value: WS
  misc_feature: MA Experiment 20000173 PARAMETER Experiment Name: At_42deg_Heat_P Parameter: Temperature (deg C) Value: 42 vs. 22
  misc_feature: MA Experiment 20000173 PARAMETER Experiment Name: At_42deg_Heat_P Parameter: Timepoint (hr) Value: 6
  misc_feature: MA Experiment 20000173 PARAMETER Experiment Name: At_42deg_Heat_P Parameter: Tissue Value: Aerial
  misc_feature: MA Experiment ID: 20000185 Result: Up-regulated in Transcription
  misc_feature: MA Experiment 20000185 PARAMETER Experiment Name: At_Roots__P Parameter: Age (day) Value: 7 vs. 21
  misc_feature: MA Experiment 20000185 PARAMETER Experiment Name: At_Roots__P Parameter: Organism Value: A. thaliana
  misc_feature: MA Experiment 20000185 PARAMETER Experiment Name: At_Roots__P Parameter: Tissue Value: Roots vs. Whole Plant
  misc_feature: MA Experiment ID: 20000227 Result: Up-regulated in Transcription
  misc_feature: MA Experiment 20000227 PARAMETER Experiment Name: At_Root-Tips-vs-Tops_P Parameter: Tissue Value: Root Tips vs. Root Tops
  misc_feature: MA Experiment ID: 20000234 Result: Up-regulated in Transcription
  misc_feature: MA Experiment 20000234 PARAMETER Experiment Name: At_Siliques_P Parameter: Age (day) Value: 21
  misc_feature: MA Experiment 20000234 PARAMETER Experiment Name: At_Siliques_P Parameter: Organism Value: A. thaliana
  misc_feature: MA Experiment 20000234 PARAMETER Experiment Name: At_Siliques_P Parameter: Plant Line Value: WS
  misc_feature: MA Experiment 20000234 PARAMETER Experiment Name: At_Siliques_P Parameter: Tissue Value: Less Than 5mm Siliques vs. Whole Plant
  misc_feature: MA Experiment ID: 20000264 Result: Up-regulated in Transcription
  misc_feature: MA Experiment 20000264 PARAMETER Experiment Name: At_Open_Flower_P Parameter: Age (day) Value: 21
  misc_feature: MA Experiment 20000264 PARAMETER Experiment Name: At_Open_Flower_P Parameter: Plant Line Value: WS
  misc_feature: MA Experiment 20000264 PARAMETER Experiment Name: At_Open_Flower_P Parameter: Tissue Value: Open Flower vs. Whole Plant
  misc_feature: MA Experiment ID: 20000265 Result: Up-regulated in Transcription
  misc_feature: MA Experiment 20000265 PARAMETER Experiment Name: At_Open_Flower_P Parameter: Age (day) Value: 21
  misc_feature: MA Experiment 20000265 PARAMETER Experiment Name: At_Open_Flower_P Parameter: Plant Line Value: WS
  misc_feature: MA Experiment 20000265 PARAMETER Experiment Name: At_Open_Flower_P Parameter: Tissue Value: Closed Flower vs. Whole Plant
  misc_feature: MA Experiment ID: 20000437 Result: Down-regulated in Transcription
  misc_feature: MA Experiment 20000437 PARAMETER Experiment Name: At_Drought_P Parameter: Age (day) Value: 8
  misc_feature: MA Experiment 20000437 PARAMETER Experiment Name: At_Drought_P Parameter: Organism Value: A. thaliana
  misc_feature: MA Experiment 20000437 PARAMETER Experiment Name: At_Drought_P Parameter: Plant Line Value: WS
  misc_feature: MA Experiment 20000437 PARAMETER Experiment Name: At_Drought_P Parameter: Timepoint (hr) Value: 24
  misc_feature: MA Experiment 20000437 PARAMETER Experiment Name: At_Drought_P Parameter: Tissue Value: Whole Plant
  misc_feature: MA Experiment 20000437 PARAMETER Experiment Name: At_Drought_P Parameter: Treatment Value: Drought vs. No Drought
  misc_feature: MA Experiment ID: 20001557 Result: Up-regulated in Transcription
  misc_feature: MA Experiment 20001557 PARAMETER Experiment Name: At_Drought_Soil_Dry_P Parameter: Age (day) Value: 27
  misc_feature: MA Experiment 20001557 PARAMETER Experiment Name: At_Drought_Soil_Dry_P Parameter: Organism Value: A. thaliana
  misc_feature: MA Experiment 20001557 PARAMETER Experiment Name: At_Drought_Soil_Dry_P Parameter: Plant Line Value: WS
  misc_feature: MA Experiment 20001557 PARAMETER Experiment Name: At_Drought_Soil_Dry_P Parameter: Post Timepoint (hr) Value: 3
  misc_feature: MA Experiment 20001557 PARAMETER Experiment Name: At_Drought_Soil_Dry_P Parameter: Post-Treatment Value: Re-Water vs. No Drought
  misc_feature: MA Experiment 20001557 PARAMETER Experiment Name: At_Drought_Soil_Dry_P Parameter: Timepoint (day) Value: 13
  misc_feature: MA Experiment 20001557 PARAMETER Experiment Name: At_Drought_Soil_Dry_P Parameter: Treatment Value: Drought vs. No Drought
  misc_feature: MA Experiment ID: 20001558 Result: Up-regulated in Transcription
  misc_feature: MA Experiment 20001558 PARAMETER Experiment Name: At_Drought_Soil_Dry_P Parameter: Age (day) Value: 27
  misc_feature: MA Experiment 20001558 PARAMETER Experiment Name: At_Drought_Soil_Dry_P Parameter: Organism Value: A. thaliana
  misc_feature: MA Experiment 20001558 PARAMETER Experiment Name: At_Drought_Soil_Dry_P Parameter: Plant Line Value: WS
  misc_feature: MA Experiment 20001558 PARAMETER Experiment Name: At_Drought_Soil_Dry_P Parameter: Post Timepoint (hr) Value: 6
  misc_feature: MA Experiment 20001558 PARAMETER Experiment Name: At_Drought_Soil_Dry_P Parameter: Post-Treatment Value: Re-Water vs. No Drought
  misc_feature: MA Experiment 20001558 PARAMETER Experiment Name: At_Drought_Soil_Dry_P Parameter: Timepoint (day) Value: 13
  misc_feature: MA Experiment 20001558 PARAMETER Experiment Name: At_Drought_Soil_Dry_P Parameter: Treatment Value: Drought vs. No Drought
cttagggcgtataaaatcagaaacagaaacgagacaagaattaattctctcgtccaaatttcttctgggcagaaaccaacatttatccttatccgattcttctagggtttcggaagatctaaccagaaccttcgcaacaagatggataagtatcagagagttgagaagccgaaggcggatacgccgattgctgagaatgagattcgtatcaccagtatgggtagggcacggaactacatcacctatgcgatggctcttcttcaggaaaacaaatcgaatgaagttatcttcaaggctatgggaagagctatcaacaagagtgtgaccatagttgagctgattaagagaaggattcctggtcttcatcagatcacatctattggatcaacggacattacagatacctgggaacctacagaggaaggccttcaaacaattgagaccacgaggcatgtgtcgatgataaccataacactttccaaggagcagttgaacacatcctcagttgggtaccagtgtccgattcctattgagatggtgaagccattggctgagattgactacgaagggcaagacggatctcctagaggcagaggaggaagaagaggtagaggaggaagaggaaggggaaggggaagaggtggtagaggaaatggacctgcgaatgttgagtatgatgatggaggaaggggaagaggtggcagaggaaacggatatgtgaacaatgagtatgatgatggaggaaggggaagaggcggcagaggtagaagaagtggatatgtgaacaatgagtataatgatggaggtatggagcaggaccggtcatatggcagaggacgcgggcgtgggagaggaggtggacgtggtggtcgaggaagaggaggttacaatggccccccaccaccttactatgaagctcaacaagatggaggagactatggatacaacaatgttgctcctccagcagaccatggatatgatggtcctccgcctcagggacgtggacgtggccgtggaaggggaggtcgtggaagaggaggaggccgtggtggattcaacagatcaaatggagcacctatccaggctgctgcatgagcgaccagggtcattgaatgaagttggatctttcttacattctcatgtttttgtctctgttcttcaaagcaacttgttgccgtagaataatctttcgttcatgtcgctttaggttatatatatcctcatttattttatcatgg

SEQ ID NO: 84759 - protein, 317 aa, Arabidopsis thaliana
  peptide (1)..(317): Ceres Seq. ID no. 12676802
  misc_feature (150)..(312): Pfam Name: Herpesvirus latent membrane protein 1 (LMP1) Pfam Description: Herpesvirus latent membrane protein 1 (LMP1)
  misc_feature (1)..(317): Homolog of NCBI NO: 25518088 NR Description: T20H2.2 protein - Arabidopsis thaliana Contains similarity to pigpen protein from Mus musculus and contains protein of unknown function DUF78 PF|01918 domain.
  misc_feature (1)..(317): Homolog of NCBI NO: 18394837 NR Description: expressed protein; protein id: At1g20220.1, by cDNA: gi_16612273 [Arabidopsis thaliana]
  misc_feature (1)..(277): Homolog of NCBI NO: 24417384 NR Description: unknown [Arabidopsis thaliana]
  misc_feature (1)..(306): Homolog of NCBI NO: 18410994 NR Description: expressed protein; protein id: At1g76010.1, by cDNA: gi_15724323, supported by cDNA: gi_15809881, supported cDNA: gi_16226598 [Arabidopsis thaliana]
  misc_feature (1)..(258): Homolog of NCBI NO: 34897552 NR Description: OSJNBa0042L16.13 [Oryza sativa (japonica
  misc_feature (41)..(306): Homolog of NCBI NO: 25404999 NR Description: protein T4O12.22 [imported] - Arabidopsis >gi|8778814|gb|AAF79819.1|AC007396_20 T4O12.22 [Arabidopsis
  misc_feature (1)..(48): Homolog of NCBI NO: 25404999 NR Description: protein T4O12.22 [imported] - Arabidopsis >gi|8778814|gb|AAF79819.1|AC007396_20 T4O12.22 [Arabidopsis
  misc_feature (177)..(312): Homolog of NCBI NO: 25404999 NR Description: protein T4O12.22 [imported] - Arabidopsis >gi|8778814|gb|AAF79819.1|AC007396_20 T4O12.22 [Arabidopsis
  misc_feature (137)..(317): Homolog of NCBI NO: 25404999 NR Description: protein T4O12.22 [imported] - Arabidopsis >gi|8778814|gb|AAF79819.1|AC007396_20 T4O12.22 [Arabidopsis
  misc_feature (1)..(146): Homolog of NCBI NO: 15231369 NR Description: unknown protein; protein id: At3g07030.1 thaliana] >gi|6729010|gb|AAF27007.1|AC016827_18 unknown protein
MDKYQRVEKPKADTPIAENEIRITSMGRARNYITYAMALLQENKSNEVIFKAMGRAINKSVTIVELIKRRIPGLHQITSIGSTDITDTWEPTEEGLQTIETTRHVSMITITLSKEQLNTSSVGYQCPIPIEMVKPLAEIDYEGQDGSPRGRGGRRGRGGRGRGRGRGGRGNGPANVEYDDGGRGRGGRGNGYVNNEYDDGGRGRGGRGRRSGYVNNEYNDGGMEQDRSYGRGRGRGRGGGRGGRGRGGYNGPPPPYYEAQQDGGDYGYNNVAPPADHGYDGPPPQGRGRGRGRGGRGRGGGRGGFNRSNGAPIQAAA

SEQ ID NO: 84760 - protein, 292 aa, Arabidopsis thaliana
  peptide (1)..(292): Ceres Seq. ID no. 12676803
  misc_feature (125)..(287): Pfam Name: Herpesvirus latent membrane protein 1 (LMP1) Pfam Description: Herpesvirus latent membrane protein 1 (LMP1)
  misc_feature (1)..(292): Homolog of NCBI NO: 25518088 NR Description: T20H2.2 protein - Arabidopsis thaliana Contains similarity to pigpen protein from Mus musculus and contains protein of unknown function DUF78 PF|01918 domain.
  misc_feature (1)..(292): Homolog of NCBI NO: 18394837 NR Description: expressed protein; protein id: At1g20220.1, by cDNA: gi_16612273 [Arabidopsis thaliana]
  misc_feature (1)..(252): Homolog of NCBI NO: 24417384 NR Description: unknown [Arabidopsis thaliana]
  misc_feature (1)..(281): Homolog of NCBI NO: 18410994 NR Description: expressed protein; protein id: At1g76010.1, by cDNA: gi_15724323, supported by cDNA: gi_15809881, supported cDNA: gi_16226598 [Arabidopsis thaliana]
  misc_feature (1)..(233): Homolog of NCBI NO: 34897552 NR Description: OSJNBa0042L16.13 [Oryza sativa (japonica
  misc_feature (16)..(281): Homolog of NCBI NO: 25404999 NR Description: protein T4O12.22 [imported] - Arabidopsis >gi|8778814|gb|AAF79819.1|AC007396_20 T4O12.22 [Arabidopsis
  misc_feature (1)..(23): Homolog of NCBI NO: 25404999 NR Description: protein T4O12.22 [imported] - Arabidopsis >gi|8778814|gb|AAF79819.1|AC007396_20 T4O12.22 [Arabidopsis
  misc_feature (152)..(287): Homolog of NCBI NO: 25404999 NR Description: protein T4O12.22 [imported] - Arabidopsis >gi|8778814|gb|AAF79819.1|AC007396_20 T4O12.22 [Arabidopsis
  misc_feature (112)..(292): Homolog of NCBI NO: 25404999 NR Description: protein T4O12.22 [imported] - Arabidopsis >gi|8778814|gb|AAF79819.1|AC007396_20 T4O12.22 [Arabidopsis
  misc_feature (1)..(121): Homolog of NCBI NO: 15231369 NR Description: unknown protein; protein id: At3g07030.1 thaliana] >gi|6729010|gb|AAF27007.1|AC016827_18 unknown protein
MGRARNYITYAMALLQENKSNEVIFKAMGRAINKSVTIVELIKRRIPGLHQITSIGSTDITDTWEPTEEGLQTIETTRHVSMITITLSKEQLNTSSVGYQCPIPIEMVKPLAEIDYEGQDGSPRGRGGRRGRGGRGRGRGRGGRGNGPANVEYDDGGRGRGGRGNGYVNNEYDDGGRGRGGRGRRSGYVNNEYNDGGMEQDRSYGRGRGRGRGGGRGGRGRGGYNGPPPPYYEAQQDGGDYGYNNVAPPADHGYDGPPPQGRGRGRGRGGRGRGGGRGGFNRSNGAPIQAAA

SEQ ID NO: 84761 - protein, 281 aa, Arabidopsis thaliana
  peptide (1)..(281): Ceres Seq. ID no. 12676804
  misc_feature (114)..(276): Pfam Name: Herpesvirus latent membrane protein 1 (LMP1) Pfam Description: Herpesvirus latent membrane protein 1 (LMP1)
  misc_feature (1)..(281): Homolog of NCBI NO: 25518088 NR Description: T20H2.2 protein - Arabidopsis thaliana Contains similarity to pigpen protein from Mus musculus and contains protein of unknown function DUF78 PF|01918 domain.
  misc_feature (1)..(281): Homolog of NCBI NO: 18394837 NR Description: expressed protein; protein id: At1g20220.1, by cDNA: gi_16612273 [Arabidopsis thaliana]
  misc_feature (1)..(241): Homolog of NCBI NO: 24417384 NR Description: unknown [Arabidopsis thaliana]
  misc_feature (1)..(270): Homolog of NCBI NO: 18410994 NR Description: expressed protein; protein id: At1g76010.1, by cDNA: gi_15724323, supported by cDNA: gi_15809881, supported cDNA: gi_16226598 [Arabidopsis thaliana]
  misc_feature (1)..(222): Homolog of NCBI NO: 34897552 NR Description: OSJNBa0042L16.13 [Oryza sativa (japonica
  misc_feature (5)..(270): Homolog of NCBI NO: 25404999 NR Description: protein T4O12.22 [imported] - Arabidopsis >gi|8778814|gb|AAF79819.1|AC007396_20 T4O12.22 [Arabidopsis
  misc_feature (1)..(12): Homolog of NCBI NO: 25404999 NR Description: protein T4O12.22 [imported] - Arabidopsis >gi|8778814|gb|AAF79819.1|AC007396_20 T4O12.22 [Arabidopsis
  misc_feature (141)..(276): Homolog of NCBI NO: 25404999 NR Description: protein T4O12.22 [imported] - Arabidopsis >gi|8778814|gb|AAF79819.1|AC007396_20 T4O12.22 [Arabidopsis
  misc_feature (101)..(281): Homolog of NCBI NO: 25404999 NR Description: protein T4O12.22 [imported] - Arabidopsis >gi|8778814|gb|AAF79819.1|AC007396_20 T4O12.22 [Arabidopsis
  misc_feature (1)..(110): Homolog of NCBI NO: 15231369 NR Description: unknown protein; protein id: At3g07030.1 thaliana] >gi|6729010|gb|AAF27007.1|AC016827_18 unknown protein
MALLQENKSNEVIFKAMGRAINKSVTIVELIKRRIPGLHQITSIGSTDITDTWEPTEEGLQTIETTRHVSMITITLSKEQLNTSSVGYQCPIPIEMVKPLAEIDYEGQDGSPRGRGGRRGRGGRGRGRGRGGRGNGPANVEYDDGGRGRGGRGNGYVNNEYDDGGRGRGGRGRRSGYVNNEYNDGGMEQDRSYGRGRGRGRGGGRGGRGRGGYNGPPPPYYEAQQDGGDYGYNNVAPPADHGYDGPPPQGRGRGRGRGGRGRGGGRGGFNRSNGAPIQAAA

SEQ ID NO: 84762 - DNA, 3249 bp, Arabidopsis thaliana
  misc_feature (1)..(3249): Ceres Seq. ID no. 12676857
  misc_feature: MA Experiment ID: 20000184 Result: Down-regulated in Transcription
  misc_feature: MA Experiment 20000184 PARAMETER Experiment Name: At_Shoots__P Parameter: Age (day) Value: 7
  misc_feature: MA Experiment 20000184 PARAMETER Experiment Name: At_Shoots__P Parameter: Tissue Value: Shoots vs. Whole Plant
  misc_feature: MA Experiment ID: 20000234 Result: Down-regulated in Transcription
  misc_feature: MA Experiment 20000234 PARAMETER Experiment Name: At_Siliques_P Parameter: Age (day) Value: 21
  misc_feature: MA Experiment 20000234 PARAMETER Experiment Name: At_Siliques_P Parameter: Organism Value: A. thaliana
  misc_feature: MA Experiment 20000234 PARAMETER Experiment Name: At_Siliques_P Parameter: Plant Line Value: WS
  misc_feature: MA Experiment 20000234 PARAMETER Experiment Name: At_Siliques_P Parameter: Tissue Value: Less Than 5mm Siliques vs. Whole Plant
  misc_feature: MA Experiment ID: 20000451 Result: Up-regulated in Transcription
  misc_feature: MA Experiment 20000451 PARAMETER Experiment Name: At_CS6879_Shoots-Roots_P Parameter: Age (day) Value: 14
  misc_feature: MA Experiment 20000451 PARAMETER Experiment Name: At_CS6879_Shoots-Roots_P Parameter: Organism Value: A. thaliana
  misc_feature: MA Experiment 20000451 PARAMETER Experiment Name: At_CS6879_Shoots-Roots_P Parameter: Plant Line Value: CS6879 vs. WS
  misc_feature: MA Experiment 20000451 PARAMETER Experiment Name: At_CS6879_Shoots-Roots_P Parameter: Tissue Value: Roots
  misc_feature: MA Experiment ID: 20000573 Result: Down-regulated in Transcription
  misc_feature: MA Experiment 20000573 PARAMETER Experiment Name: At_100uM_ABA_Mutants__P Parameter: Organism Value: A. thaliana
  misc_feature: MA Experiment 20000573 PARAMETER Experiment Name: At_100uM_ABA_Mutants__P Parameter: Plant Line Value: CS22 vs. Ler wt
  misc_feature: MA Experiment 20000573 PARAMETER Experiment Name: At_100uM_ABA_Mutants__P Parameter: Timepoint (hr) Value: N/A
  misc_feature: MA Experiment 20000573 PARAMETER Experiment Name: At_100uM_ABA_Mutants__P Parameter: Tissue Value: Whole Plant
  misc_feature: MA Experiment 20000573 PARAMETER Experiment Name: At_100uM_ABA_Mutants__P Parameter: Treatment Value: None
aataaattcatttacagaattgttttgtaaccaattagatagcagtactttaatatctgaggctattttcgtcattttcaaattatggtgtgtttttttggagggagtgggaaaaaaaaaatcgatacatgaatgacgtgacctccattgatttcggcgaacgagcttcttcttcttccctctctctctctctttggctccatctcttacagtaactgtctcttggaaccatttcctcttcactagtatcttctaacaatgtctgctactaggtcacagagatcatccacgatctcgccggctcgtcctcgtagatcgccggcgactattccgatgaaacgtccggaaactccttcttcctctcacttttctgcttctccggttacttcttctagtccattactacgttctagtcctagtccgtctacttcctccgccgccgcctctagtacggctgttgcttccacgaaactgaaggagaatattacagtcacgattcggtttcgtcctctcagtccacgagaggtcaataatggagatgagattgcgtggtatgcagatggagactatactattaggaatgagtataatccatctctttgttatggatttgatagagtatttggtccaccaacaactactcggcgtgtttatgacattgctgctcaacaagttgttagtggggcaatgtcagggattaatggtactgtgtttgcttatggagttactagcagtgggaagactcatacaatgcatggggagcaaaggtcacctggaataattccgttggctgtaaaggatgtatttagcattattcaggagacaccagaacgggaatttcttcttcgtgtttcgtatctagagatatacaatgaggtcatcaatgacttactagatccaacagggcaaaatctaagaatacgagaggattctcagggcacatatgttgaaggtataaaagatgaggttgtcttatcccctgcccatgctctatccctaatagcatctggagaagaacacaggcatgttggttcaaataatgtcaatcttttcagcagtcggagccacacaatgttcaccttgactatagaaagcagtccacatggaaagggagatgacggcgaagatgttagtctctcacaattgcaccttattgatcttgctgggtctgaaagttctaaaactgaaataactggacagcgaaggaaagagggctcttctatcaataaaagtttactcactcttggcactgttatatctaaattgacagacaccaaggcagctcatataccctacagggattctaaacttacgcgtctcttgcagtcaacactaagtggtcatggacgagtgtcacttatttgcactatcacacctgcatccagcacaagtgaagagacgcacaacacactgaaattcgctcagaggtgcaagcatgttgaaatcaaagcttcacgaaataagattatggatgagaagtcccttataaaaaagtatcagaaagaaatatcgtgtttacaagaagaacttacgcaattgaggcacggaaaccaagatgatttggctgatcgaaaacttcaggttaaacttcagtcaaggttggaggatgatgaagaagccaaagcagctctgatgggaagaattcagcgattgacaaagttaatcttggtttcaacaaaaagttcactccaagctgcttctgtaaaacctgaccatatatggaggcaagcttttggagaggatgagctagcatacttgcccgatagaagacgggagaacatggctgatgatggtgctgtaagcacagtttctgaacatttaaaggagccaagagatggcaatagtagtctggacgagatgacaaaggacaggagaaagaacaagactcgtggaatgcttggctggctaaaactgaaaaaatctgatggtgtggccgggacattgccgactgatggtaaccagagccaagcaagtggatctccttcatcttcctccaagtatacacaaacaaaaacaactagaagagaaaatgcagcggctattaagtctattccggaaaaaactgttgctggagacttgttcagtgctactgttggaccagaagactcgtctccgactggaactactattgcggatcaaatggatcttcttcacgagcagacaaaaatacttgttggagaagtagccttacgtaccagttcattaaatcggctttccgaacaagctgctcgcaaccctgaggattttcacatcagagatcaaatacagaaattagaagatgaaatcagcgaaaagaaggatcaaatacgtgttctcgagcaacaaattattgagattttcggaatgactccctatgcctcagattctcttggaatgccccaggttctgtcaaagctcacgatgcaactaaatgagaaaatatttgaacatgagataaagtctgcagacaataggatacttcaggagcagctgcagatgactaaatcagaaaacgctgagatgcaagagacaatcattctactaagacaacaactagattcgttagccgagagacaatcaacacagcaaatcgcaggagacgaatcatcagggaagaatattcacaacagaaatggtgaagagtcagaaatatactctggagcaggaacaccgaccagcgtgatgagtttaaatagagtatttgctcaggaagagactaaagagatctacaacgaaacagctctcaactctcaggcattggaaatagagaatctgaagaaggagaagatgcgattaattgaggaaaaagatgagcttggaaaacttaacaagaaactcactgaagaagcttcatatgctaaagaattggcgtctgctgcagcagtagaacttcagaatttggctgaagaagttaccagactctgcaatgaaaacgcgaaactcagcaggtgaaaaagtttcaggtctctctgttgttgctcggagactcccagcttcaagataatgctgcaaagtaaatcatcttcgttgacatataatgcaaatctcagactctacttggaaggtaatgatgttgatccatcaaagggaacaagagatcatgatgctcccaaaggcattcaatccagaaaaaatggtttgtattgcttggatagtattttgattacgtctgatgacaaacacatgatgtaaatattcctcacaaatttgttttcttgttctcagtgaccactatttttgtatgttcttaggttgaatcaatgatgttgc

SEQ ID NO: 84763 - protein, 890 aa, Arabidopsis thaliana
  peptide (1)..(890): Ceres Seq. ID no. 12676858
  misc_feature (799)..(852): Pfam Name: Protein of unknown function (DUF465) Pfam Description: Protein of unknown function (DUF465)
  misc_feature (1)..(446): Homolog of NCBI NO: 25518765 NR Description: hypothetical protein F8K7.17 - Arabidopsis >gi|5263326|gb|AAD41428.1|AC007727_17 Similar to gb|U06698 kinesin heavy chain from Homo sapiens and contains a PF|00225
  misc_feature (38)..(726): Homolog of NCBI NO: 22331006 NR Description: kinesin-related protein; protein id: At3g12020.1
  misc_feature (810)..(889): Homolog of NCBI NO: 22331006 NR Description: kinesin-related protein; protein id: At3g12020.1
  misc_feature (38)..(726): Homolog of NCBI NO: 10998143 NR Description: kinesin (centromere protein) like heavy
  misc_feature (810)..(889): Homolog of NCBI NO: 10998143 NR Description: kinesin (centromere protein) like heavy
  misc_feature (554)..(889): Homolog of NCBI NO: 21741211 NR Description: OSJNBb0086G13.6 [Oryza sativa (japonica
  misc_feature (189)..(496): Homolog of NCBI NO: 21741211 NR Description: OSJNBb0086G13.6 [Oryza sativa (japonica
  misc_feature (496)..(553): Homolog of NCBI NO: 21741211 NR Description: OSJNBb0086G13.6 [Oryza sativa (japonica
  misc_feature (38)..(873): Homolog of NCBI NO: 12322006 NR Description: kinesin heavy chain, putative; 55116-47986
  misc_feature (38)..(856): Homolog of NCBI NO: 22326629 NR Description: kinesin-related protein; protein id: At5g06670.1
MSATRSQRSSTISPARPRRSPATIPMKRPETPSSSHFSASPVTSSSPLLRSSPSPSTSSAAASSTAVASTKLKENITVTIRFRPLSPREVNNGDEIAWYADGDYTIRNEYNPSLCYGFDRVFGPPTTTRRVYDIAAQQVVSGAMSGINGTVFAYGVTSSGKTHTMHGEQRSPGIIPLAVKDVFSIIQETPEREFLLRVSYLEIYNEVINDLLDPTGQNLRIREDSQGTYVEGIKDEVVLSPAHALSLIASGEEHRHVGSNNVNLFSSRSHTMFTLTIESSPHGKGDDGEDVSLSQLHLIDLAGSESSKTEITGQRRKEGSSINKSLLTLGTVISKLTDTKAAHIPYRDSKLTRLLQSTLSGHGRVSLICTITPASSTSEETHNTLKFAQRCKHVEIKASRNKIMDEKSLIKKYQKEISCLQEELTQLRHGNQDDLADRKLQVKLQSRLEDDEEAKAALMGRIQRLTKLILVSTKSSLQAASVKPDHIWRQAFGEDELAYLPDRRRENMADDGAVSTVSEHLKEPRDGNSSLDEMTKDRRKNKTRGMLGWLKLKKSDGVAGTLPTDGNQSQASGSPSSSSKYTQTKTTRRENAAAIKSIPEKTVAGDLFSATVGPEDSSPTGTTIADQMDLLHEQTKILVGEVALRTSSLNRLSEQAARNPEDFHIRDQIQKLEDEISEKKDQIRVLEQQIIEIFGMTPYASDSLGMPQVLSKLTMQLNEKIFEHEIKSADNRILQEQLQMTKSENAEMQETIILLRQQLDSLAERQSTQQIAGDESSGKNIHNRNGEESEIYSGAGTPTSVMSLNRVFAQEETKEIYNETALNSQALEIENLKKEKMRLIEEKDELGKLNKKLTEEASYAKELASAAAVELQNLAEEVTRLCNENAKLSR

SEQ ID NO: 84764 - protein, 865 aa, Arabidopsis thaliana
  peptide (1)..(865): Ceres Seq. ID no. 12676859
  misc_feature (774)..(827): Pfam Name: Protein of unknown function (DUF465) Pfam Description: Protein of unknown function (DUF465)
  misc_feature (1)..(421): Homolog of NCBI NO: 25518765 NR Description: hypothetical protein F8K7.17 - Arabidopsis >gi|5263326|gb|AAD41428.1|AC007727_17 Similar to gb|U06698 kinesin heavy chain from Homo sapiens and contains a PF|00225
  misc_feature (13)..(701): Homolog of NCBI NO: 22331006 NR Description: kinesin-related protein; protein id: At3g12020.1
  misc_feature (785)..(864): Homolog of NCBI NO: 22331006 NR Description: kinesin-related protein; protein id: At3g12020.1
  misc_feature (13)..(701): Homolog of NCBI NO: 10998143 NR Description: kinesin (centromere protein) like heavy
  misc_feature (785)..(864): Homolog of NCBI NO: 10998143 NR Description: kinesin (centromere protein) like heavy
  misc_feature (529)..(864): Homolog of NCBI NO: 21741211 NR Description: OSJNBb0086G13.6 [Oryza sativa (japonica
  misc_feature (164)..(471): Homolog of NCBI NO: 21741211 NR Description: OSJNBb0086G13.6 [Oryza sativa (japonica
  misc_feature (471)..(528): Homolog of NCBI NO: 21741211 NR Description: OSJNBb0086G13.6 [Oryza sativa (japonica
  misc_feature (13)..(848): Homolog of NCBI NO: 12322006 NR Description: kinesin heavy chain, putative; 55116-47986
  misc_feature (13)..(831): Homolog of NCBI NO: 22326629 NR Description: kinesin-related protein; protein id: At5g06670.1
MKRPETPSSSHFSASPVTSSSPLLRSSPSPSTSSAAASSTAVASTKLKENITVTIRFRPLSPREVNNGDEIAWYADGDYTIRNEYNPSLCYGFDRVFGPPTTTRRVYDIAAQQVVSGAMSGINGTVFAYGVTSSGKTHTMHGEQRSPGIIPLAVKDVFSIIQETPEREFLLRVSYLEIYNEVINDLLDPTGQNLRIREDSQGTYVEGIKDEVVLSPAHALSLIASGEEHRHVGSNNVNLFSSRSHTMFTLTIESSPHGKGDDGEDVSLSQLHLIDLAGSESSKTEITGQRRKEGSSINKSLLTLGTVISKLTDTKAAHIPYRDSKLTRLLQSTLSGHGRVSLICTITPASSTSEETHNTLKFAQRCKHVEIKASRNKIMDEKSLIKKYQKEISCLQEELTQLRHGNQDDLADRKLQVKLQSRLEDDEEAKAALMGRIQRLTKLILVSTKSSLQAASVKPDHIWRQAFGEDELAYLPDRRRENMADDGAVSTVSEHLKEPRDGNSSLDEMTKDRRKNKTRGMLGWLKLKKSDGVAGTLPTDGNQSQASGSPSSSSKYTQTKTTRRENAAAIKSIPEKTVAGDLFSATVGPEDSSPTGTTIADQMDLLHEQTKILVGEVALRTSSLNRLSEQAARNPEDFHIRDQIQKLEDEISEKKDQIRVLEQQIIEIFGMTPYASDSLGMPQVLSKLTMQLNEKIFEHEIKSADNRILQEQLQMTKSENAEMQETIILLRQQLDSLAERQSTQQIAGDESSGKNIHNRNGEESEIYSGAGTPTSVMSLNRVFAQEETKEIYNETALNSQALEIENLKKEKMRLIEEKDELGKLNKKLTEEASYAKELASAAAVELQNLAEEVTRLCNENAKLSR

SEQ ID NO: 84765 - protein, 747 aa, Arabidopsis thaliana
  peptide (1)..(747): Ceres Seq. ID no. 12676860
  misc_feature (656)..(709): Pfam Name: Protein of unknown function (DUF465) Pfam Description: Protein of unknown function (DUF465)
  misc_feature (1)..(303): Homolog of NCBI NO: 25518765 NR Description: hypothetical protein F8K7.17 - Arabidopsis >gi|5263326|gb|AAD41428.1|AC007727_17 Similar to gb|U06698 kinesin heavy chain from Homo sapiens and contains a PF|00225
  misc_feature (1)..(583): Homolog of NCBI NO: 22331006 NR Description: kinesin-related protein; protein id: At3g12020.1
  misc_feature (667)..(746): Homolog of NCBI NO: 22331006 NR Description: kinesin-related protein; protein id: At3g12020.1
  misc_feature (1)..(583): Homolog of NCBI NO: 10998143 NR Description: kinesin (centromere protein) like heavy
  misc_feature (667)..(746): Homolog of NCBI NO: 10998143 NR Description: kinesin (centromere protein) like heavy
  misc_feature (411)..(746): Homolog of NCBI NO: 21741211 NR Description: OSJNBb0086G13.6 [Oryza sativa (japonica
  misc_feature (46)..(353): Homolog of NCBI NO: 21741211 NR Description: OSJNBb0086G13.6 [Oryza sativa (japonica
  misc_feature (353)..(410): Homolog of NCBI NO: 21741211 NR Description: OSJNBb0086G13.6 [Oryza sativa (japonica
  misc_feature (1)..(730): Homolog of NCBI NO: 12322006 NR Description: kinesin heavy chain, putative; 55116-47986
  misc_feature (1)..(713): Homolog of NCBI NO: 22326629 NR Description: kinesin-related protein; protein id: At5g06670.1
MSGINGTVFAYGVTSSGKTHTMHGEQRSPGIIPLAVKDVFSIIQETPEREFLLRVSYLEIYNEVINDLLDPTGQNLRIREDSQGTYVEGIKDEVVLSPAHALSLIASGEEHRHVGSNNVNLFSSRSHTMFTLTIESSPHGKGDDGEDVSLSQLHLIDLAGSESSKTEITGQRRKEGSSINKSLLTLGTVISKLTDTKAAHIPYRDSKLTRLLQSTLSGHGRVSLICTITPASSTSEETHNTLKFAQRCKHVEIKASRNKIMDEKSLIKKYQKEISCLQEELTQLRHGNQDDLADRKLQVKLQSRLEDDEEAKAALMGRIQRLTKLILVSTKSSLQAASVKPDHIWRQAFGEDELAYLPDRRRENMADDGAVSTVSEHLKEPRDGNSSLDEMTKDRRKNKTRGMLGWLKLKKSDGVAGTLPTDGNQSQASGSPSSSSKYTQTKTTRRENAAAIKSIPEKTVAGDLFSATVGPEDSSPTGTTIADQMDLLHEQTKILVGEVALRTSSLNRLSEQAARNPEDFHIRDQIQKLEDEISEKKDQIRVLEQQIIEIFGMTPYASDSLGMPQVLSKLTMQLNEKIFEHEIKSADNRILQEQLQMTKSENAEMQETIILLRQQLDSLAERQSTQQIAGDESSGKNIHNRNGEESEIYSGAGTPTSVMSLNRVFAQEETKEIYNETALNSQALEIENLKKEKMRLIEEKDELGKLNKKLTEEASYAKELASAAAVELQNLAEEVTRLCNENAKLSR

SEQ ID NO: 84766 - DNA, 619 bp, Arabidopsis thaliana
  misc_feature (1)..(619): Ceres Seq. ID no. 12676902
  misc_feature: MA Experiment ID: 108463 Result: Down-regulated in Transcription
  misc_feature: MA Experiment 108463 PARAMETER Experiment Name: At_Germinating_Seeds_cDNA_P Parameter: Age (day) Value: 3 vs. 0
  misc_feature: MA Experiment 108463 PARAMETER Experiment Name: At_Germinating_Seeds_cDNA_P Parameter: Tissue Value: Germinating Seeds
  misc_feature: MA Experiment ID: 108488 Result: Down-regulated in Transcription
  misc_feature: MA Experiment ID: 20000794 Result: Up-regulated in Transcription
  misc_feature: MA Experiment 20000794 PARAMETER Experiment Name: At_Petals_P Parameter: Age (day) Value: 23-25 days
  misc_feature: MA Experiment 20000794 PARAMETER Experiment Name: At_Petals_P Parameter: Plant Line Value: WS
  misc_feature: MA Experiment 20000794 PARAMETER Experiment Name: At_Petals_P Parameter: Tissue Value: Petals vs. Whole plant
  misc_feature: MA Experiment ID: 20001558 Result: Up-regulated in Transcription
  misc_feature: MA Experiment 20001558 PARAMETER Experiment Name: At_Drought_Soil_Dry_P Parameter: Age (day) Value: 27
  misc_feature: MA Experiment 20001558 PARAMETER Experiment Name: At_Drought_Soil_Dry_P Parameter: Organism Value: A. thaliana
  misc_feature: MA Experiment 20001558 PARAMETER Experiment Name: At_Drought_Soil_Dry_P Parameter: Plant Line Value: WS
  misc_feature: MA Experiment 20001558 PARAMETER Experiment Name: At_Drought_Soil_Dry_P Parameter: Post Timepoint (hr) Value: 6
  misc_feature: MA Experiment 20001558 PARAMETER Experiment Name: At_Drought_Soil_Dry_P Parameter: Post-Treatment Value: Re-Water vs. No Drought
  misc_feature: MA Experiment 20001558 PARAMETER Experiment Name: At_Drought_Soil_Dry_P Parameter: Timepoint (day) Value: 13
  misc_feature: MA Experiment 20001558 PARAMETER Experiment Name: At_Drought_Soil_Dry_P Parameter: Treatment Value: Drought vs. No Drought
  misc_feature: MA Experiment ID: 20001560 Result: Up-regulated in Transcription
  misc_feature: MA Experiment 20001560 PARAMETER Experiment Name: At_Drought_Soil_Dry_P Parameter: Age (day) Value: 28
  misc_feature: MA Experiment 20001560 PARAMETER Experiment Name: At_Drought_Soil_Dry_P Parameter: Organism Value: A. thaliana
  misc_feature: MA Experiment 20001560 PARAMETER Experiment Name: At_Drought_Soil_Dry_P Parameter: Plant Line Value: WS
  misc_feature: MA Experiment 20001560 PARAMETER Experiment Name: At_Drought_Soil_Dry_P Parameter: Post Timepoint (hr) Value: None
  misc_feature: MA Experiment 20001560 PARAMETER Experiment Name: At_Drought_Soil_Dry_P Parameter: Post-Treatment Value: None
  misc_feature: MA Experiment 20001560 PARAMETER Experiment Name: At_Drought_Soil_Dry_P Parameter: Timepoint (day) Value: 14
  misc_feature: MA Experiment 20001560 PARAMETER Experiment Name: At_Drought_Soil_Dry_P Parameter: Treatment Value: Drought vs. No Drought
  misc_feature: MA Experiment ID: 20001905 Result: Up-regulated in Transcription
  misc_feature: MA Experiment 20001905 PARAMETER Experiment Name: At_Drought_Reproduction_P Parameter: Age (day) Value: 40
  misc_feature: MA Experiment 20001905 PARAMETER Experiment Name: At_Drought_Reproduction_P Parameter: Organism Value: A. thaliana
  misc_feature: MA Experiment 20001905 PARAMETER Experiment Name: At_Drought_Reproduction_P Parameter: Plant Line Value: WS
  misc_feature: MA Experiment 20001905 PARAMETER Experiment Name: At_Drought_Reproduction_P Parameter: Timepoint (day) Value: 10
  misc_feature: MA Experiment 20001905 PARAMETER Experiment Name: At_Drought_Reproduction_P Parameter: Tissue Value: Rosettes
  misc_feature: MA Experiment 20001905 PARAMETER Experiment Name: At_Drought_Reproduction_P Parameter: Treatment Value: Drought vs. No Drought
  misc_feature: Pfam Name: Cytochrom_C Pfam Description: Cytochrome c
aaggaaacttcggcaagctccagagaaacgagagttccgtaatcattttctcttgttgttcctgatcgcgtagctcaagcgaaaaaaatggcgtcgtttgatgaagcaccaccaggaaacgccaaggccggtgagaagatcttcaggaccaagtgtgctcagtgtcacaccgtcgaagcaggcgccggtcacaaacaaggacccaatctaaacggtctatttggaagacaatctggtacaactgctggttactcttactctgctgctaacaagaacaaagctgtggaatgggaagagaaggccttgtacgattacttgctcaaccccaagaagtacataccaggtaccaagatggtgttccctgggctaaagaagccgcaagaccgtgctgatctcatcgcctacttgaaggaatctactgcgcctaagtgaatctgatggtggattgattctgagttgttaagtctctctcagatgaggcttttttactttgctatattcttttgccaaataaaatctcaaactttttttgtttatcatcaattacgttcttggtgggaatttggctgtaatgtgtgctgaggctcactttatcgagtacatttgattttctgaggct

SEQ ID NO: 84767 - protein, 114 aa, Arabidopsis thaliana [sequence omitted]

SEQ ID NO: 84768 - DNA, 671 bp, Arabidopsis thaliana
  misc_feature (1)..(671): Ceres Seq. ID no. 12676937
  misc_feature: MA Experiment ID: 108434 Result: Up-regulated in Transcription
  misc_feature: MA Experiment 108434 PARAMETER Experiment Name: At_Root_Tips_cDNA_P Parameter: Tissue Value: Root Tips
  misc_feature: MA Experiment ID: 108461 Result: Down-regulated in Transcription
  misc_feature: MA Experiment 108461 PARAMETER Experiment Name: At_Germinating_Seeds_cDNA_P Parameter: Age (day) Value: 1 vs. 0
  misc_feature: MA Experiment 108461 PARAMETER Experiment Name: At_Germinating_Seeds_cDNA_P Parameter: Tissue Value: Germinating Seeds
  misc_feature: MA Experiment ID: 108462 Result: Down-regulated in Transcription
  misc_feature: MA Experiment 108462 PARAMETER Experiment Name: At_Germinating_Seeds_cDNA_P Parameter: Age (day) Value: 2 vs. 0
  misc_feature: MA Experiment 108462 PARAMETER Experiment Name: At_Germinating_Seeds_cDNA_P Parameter: Tissue Value: Germinating Seeds
  misc_feature: MA Experiment ID: 108463 Result: Down-regulated in Transcription
  misc_feature: MA Experiment 108463 PARAMETER Experiment Name: At_Germinating_Seeds_cDNA_P Parameter: Age (day) Value: 3 vs. 0
  misc_feature: MA Experiment 108463 PARAMETER Experiment Name: At_Germinating_Seeds_cDNA_P Parameter: Tissue Value: Germinating Seeds
  misc_feature: MA Experiment ID: 108464 Result: Down-regulated in Transcription
  misc_feature: MA Experiment 108464 PARAMETER Experiment Name: At_Germinating_Seeds_cDNA_P Parameter: Age (day) Value: 4 vs. 0
  misc_feature: MA Experiment 108464 PARAMETER Experiment Name: At_Germinating_Seeds_cDNA_P Parameter: Tissue Value: Germinating Seeds
  misc_feature: MA Experiment ID: 108469 Result: Up-regulated in Transcription
  misc_feature: MA Experiment ID: 108489 Result: Down-regulated in Transcription
  misc_feature: MA Experiment ID: 108561 Result: Up-regulated in Transcription
  misc_feature: MA Experiment 108561 PARAMETER Experiment Name: At_100uM_ABA_cDNA_P Parameter: Timepoint (hr) Value: 6
  misc_feature: MA Experiment 108561 PARAMETER Experiment Name: At_100uM_ABA_cDNA_P Parameter: Tissue Value: Aerial
  misc_feature: MA Experiment 108561 PARAMETER Experiment Name: At_100uM_ABA_cDNA_P Parameter: Treatment Value: 100uM ABA vs. No Treatment
  misc_feature: MA Experiment ID: 108576 Result: Up-regulated in Transcription
  misc_feature: MA Experiment 108576 PARAMETER Experiment Name: At_42deg_Heat_cDNA_P Parameter: Temperature (deg C) Value: 42 vs. 22
  misc_feature: MA Experiment 108576 PARAMETER Experiment Name: At_42deg_Heat_cDNA_P Parameter: Timepoint (hr) Value: 1
  misc_feature: MA Experiment 108576 PARAMETER Experiment Name: At_42deg_Heat_cDNA_P Parameter: Tissue Value: Aerial
  misc_feature: MA Experiment ID: 108577 Result: Up-regulated in Transcription
  misc_feature: MA Experiment 108577 PARAMETER Experiment Name: At_42deg_Heat_cDNA_P Parameter: Temperature (deg C) Value: 42 vs. 22
  misc_feature: MA Experiment 108577 PARAMETER Experiment Name: At_42deg_Heat_cDNA_P Parameter: Timepoint (hr) Value: 6
  misc_feature: MA Experiment 108577 PARAMETER Experiment Name: At_42deg_Heat_cDNA_P Parameter: Tissue Value: Aerial
  misc_feature: MA Experiment ID: 108609 Result: Up-regulated in Transcription
  misc_feature: MA Experiment 108609 PARAMETER Experiment Name: At_100uM_ABA_cDNA_P Parameter: Timepoint (hr) Value: 24
  misc_feature: MA Experiment 108609 PARAMETER Experiment Name: At_100uM_ABA_cDNA_P Parameter: Tissue Value: Aerial
  misc_feature: MA Experiment 108609 PARAMETER Experiment Name: At_100uM_ABA_cDNA_P Parameter: Treatment Value: 100uM ABA vs. No Treatment
  misc_feature: MA Experiment ID: 108667 Result: Up-regulated in Transcription
  misc_feature: MA Experiment 108667 PARAMETER Experiment Name: At_2mM_SA_cDNA_P Parameter: Plant Line Value: WS
  misc_feature: MA Experiment 108667 PARAMETER Experiment Name: At_2mM_SA_cDNA_P Parameter: Timepoint (hr) Value: 1
  misc_feature: MA Experiment 108667 PARAMETER Experiment Name: At_2mM_SA_cDNA_P Parameter: Treatment Value: 2mM SA vs. No Treatment
  misc_feature: MA Experiment ID: 108668 Result: Up-regulated in Transcription
  misc_feature: MA Experiment 108668 PARAMETER Experiment Name: At_2mM_SA_cDNA_P Parameter: Plant Line Value: WS
  misc_feature: MA Experiment 108668 PARAMETER Experiment Name: At_2mM_SA_cDNA_P Parameter: Timepoint (hr) Value: 6
  misc_feature: MA Experiment 108668 PARAMETER Experiment Name: At_2mM_SA_cDNA_P Parameter: Treatment Value: 2mM SA vs. No Treatment
  misc_feature: MA Experiment ID: 20000069 Result: Up-regulated in Transcription
  misc_feature: MA Experiment 20000069 PARAMETER Experiment Name: At_100uM_ABA_Mutants_cDNA_P Parameter: Plant Line Value: CS23
  misc_feature: MA Experiment 20000069 PARAMETER Experiment Name: At_100uM_ABA_Mutants_cDNA_P Parameter: Timepoint (hr) Value: 6
  misc_feature: MA Experiment 20000069 PARAMETER Experiment Name: At_100uM_ABA_Mutants_cDNA_P Parameter: Tissue Value: Aerial
  misc_feature: MA Experiment 20000069 PARAMETER Experiment Name: At_100uM_ABA_Mutants_cDNA_P Parameter: Treatment Value: 100uM ABA vs. No Treatment
  misc_feature: MA Experiment ID: 20000070 Result: Up-regulated in Transcription
  misc_feature: MA Experiment 20000070 PARAMETER Experiment Name: At_100uM_ABA_Mutants_cDNA_P Parameter: Plant Line Value: CS24
  misc_feature: MA Experiment 20000070 PARAMETER Experiment Name: At_100uM_ABA_Mutants_cDNA_P Parameter: Timepoint (hr) Value: 6
  misc_feature: MA Experiment 20000070 PARAMETER Experiment Name: At_100uM_ABA_Mutants_cDNA_P Parameter: Tissue Value: Aerial
  misc_feature: MA Experiment 20000070 PARAMETER Experiment Name: At_100uM_ABA_Mutants_cDNA_P Parameter: Treatment Value: 100uM ABA vs. No Treatment
  misc_feature: MA Experiment ID: 20000087 Result: Up-regulated in Transcription
  misc_feature: MA Experiment 20000087 PARAMETER Experiment Name: At_100uM_ABA_Mutants_cDNA_P Parameter: Plant Line Value: WS
  misc_feature: MA Experiment 20000087 PARAMETER Experiment Name: At_100uM_ABA_Mutants_cDNA_P Parameter: Timepoint (hr) Value: 6
  misc_feature: MA Experiment 20000087 PARAMETER Experiment Name: At_100uM_ABA_Mutants_cDNA_P Parameter: Tissue Value: Aerial
  misc_feature: MA Experiment 20000087 PARAMETER Experiment Name: At_100uM_ABA_Mutants_cDNA_P Parameter: Treatment Value: 100uM ABA vs. No Treatment
  misc_feature: MA Experiment ID: 20000089 Result: Up-regulated in Transcription
  misc_feature: MA Experiment ID: 20000090 Result: Up-regulated in Transcription
  misc_feature: MA Experiment ID: 20000093 Result: Up-regulated in Transcription
  misc_feature: MA Experiment 20000093 PARAMETER Experiment Name: At_42deg_Heat_cDNA_P Parameter: Temperature (deg C) Value: 42 vs. 22
  misc_feature: MA Experiment 20000093 PARAMETER Experiment Name: At_42deg_Heat_cDNA_P Parameter: Timepoint (hr) Value: 0.5
  misc_feature: MA Experiment 20000093 PARAMETER Experiment Name: At_42deg_Heat_cDNA_P Parameter: Tissue Value: Aerial
  misc_feature: MA Experiment ID: 20000111 Result: Up-regulated in Transcription
  misc_feature: MA Experiment 20000111 PARAMETER Experiment Name: At_42deg_Heat_cDNA_P Parameter: Temperature (deg C) Value: 42 vs. 22
  misc_feature: MA Experiment 20000111 PARAMETER Experiment Name: At_42deg_Heat_cDNA_P Parameter: Timepoint (hr) Value: 6
  misc_feature: MA Experiment 20000111 PARAMETER Experiment Name: At_42deg_Heat_cDNA_P Parameter: Tissue Value: Aerial
  misc_feature: MA Experiment ID: 20000113 Result: Up-regulated in Transcription
  misc_feature: MA Experiment 20000113 PARAMETER Experiment Name: At_42deg_Heat_cDNA_P Parameter: Temperature (deg C) Value: 42 vs. 22
  misc_feature: MA Experiment 20000113 PARAMETER Experiment Name: At_42deg_Heat_cDNA_P Parameter: Timepoint (hr) Value: 8
  misc_feature: MA Experiment 20000113 PARAMETER Experiment Name: At_42deg_Heat_cDNA_P Parameter: Tissue Value: Aerial
  misc_feature: MA Experiment ID: 20000144 Result: Up-regulated in Transcription
  misc_feature: MA Experiment 20000144 PARAMETER Experiment Name: At_42deg_Heat_cDNA_P Parameter: Temperature (deg C) Value: 42 vs. 22
  misc_feature: MA Experiment 20000144 PARAMETER Experiment Name: At_42deg_Heat_cDNA_P Parameter: Timepoint (hr) Value: 1
  misc_feature: MA Experiment 20000144 PARAMETER Experiment Name: At_42deg_Heat_cDNA_P Parameter: Tissue Value: Aerial
  misc_feature: MA Experiment ID: 20000306 Result: Down-regulated in Transcription
  misc_feature: MA Experiment 20000306 PARAMETER Experiment Name: At_Germinating_Seeds_Sub_P Parameter: Age (hr) Value: 6 vs. 0
  misc_feature: MA Experiment 20000306 PARAMETER Experiment Name: At_Germinating_Seeds_Sub_P Parameter: Organism Value: A. thaliana
  misc_feature: MA Experiment 20000306 PARAMETER Experiment Name: At_Germinating_Seeds_Sub_P Parameter: Plant Line Value: WS
  misc_feature: MA Experiment 20000306 PARAMETER Experiment Name: At_Germinating_Seeds_Sub_P Parameter: Tissue Value: Germinating Seeds
  misc_feature: MA Experiment ID: 20000307 Result: Down-regulated in Transcription
  misc_feature: MA Experiment 20000307 PARAMETER Experiment Name: At_Germinating_Seeds_Sub_P Parameter: Age (hr) Value: 24 vs. 0
  misc_feature: MA Experiment 20000307 PARAMETER Experiment Name: At_Germinating_Seeds_Sub_P Parameter: Organism Value: A. thaliana
  misc_feature: MA Experiment 20000307 PARAMETER Experiment Name: At_Germinating_Seeds_Sub_P Parameter: Plant Line Value: WS
  misc_feature: MA Experiment 20000307 PARAMETER Experiment Name: At_Germinating_Seeds_Sub_P Parameter: Tissue Value: Germinating Seeds
  misc_feature: MA Experiment ID: 20000315 Result: Up-regulated in Transcription
  misc_feature: MA Experiment 20000315 PARAMETER Experiment Name: At_14day_Shoots-Roots_Sub_P Parameter: Age (day) Value: 14
  misc_feature: MA Experiment 20000315 PARAMETER Experiment Name: At_14day_Shoots-Roots_Sub_P Parameter: Organism Value: A. thaliana
  misc_feature: MA Experiment 20000315 PARAMETER Experiment Name: At_14day_Shoots-Roots_Sub_P Parameter: Plant Line Value: WS
  misc_feature: MA Experiment 20000315 PARAMETER Experiment Name: At_14day_Shoots-Roots_Sub_P Parameter: Tissue Value: Shoots vs. Whole Plant
  misc_feature: MA Experiment ID: 20000327 Result: Up-regulated in Transcription
  misc_feature: MA Experiment 20000327 PARAMETER Experiment Name: At_42deg_Heat_Sub_P Parameter: Age (day) Value: 14
  misc_feature: MA Experiment 20000327 PARAMETER Experiment Name: At_42deg_Heat_Sub_P Parameter: Organism Value: A. thaliana
  misc_feature: MA Experiment 20000327 PARAMETER Experiment Name: At_42deg_Heat_Sub_P Parameter: Plant Line Value: WS
  misc_feature: MA Experiment 20000327 PARAMETER Experiment Name: At_42deg_Heat_Sub_P Parameter: Temperature (deg C) Value: 42 vs. 22
  misc_feature: MA Experiment 20000327 PARAMETER Experiment Name: At_42deg_Heat_Sub_P Parameter: Timepoint (hr) Value: 1
  misc_feature: MA Experiment 20000327 PARAMETER Experiment Name: At_42deg_Heat_Sub_P Parameter: Tissue Value: Aerial
  misc_feature: MA Experiment ID: 20000328 Result: Up-regulated in Transcription
  misc_feature: MA Experiment 20000328 PARAMETER Experiment Name: At_42deg_Heat_Sub_P Parameter: Age (day) Value: 14
  misc_feature: MA Experiment 20000328 PARAMETER Experiment Name: At_42deg_Heat_Sub_P Parameter: Organism Value: A. thaliana
  misc_feature: MA Experiment 20000328 PARAMETER Experiment Name: At_42deg_Heat_Sub_P Parameter: Plant Line Value: WS
  misc_feature: MA Experiment 20000328 PARAMETER Experiment Name: At_42deg_Heat_Sub_P Parameter: Temperature (deg C) Value: 42 vs. 22
  misc_feature: MA Experiment 20000328 PARAMETER Experiment Name: At_42deg_Heat_Sub_P Parameter: Timepoint (hr) Value: 6
  misc_feature: MA Experiment 20000328 PARAMETER Experiment Name: At_42deg_Heat_Sub_P Parameter: Tissue Value: Aerial
  misc_feature: MA Experiment ID: 20000347 Result: Up-regulated in Transcription
  misc_feature: MA Experiment 20000347 PARAMETER Experiment Name: At_2mM_SA_Sub_P Parameter: Age (day) Value: 14
  misc_feature: MA Experiment 20000347 PARAMETER Experiment Name: At_2mM_SA_Sub_P Parameter: Organism Value: A. thaliana
  misc_feature: MA Experiment 20000347 PARAMETER Experiment Name: At_2mM_SA_Sub_P Parameter: Plant Line Value: WS
  misc_feature: MA Experiment 20000347 PARAMETER Experiment Name: At_2mM_SA_Sub_P Parameter: Timepoint (hr) Value: 6
  misc_feature: MA Experiment 20000347 PARAMETER Experiment Name: At_2mM_SA_Sub_P Parameter: Tissue Value: Aerial
  misc_feature: MA Experiment 20000347 PARAMETER Experiment Name: At_2mM_SA_Sub_P Parameter: Treatment Value: 2mM SA vs. No Treatment
attcgaagagagttctagcaaaacaaaacaaaacagagcaaacagagtaagcgaaacgatgtctctagttccgagcttttttggaggccgaagaacaaacgtgttcgacccattttcactagacgtatgggatccgttcgaaggattcttgacgcccgggttgacaaacgcacctgccaaggacgtggcagcgttcacaaacgctaaagtggactggagggagacacctgaagcgcatgtgttcaaggcggacgtgcctgggcttaagaaggaagaggtgaaggtggaggttgaagatggtaacatacttcagataagcggtgagaggagcagtgagaatgaagagaagagtgacacatggcaccgtgtggagcggtcaagtgggaagttcatgaggaggtttcggttgccagagaatgcaaaggtggaggaagtaaaggcgagtatggagaatggggtgttgtcggttacggtgccgaaagttcaggagagtaagccggaggtcaagtccgttgatatctctggttaagaggaactctgaagttggaaagcttaagacagtaatatgtgatagtgtgaaataaatggtgcgactttcctttcttctttttcttgtaatcaccaatctcgttgtatcaatataagtaatcgtaataaaagagtgttttgat

SEQ ID NO: 84769 - protein, 175 aa, Arabidopsis thaliana
  peptide (1)..(175): Ceres Seq. ID no. 12676938
  misc_feature (20)..(175): Homolog of NCBI NO: 15231372 NR Description: heat shock protein 17; protein id: At3g46230.1, by cDNA: gi_15294149 [Arabidopsis thaliana]
  misc_feature (20)..(175): Homolog of NCBI NO: 81639 NR Description: heat shock protein 17 - Arabidopsis thaliana
  misc_feature (20)..(175): Homolog of NCBI NO: 15294150 NR Description: AT3g46230/F12M12_200 [Arabidopsis thaliana]
  misc_feature (3)..(175): Homolog of NCBI NO: 8671873 NR Description: Contains similarity to 17.6 KD class I heat shock from Arabidopsis thaliana gi|P13853 and contains Hsp20/alpha PF|00011 and signal peptidase I PF|00461 domains. ESTs
  misc_feature (20)..(175): Homolog of NCBI NO: 7441319 NR Description: heat-shock protein 17.6, low molecular weight -
  misc_feature (20)..(175): Homolog of NCBI NO: 15220832 NR Description: 17.6 kDa heat shock protein (AA 1-156); protein At1g53540.1 [Arabidopsis thaliana]
  misc_feature (20)..(175): Homolog of NCBI NO: 8250119 NR Description: HSP17.7-a protein [Brassica oleracea]
  misc_feature (20)..(175): Homolog of NCBI NO: 21618106 NR Description: heat shock protein 18 [Arabidopsis thaliana]
  misc_feature (20)..(175): Homolog of NCBI NO: 15238509 NR Description: heat shock protein 18; protein id: At5g59720.1, by cDNA: 97197. [Arabidopsis thaliana]
  misc_feature (20)..(175): Homolog of NCBI NO: 7441323 NR Description: heat shock protein 18p - common tobacco
FEESSSKTKQNRANRVSETMSLVPSFFGGRRTNVFDPFSLDVWDPFEGFLTPGLTNAPAKDVAAFTNAKVDWRETPEAHVFKADVPGLKKEEVKVEVEDGNILQISGERSSENEEKSDTWHRVERSSGKFMRRFRLPENAKVEEVKASMENGVLSVTVPKVQESKPEVKSVDISG

SEQ ID NO: 84770 - protein, 156 aa, Arabidopsis thaliana; identical to SEQ ID NO: 74103
  peptide (1)..(156): Ceres Seq. ID no. 12676939
  misc_feature (1)..(156): Homolog of NCBI NO: 15231372 NR Description: heat shock protein 17; protein id: At3g46230.1, by cDNA: gi_15294149 [Arabidopsis thaliana]
  misc_feature (1)..(156): Homolog of NCBI NO: 81639 NR Description: heat shock protein 17 - Arabidopsis thaliana
  misc_feature (1)..(156): Homolog of NCBI NO: 15294150 NR Description: AT3g46230/F12M12_200 [Arabidopsis thaliana]
  misc_feature (1)..(156): Homolog of NCBI NO: 8671873 NR Description: Contains similarity to 17.6 KD class I heat shock from Arabidopsis thaliana gi|P13853 and contains Hsp20/alpha PF|00011 and signal peptidase I PF|00461 domains. ESTs
  misc_feature (1)..(156): Homolog of NCBI NO: 7441319 NR Description: heat-shock protein 17.6, low molecular weight -
  misc_feature (1)..(156): Homolog of NCBI NO: 15220832 NR Description: 17.6 kDa heat shock protein (AA 1-156); protein At1g53540.1 [Arabidopsis thaliana]
  misc_feature (1)..(156): Homolog of NCBI NO: 8250119 NR Description: HSP17.7-a protein [Brassica oleracea]
  misc_feature (1)..(156): Homolog of NCBI NO: 21618106 NR Description: heat shock protein 18 [Arabidopsis thaliana]
  misc_feature (1)..(156): Homolog of NCBI NO: 15238509 NR Description: heat shock protein 18; protein id: At5g59720.1, by cDNA: 97197. [Arabidopsis thaliana]
  misc_feature (1)..(156): Homolog of NCBI NO: 7441323 NR Description: heat shock protein 18p - common tobacco

SEQ ID NO: 84771 - DNA, 748 bp, Arabidopsis thaliana
  misc_feature (1)..(748): Ceres Seq. ID no. 12676957
  misc_feature: MA Experiment ID: 108434 Result: Up-regulated in Transcription
  misc_feature: MA Experiment 108434 PARAMETER Experiment Name: At_Root_Tips_cDNA_P Parameter: Tissue Value: Root Tips
  misc_feature: MA Experiment ID: 108462 Result: Down-regulated in Transcription
  misc_feature: MA Experiment 108462 PARAMETER Experiment Name: At_Germinating_Seeds_cDNA_P Parameter: Age (day) Value: 2 vs. 0
  misc_feature: MA Experiment 108462 PARAMETER Experiment Name: At_Germinating_Seeds_cDNA_P Parameter: Tissue Value: Germinating Seeds
  misc_feature: MA Experiment ID: 108463 Result: Down-regulated in Transcription
  misc_feature: MA Experiment 108463 PARAMETER Experiment Name: At_Germinating_Seeds_cDNA_P Parameter: Age (day) Value: 3 vs. 0
  misc_feature: MA Experiment 108463 PARAMETER Experiment Name: At_Germinating_Seeds_cDNA_P Parameter: Tissue Value: Germinating Seeds
  misc_feature: MA Experiment ID: 108464 Result: Down-regulated in Transcription
  misc_feature: MA Experiment 108464 PARAMETER Experiment Name: At_Germinating_Seeds_cDNA_P Parameter: Age (day) Value: 4 vs. 0
  misc_feature: MA Experiment 108464 PARAMETER Experiment Name: At_Germinating_Seeds_cDNA_P Parameter: Tissue Value: Germinating Seeds
  misc_feature: MA Experiment ID: 108561 Result: Down-regulated in Transcription
  misc_feature: MA Experiment 108561 PARAMETER Experiment Name: At_100uM_ABA_cDNA_P Parameter: Timepoint (hr) Value: 6
  misc_feature: MA Experiment 108561 PARAMETER Experiment Name: At_100uM_ABA_cDNA_P Parameter: Tissue Value: Aerial
  misc_feature: MA Experiment 108561 PARAMETER Experiment Name: At_100uM_ABA_cDNA_P Parameter: Treatment Value: 100uM ABA vs. No Treatment
  misc_feature: MA Experiment ID: 108573 Result: Down-regulated in Transcription
  misc_feature: MA Experiment 108573 PARAMETER Experiment Name: At_Drought_cDNA_P Parameter: Timepoint (hr) Value: 6
  misc_feature: MA Experiment 108573 PARAMETER Experiment Name: At_Drought_cDNA_P Parameter: Tissue Value: Aerial
  misc_feature: MA Experiment 108573 PARAMETER Experiment Name: At_Drought_cDNA_P Parameter: Treatment Value: Drought vs. No Drought
  misc_feature: MA Experiment ID: 108576 Result: Down-regulated in Transcription
  misc_feature: MA Experiment 108576 PARAMETER Experiment Name: At_42deg_Heat_cDNA_P Parameter: Temperature (deg C) Value: 42 vs. 22
  misc_feature: MA Experiment 108576 PARAMETER Experiment Name: At_42deg_Heat_cDNA_P Parameter: Timepoint (hr) Value: 1
  misc_feature: MA Experiment 108576 PARAMETER Experiment Name: At_42deg_Heat_cDNA_P Parameter: Tissue Value: Aerial
  misc_feature: MA Experiment ID: 108577 Result: Down-regulated in Transcription
  misc_feature: MA Experiment 108577 PARAMETER Experiment Name: At_42deg_Heat_cDNA_P Parameter: Temperature (deg C) Value: 42 vs. 22
  misc_feature: MA Experiment 108577 PARAMETER Experiment Name: At_42deg_Heat_cDNA_P Parameter: Timepoint (hr) Value: 6
  misc_feature: MA Experiment 108577 PARAMETER Experiment Name: At_42deg_Heat_cDNA_P Parameter: Tissue Value: Aerial
  misc_feature: MA Experiment ID: 108579 Result: Up-regulated in Transcription
  misc_feature: MA Experiment 108579 PARAMETER Experiment Name: At_4deg_Cold_cDNA_P Parameter: Temperature (deg C) Value: 4 vs. 22
  misc_feature: MA Experiment 108579 PARAMETER Experiment Name: At_4deg_Cold_cDNA_P Parameter: Timepoint (hr) Value: 6
  misc_feature: MA Experiment 108579 PARAMETER Experiment Name: At_4deg_Cold_cDNA_P Parameter: Tissue Value: Aerial
  misc_feature: MA Experiment ID: 108585 Result: Down-regulated in Transcription
  misc_feature: MA Experiment 108585 PARAMETER Experiment Name: At_5mM_NaNP_cDNA_P Parameter: Timepoint (hr) Value: 6
  misc_feature: MA Experiment 108585 PARAMETER Experiment Name: At_5mM_NaNP_cDNA_P Parameter: Tissue Value: Aerial
  misc_feature: MA Experiment 108585 PARAMETER Experiment Name: At_5mM_NaNP_cDNA_P Parameter: Treatment Value: null
  misc_feature: MA Experiment ID: 108595 Result: Down-regulated in Transcription
  misc_feature: MA Experiment 108595 PARAMETER Experiment Name: At_Ler-pi_Ovule_cDNA_P Parameter: Plant Line Value: null
  misc_feature: MA Experiment ID: 108609 Result: Down-regulated in Transcription
  misc_feature: MA Experiment 108609 PARAMETER Experiment Name: At_100uM_ABA_cDNA_P Parameter: Timepoint (hr) Value: 24
  misc_feature: MA Experiment 108609 PARAMETER Experiment Name: At_100uM_ABA_cDNA_P Parameter: Tissue Value: Aerial
  misc_feature: MA Experiment 108609 PARAMETER Experiment Name: At_100uM_ABA_cDNA_P Parameter: Treatment Value: 100uM ABA vs. No Treatment
  misc_feature: MA Experiment ID: 20000069 Result: Down-regulated in Transcription
  misc_feature: MA Experiment 20000069 PARAMETER Experiment Name: At_100uM_ABA_Mutants_cDNA_P Parameter: Plant Line Value: CS23
  misc_feature: MA Experiment 20000069 PARAMETER Experiment Name: At_100uM_ABA_Mutants_cDNA_P Parameter: Timepoint (hr) Value: 6
  misc_feature: MA Experiment 20000069 PARAMETER Experiment Name: At_100uM_ABA_Mutants_cDNA_P Parameter: Tissue Value: Aerial
  misc_feature: MA Experiment 20000069 PARAMETER Experiment Name: At_100uM_ABA_Mutants_cDNA_P Parameter: Treatment Value: 100uM ABA vs. No Treatment
  misc_feature: MA Experiment ID: 20000070 Result: Down-regulated in Transcription
  misc_feature: MA Experiment 20000070 PARAMETER Experiment Name: At_100uM_ABA_Mutants_cDNA_P Parameter: Plant Line Value: CS24
  misc_feature: MA Experiment 20000070 PARAMETER Experiment Name: At_100uM_ABA_Mutants_cDNA_P Parameter: Timepoint (hr) Value: 6
  misc_feature: MA Experiment 20000070 PARAMETER Experiment Name: At_100uM_ABA_Mutants_cDNA_P Parameter: Tissue Value: Aerial
  misc_feature: MA Experiment 20000070 PARAMETER Experiment Name: At_100uM_ABA_Mutants_cDNA_P Parameter: Treatment Value: 100uM ABA vs. No Treatment
  misc_feature: MA Experiment ID: 20000071 Result: Down-regulated in Transcription
  misc_feature: MA Experiment 20000071 PARAMETER Experiment Name: At_100uM_ABA_Mutants_cDNA_P Parameter: Plant Line Value: CS8104
  misc_feature: MA Experiment 20000071 PARAMETER Experiment Name: At_100uM_ABA_Mutants_cDNA_P Parameter: Timepoint (hr) Value: 6
  misc_feature: MA Experiment 20000071 PARAMETER Experiment Name: At_100uM_ABA_Mutants_cDNA_P Parameter: Tissue Value: Aerial
  misc_feature: MA Experiment 20000071 PARAMETER Experiment Name: At_100uM_ABA_Mutants_cDNA_P Parameter: Treatment Value: 100uM ABA vs. No Treatment
  misc_feature: MA Experiment ID: 20000087 Result: Down-regulated in Transcription
  misc_feature: MA Experiment 20000087 PARAMETER Experiment Name: At_100uM_ABA_Mutants_cDNA_P Parameter: Plant Line Value: WS
  misc_feature: MA Experiment 20000087 PARAMETER Experiment Name: At_100uM_ABA_Mutants_cDNA_P Parameter: Timepoint (hr) Value: 6
  misc_feature: MA Experiment 20000087 PARAMETER Experiment Name: At_100uM_ABA_Mutants_cDNA_P Parameter: Tissue Value: Aerial
  misc_feature: MA Experiment 20000087 PARAMETER Experiment Name: At_100uM_ABA_Mutants_cDNA_P Parameter: Treatment Value: 100uM ABA vs. No Treatment
  misc_feature: MA Experiment ID: 20000090 Result: Up-regulated in Transcription
  misc_feature: MA Experiment ID: 20000112 Result: Down-regulated in Transcription
  misc_feature: MA Experiment 20000112 PARAMETER Experiment Name: At_42deg_Heat_cDNA_P Parameter: Temperature (deg C) Value: 42 vs. 22
  misc_feature: MA Experiment 20000112 PARAMETER Experiment Name: At_42deg_Heat_cDNA_P Parameter: Timepoint (hr) Value: 2
  misc_feature: MA Experiment 20000112 PARAMETER Experiment Name: At_42deg_Heat_cDNA_P Parameter: Tissue Value: Aerial
  misc_feature: MA Experiment ID: 20000113 Result: Down-regulated in Transcription
  misc_feature: MA Experiment 20000113 PARAMETER Experiment Name: At_42deg_Heat_cDNA_P Parameter: Temperature (deg C) Value: 42 vs. 22
  misc_feature: MA Experiment 20000113 PARAMETER Experiment Name: At_42deg_Heat_cDNA_P Parameter: Timepoint (hr) Value: 8
  misc_feature: MA Experiment 20000113 PARAMETER Experiment Name: At_42deg_Heat_cDNA_P Parameter: Tissue Value: Aerial
  misc_feature: MA Experiment ID: 20000117 Result: Down-regulated in Transcription
  misc_feature: MA Experiment 20000117 PARAMETER Experiment Name: At_100uM_ABA_Mutants_cDNA_P Parameter: Plant Line Value: Columbia
  misc_feature: MA Experiment 20000117 PARAMETER Experiment Name: At_100uM_ABA_Mutants_cDNA_P Parameter: Timepoint (hr) Value: 6
  misc_feature: MA Experiment 20000117 PARAMETER Experiment Name: At_100uM_ABA_Mutants_cDNA_P Parameter: Tissue Value: Aerial
  misc_feature: MA Experiment 20000117 PARAMETER Experiment Name: At_100uM_ABA_Mutants_cDNA_P Parameter: Treatment Value: 100uM ABA vs. No Treatment
  misc_feature: MA Experiment ID: 20000144 Result: Down-regulated in Transcription
  misc_feature: MA Experiment 20000144 PARAMETER Experiment Name: At_42deg_Heat_cDNA_P Parameter: Temperature (deg C) Value: 42 vs. 22
  misc_feature: MA Experiment 20000144 PARAMETER Experiment Name: At_42deg_Heat_cDNA_P Parameter: Timepoint (hr) Value: 1
  misc_feature: MA Experiment 20000144 PARAMETER Experiment Name: At_42deg_Heat_cDNA_P Parameter: Tissue Value: Aerial
  misc_feature: MA Experiment ID: 20001560 Result: Up-regulated in Transcription
  misc_feature: MA Experiment 20001560 PARAMETER Experiment Name: At_Drought_Soil_Dry_P Parameter: Age (day) Value: 28
  misc_feature: MA Experiment 20001560 PARAMETER Experiment Name: At_Drought_Soil_Dry_P Parameter: Organism Value: A. thaliana
  misc_feature: MA Experiment 20001560 PARAMETER Experiment Name: At_Drought_Soil_Dry_P Parameter: Plant Line Value: WS
  misc_feature: MA Experiment 20001560 PARAMETER Experiment Name: At_Drought_Soil_Dry_P Parameter: Post Timepoint (hr) Value: None
  misc_feature: MA Experiment 20001560 PARAMETER Experiment Name: At_Drought_Soil_Dry_P Parameter: Post-Treatment Value: None
  misc_feature: MA Experiment 20001560 PARAMETER Experiment Name: At_Drought_Soil_Dry_P Parameter: Timepoint (day) Value: 14
  misc_feature: MA Experiment 20001560 PARAMETER Experiment Name: At_Drought_Soil_Dry_P Parameter: Treatment Value: Drought vs. No Drought
aacaattcgacctcaattgaaattagggtttctctgcaactccacaaacagactcttaacaaaacttcgattcccaatttcaacaatggcttgcgtaaacgaaccatcacctaaactccaaaagctcgaccgaaacggaatccatggcgattcatcaccatcaccattcttcaaagtgaagaaactctccgagaaagctgttataccaacacgcggctcaccactctccgctggatacgatctctcaagtgcggtggattcaaaagttccagcgagaggtaaagcgcttatcccaacggatctaagtatcgctgttcccgaaggaacttacgcgagaattgcgccgagatctggtttggcttggaaacattcgattgatgttggtgctggtgtgattgatgctgattatagaggacctgttggtgtgattttgtttaatcattctgatgctgattttgaggttaagttcggtgatcgaatcgcgcagttgattatcgagaagattgtgactcctgatgttgttgaggttgatgatttggatgagactgttcgtggtgatggtggttttggttctactggtgtctaagtgataatcatcttcttcgtttatgaatgtgttttggtttttaatttcgtcgaacagtttgtgggcattattattgtactatctctttgcttcatctttagactattcaaacaaactctcactgttttttttctttgttgggctacaaaatgaatcaattac

SEQ ID NO: 84772 - protein, 194 aa, Arabidopsis thaliana
  peptide (1)..(194): Ceres Seq. ID no. 12676958
  misc_feature (64)..(193): Pfam Name: dUTPase Pfam Description: dUTPase
  misc_feature (29)..(194): Homolog of NCBI NO: 15232681 NR Description: dUTP pyrophosphatase-like protein; protein id: supported by cDNA: gi_13878142, supported by cDNA: gi_17104548 thaliana] >gi|7435915|pir||T12954 dUTP pyrophosphatase
  misc_feature (32)..(194): Homolog of NCBI NO: 416922 NR Description: Deoxyuridine 5'-triphosphate nucleotidohydrolase (dUTP pyrophosphatase) (P18) >gi|282947|pir||JQ1599 dUTP
  misc_feature (48)..(194): Homolog of NCBI NO: 31126720 NR Description: putative deoxyuridine triphosphatase [Oryza
  misc_feature (50)..(194): Homolog of NCBI NO: 38566986 NR Description: probable dUTP pyrophosphatase [Neurospora crassa]
  misc_feature (57)..(194): Homolog of NCBI NO: 19114785 NR Description: deoxyuridine 5'-triphosphate nucleotidohydrolase
  misc_feature (51)..(193): Homolog of NCBI NO: 40746988 NR Description: hypothetical protein AN0271.2 [Aspergillus
  misc_feature (61)..(194): Homolog of NCBI NO: 19921126 NR Description: CG4584-PA [Drosophila melanogaster]
  misc_feature (61)..(194): Homolog of NCBI NO: 24583610 NR Description: CG4584-PB [Drosophila melanogaster]
  misc_feature (61)..(194): Homolog of NCBI NO: 38047903 NR Description: similar to Drosophila melanogaster BcDNA:LD08534
  misc_feature (58)..(193): Homolog of NCBI NO: 1169437 NR Description: Deoxyuridine 5'-triphosphate nucleotidohydrolase (dUTP pyrophosphatase) >gi|2118161|pir||S51498 dUTP diphosphatase
TIRPQLKLGFLCNSTNRLLTKLRFPISTMACVNEPSPKLQKLDRNGIHGDSSPSPFFKVKKLSEKAVIPTRGSPLSAGYDLSSAVDSKVPARGKALIPTDLSIAVPEGTYARIAPRSGLAWKHSIDVGAGVIDADYRGPVGVILFNHSDADFEVKFGDRIAQLIIEKIVTPDVVEVDDLDETVRGDGGFGSTGV

SEQ ID NO: 84773 - protein, 166 aa, Arabidopsis thaliana; identical to SEQ ID NO: 30604
  peptide (1)..(166): Ceres Seq. ID no. 12676959
  misc_feature (36)..(165): Pfam Name: dUTPase Pfam Description: dUTPase
  misc_feature (1)..(166): Homolog of NCBI NO: 15232681 NR Description: dUTP pyrophosphatase-like protein; protein id: supported by cDNA: gi_13878142, supported by cDNA: gi_17104548 thaliana] >gi|7435915|pir||T12954 dUTP pyrophosphatase
  misc_feature (4)..(166): Homolog of NCBI NO: 416922 NR Description: Deoxyuridine 5'-triphosphate nucleotidohydrolase (dUTP pyrophosphatase) (P18) >gi|282947|pir||JQ1599 dUTP
  misc_feature (20)..(166): Homolog of NCBI NO: 31126720 NR Description: putative deoxyuridine triphosphatase [Oryza
  misc_feature (22)..(166): Homolog of NCBI NO: 38566986 NR Description: probable dUTP pyrophosphatase [Neurospora crassa]
  misc_feature (29)..(166): Homolog of NCBI NO: 19114785 NR Description: deoxyuridine 5'-triphosphate nucleotidohydrolase
  misc_feature (23)..(165): Homolog of NCBI NO: 40746988 NR Description: hypothetical protein AN0271.2 [Aspergillus
  misc_feature (33)..(166): Homolog of NCBI NO: 19921126 NR Description: CG4584-PA [Drosophila melanogaster]
  misc_feature (33)..(166): Homolog of NCBI NO: 24583610 NR Description: CG4584-PB [Drosophila melanogaster]
  misc_feature (33)..(166): Homolog of NCBI NO: 38047903 NR Description: similar to Drosophila melanogaster BcDNA:LD08534
  misc_feature (30)..(165): Homolog of NCBI NO: 1169437 NR Description: Deoxyuridine 5'-triphosphate nucleotidohydrolase (dUTP pyrophosphatase) >gi|2118161|pir||S51498 dUTP diphosphatase

SEQ ID NO: 84774 - DNA, 1576 bp, Arabidopsis thaliana
  misc_feature (1)..(1576): Ceres Seq. ID no. 12676960
  misc_feature: MA Experiment ID: 108569 Result: Up-regulated in Transcription
  misc_feature: MA Experiment 108569 PARAMETER Experiment Name: At_0.001%_MeJA__cDNA_P Parameter: Timepoint (hr) Value: 6
  misc_feature: MA Experiment 108569 PARAMETER Experiment Name: At_0.001%_MeJA__cDNA_P Parameter: Tissue Value: Aerial
  misc_feature: MA Experiment 108569 PARAMETER Experiment Name: At_0.001%_MeJA__cDNA_P Parameter: Treatment Value: 0.001% MeJA vs. No Treatment
  misc_feature: MA Experiment ID: 108573 Result: Up-regulated in Transcription
  misc_feature: MA Experiment 108573 PARAMETER Experiment Name: At_Drought_cDNA_P Parameter: Timepoint (hr) Value: 6
  misc_feature: MA Experiment 108573 PARAMETER Experiment Name: At_Drought_cDNA_P Parameter: Tissue Value: Aerial
  misc_feature: MA Experiment 108573 PARAMETER Experiment Name: At_Drought_cDNA_P Parameter: Treatment Value: Drought vs. No Drought
  misc_feature: MA Experiment ID: 108595 Result: Down-regulated in Transcription
  misc_feature: MA Experiment 108595 PARAMETER Experiment Name: At_Ler-pi_Ovule_cDNA_P Parameter: Plant Line Value: null
  misc_feature: MA Experiment ID: 20000111 Result: Down-regulated in Transcription
  misc_feature: MA Experiment 20000111 PARAMETER Experiment Name: At_42deg_Heat_cDNA_P Parameter: Temperature (deg C) Value: 42 vs. 22
  misc_feature: MA Experiment 20000111 PARAMETER Experiment Name: At_42deg_Heat_cDNA_P Parameter: Timepoint (hr) Value: 6
  misc_feature: MA Experiment 20000111 PARAMETER Experiment Name: At_42deg_Heat_cDNA_P Parameter: Tissue Value: Aerial
  misc_feature: MA Experiment ID: 20000113 Result: Down-regulated in Transcription
  misc_feature: MA Experiment 20000113 PARAMETER Experiment Name: At_42deg_Heat_cDNA_P Parameter: Temperature (deg C) Value: 42 vs. 22
  misc_feature: MA Experiment 20000113 PARAMETER Experiment Name: At_42deg_Heat_cDNA_P Parameter: Timepoint (hr) Value: 8
  misc_feature: MA Experiment 20000113 PARAMETER Experiment Name: At_42deg_Heat_cDNA_P Parameter: Tissue Value: Aerial
  misc_feature: MA Experiment ID: 20000144 Result: Down-regulated in Transcription
  misc_feature: MA Experiment 20000144 PARAMETER Experiment Name: At_42deg_Heat_cDNA_P Parameter: Temperature (deg C) Value: 42 vs. 22
  misc_feature: MA Experiment 20000144 PARAMETER Experiment Name: At_42deg_Heat_cDNA_P Parameter: Timepoint (hr) Value: 1
  misc_feature: MA Experiment 20000144 PARAMETER Experiment Name: At_42deg_Heat_cDNA_P Parameter: Tissue Value: Aerial
  misc_feature: MA Experiment ID: 20000171 Result: Down-regulated in Transcription
  misc_feature: MA Experiment 20000171 PARAMETER Experiment Name: At_42deg_Heat_P Parameter: Age (day) Value: 14
  misc_feature: MA Experiment 20000171 PARAMETER Experiment Name: At_42deg_Heat_P Parameter: Organism Value: A. thaliana
  misc_feature: MA Experiment 20000171 PARAMETER Experiment Name: At_42deg_Heat_P Parameter: Plant Line Value: WS
  misc_feature: MA Experiment 20000171 PARAMETER Experiment Name: At_42deg_Heat_P Parameter: Temperature (deg C) Value: 42 vs. 22
  misc_feature: MA Experiment 20000171 PARAMETER Experiment Name: At_42deg_Heat_P Parameter: Timepoint (hr) Value: 1
  misc_feature: MA Experiment 20000171 PARAMETER Experiment Name: At_42deg_Heat_P Parameter: Tissue Value: Aerial
  misc_feature: MA Experiment ID: 20000173 Result: Down-regulated in Transcription
  misc_feature: MA Experiment 20000173 PARAMETER Experiment Name: At_42deg_Heat_P Parameter: Age (day) Value: 14
  misc_feature: MA Experiment 20000173 PARAMETER Experiment Name: At_42deg_Heat_P Parameter: Organism Value: A. thaliana
  misc_feature: MA Experiment 20000173 PARAMETER Experiment Name: At_42deg_Heat_P Parameter: Plant Line Value: WS
  misc_feature: MA Experiment 20000173 PARAMETER Experiment Name: At_42deg_Heat_P Parameter: Temperature (deg C) Value: 42 vs. 22
  misc_feature: MA Experiment 20000173 PARAMETER Experiment Name: At_42deg_Heat_P Parameter: Timepoint (hr) Value: 6
  misc_feature: MA Experiment 20000173 PARAMETER Experiment Name: At_42deg_Heat_P Parameter: Tissue Value: Aerial
  misc_feature: MA Experiment ID: 20000437 Result: Down-regulated in Transcription
  misc_feature: MA Experiment 20000437 PARAMETER Experiment Name: At_Drought_P Parameter: Age (day) Value: 8
  misc_feature: MA Experiment 20000437 PARAMETER Experiment Name: At_Drought_P Parameter: Organism Value: A. thaliana
  misc_feature: MA Experiment 20000437 PARAMETER Experiment Name: At_Drought_P Parameter: Plant Line Value: WS
  misc_feature: MA Experiment 20000437 PARAMETER Experiment Name: At_Drought_P Parameter: Timepoint (hr) Value: 24
  misc_feature: MA Experiment 20000437 PARAMETER Experiment Name: At_Drought_P Parameter: Tissue Value: Whole Plant
  misc_feature: MA Experiment 20000437 PARAMETER Experiment Name: At_Drought_P Parameter: Treatment Value: Drought vs. No Drought
  misc_feature: MA Experiment ID: 20001555 Result: Down-regulated in Transcription
  misc_feature: MA Experiment 20001555 PARAMETER Experiment Name: At_Drought_Soil_Dry_P Parameter: Age (day) Value: 24
  misc_feature: MA Experiment 20001555 PARAMETER Experiment Name: At_Drought_Soil_Dry_P Parameter: Organism Value: A. thaliana
  misc_feature: MA Experiment 20001555 PARAMETER Experiment Name: At_Drought_Soil_Dry_P Parameter: Plant Line Value: WS
  misc_feature: MA Experiment 20001555 PARAMETER Experiment Name: At_Drought_Soil_Dry_P Parameter: Post Timepoint (hr) Value: None
  misc_feature: MA Experiment 20001555 PARAMETER Experiment Name: At_Drought_Soil_Dry_P Parameter: Post-Treatment Value: None
  misc_feature: MA Experiment 20001555 PARAMETER Experiment Name: At_Drought_Soil_Dry_P Parameter: Timepoint (day) Value: 10
  misc_feature: MA Experiment 20001555 PARAMETER Experiment Name: At_Drought_Soil_Dry_P Parameter: Treatment Value: Drought vs. No Drought
  misc_feature: MA Experiment ID: 20001556 Result: Down-regulated in Transcription
  misc_feature: MA Experiment 20001556 PARAMETER Experiment Name: At_Drought_Soil_Dry_P Parameter: Age (day) Value: 26
  misc_feature: MA Experiment 20001556 PARAMETER Experiment Name: At_Drought_Soil_Dry_P Parameter: Organism Value: A. thaliana
  misc_feature: MA Experiment 20001556 PARAMETER Experiment Name: At_Drought_Soil_Dry_P Parameter: Plant Line Value: WS
  misc_feature: MA Experiment 20001556 PARAMETER Experiment Name: At_Drought_Soil_Dry_P Parameter: Post Timepoint (hr) Value: None
  misc_feature: MA Experiment 20001556 PARAMETER Experiment Name: At_Drought_Soil_Dry_P Parameter: Post-Treatment Value: None
  misc_feature: MA Experiment 20001556 PARAMETER Experiment Name: At_Drought_Soil_Dry_P Parameter: Timepoint (day) Value: 12
  misc_feature: MA Experiment 20001556 PARAMETER Experiment Name: At_Drought_Soil_Dry_P Parameter: Treatment Value: Drought vs. No Drought
  misc_feature: MA Experiment ID: 20001905 Result: Down-regulated in Transcription
  misc_feature: MA Experiment 20001905 PARAMETER Experiment Name: At_Drought_Reproduction_P Parameter: Age (day) Value: 40
  misc_feature: MA Experiment 20001905 PARAMETER Experiment Name: At_Drought_Reproduction_P Parameter: Organism Value: A. thaliana
  misc_feature: MA Experiment 20001905 PARAMETER Experiment Name: At_Drought_Reproduction_P Parameter: Plant Line Value: WS
  misc_feature: MA Experiment 20001905 PARAMETER Experiment Name: At_Drought_Reproduction_P Parameter: Timepoint (day) Value: 10
  misc_feature: MA Experiment 20001905 PARAMETER Experiment Name: At_Drought_Reproduction_P Parameter: Tissue Value: Rosettes
  misc_feature: MA Experiment 20001905 PARAMETER Experiment Name: At_Drought_Reproduction_P Parameter: Treatment Value: Drought vs. No Drought
tttatctaaaacgaaaaaaaagaaaagaagagaagcttttttagttctctctgcccaatggagaaaagaagaaccagagattgccaaatcatcttctgcaaaagcacccatcaaagaaattacttgtaaatagaaaacaaatcatcaaatctggaagacaaatcattaaaaaaggcgacaactttttttggttcagattttgaaaatttgattttttatttttcttatcttggcgatcgaatcctatccgaaagattgaaacttgggaggtgggtaagtgagtgaatggcgcaacaagggcagggaagcatggaccctgctgttctcgacgacatcattcgtcgtttacttgattaccgaaaccctaaagctgggaccaaacaagctatgctcaacgattctgagatccgacagctttgctttgtctctagagagatatttcttcaacagccttgtcttcttgagctcgctgcccctgttaagatctgcggtgatattcatggtcaatactcagatttattgaggcttttcgagtatggaggtttccctcctgcagcaaactacttattcttaggagattacgttgaccgcggaaagcagagtttggagactatttgtcttctgcttgcttacaagatcaaataccctgaaaacttttttctcttaagaggaaaccatgagtgtgcatctattaacagaatttacggattctatgacgaatgtaaacgaagattcaacgtgaagctctggaaagtgtttaccgatacttttaactgtctccctgtggctgctgtcatagatgaaaagatactttgtatgcatggtggactatctcctgagttgatcaatgtggaacaaattaagaacatagagcgtccaactgatgttccagacgctggtttgctctgtgaccttctttggtctgatcctagtaaagatgtcaaaggctgggggatgaatgatcgtggtgtctcctacacttttggtgctgacaaagttgctgagtttttaataaagaatgatatggatttagtctgtcgtgcccaccaggttgtagaggatgggtatgagttctttgctgatagacagcttgtgactatgttttctgctccaaactactgtggtgaatttgacaatgcgggtgcattgatgagtgtcgacgaaagtttaatgtgctctttccaaattcttaagcctgtggatcggaggtcgcggttcttttgaagagaaagagtccttcttaagttataaccctgattcaaatcttatgggaagaatgggaggagaaaaagcgacgacggatgttggtggcggataattctgaacctccacgagtagtctccgaagttgcaaaagcaacaatatatatatttacatggttatatcatctctgccacttcttttgaatatgatcttgtttcttcaactcaattttttgctctgtttccttctctgttctttcacatgtcagagatacaaatcctctaagtgtatataatactttatatgtatgtatcagaacctcactgcaggatgcttcagttcatgattcttattaaaacagagggttctctag

SEQ ID NO: 84775 - protein, 312 aa, Arabidopsis thaliana; identical to SEQ ID NO: 22169
  peptide (1)..(312): Ceres Seq. ID no. 12676961
  misc_feature (63)..(258): Pfam Name: Calcineurin-like phosphoesterase Pfam Description: Calcineurin-like phosphoesterase
  misc_feature (1)..(312): Homolog of NCBI NO: 15232651 NR Description: phosphoprotein phosphatase 1, PP1; protein id: supported by cDNA: 32787., supported by cDNA: gi_166802 thaliana] >gi|1346759|sp|P48485|PP15_ARATH Serine/threonine
  misc_feature (9)..(312): Homolog of NCBI NO: 21592807 NR Description: phosphoprotein phosphatase [Arabidopsis thaliana]
  misc_feature (1)..(311): Homolog of NCBI NO: 15237829 NR Description: protein phosphatase 1A; protein id: At5g59160.1, by cDNA: gi_166796 [Arabidopsis thaliana] Serine/threonine protein phosphatase PP1 isozyme 2
  misc_feature (1)..(311): Homolog of NCBI NO: 99751 NR Description: phosphoprotein phosphatase (EC 3.1.3.16) 1A
  misc_feature (1)..(311): Homolog of NCBI NO: 5917726 NR Description: serine/threonine protein phosphatase 1; PP1
  misc_feature (3)..(311): Homolog of NCBI NO: 11133831 NR Description: Serine/threonine protein phosphatase PP1 isozyme 1
  misc_feature (1)..(311): Homolog of NCBI NO: 11133833 NR Description: Serine/threonine protein phosphatase PP1 isozyme 2
  misc_feature (3)..(311): Homolog of NCBI NO: 15227080 NR Description: phosphoprotein phosphatase-type 1 catalytic protein id: At2g29400.1, supported by cDNA: gi_166571, supported cDNA: gi_19424067 [Arabidopsis thaliana]
  misc_feature (7)..(311): Homolog of NCBI NO: 1346764 NR Description: SERINE/THREONINE PROTEIN PHOSPHATASE PP1
  misc_feature (9)..(310): Homolog of NCBI NO: 7435129 NR Description: phosphoprotein phosphatase (EC 3.1.3.16),

SEQ ID NO: 84776 - protein, 304 aa, Arabidopsis thaliana; identical to SEQ ID NO: 22170
  peptide (1)..(304): Ceres Seq. ID no. 12676962
  misc_feature (55)..(250): Pfam Name: Calcineurin-like phosphoesterase Pfam Description: Calcineurin-like phosphoesterase
  misc_feature (1)..(304): Homolog of NCBI NO: 15232651 NR Description: phosphoprotein phosphatase 1, PP1; protein id: supported by cDNA: 32787., supported by cDNA: gi_166802 thaliana] >gi|1346759|sp|P48485|PP15_ARATH Serine/threonine
  misc_feature (1)..(304): Homolog of NCBI NO: 21592807 NR Description: phosphoprotein phosphatase [Arabidopsis thaliana]
  misc_feature (1)..(303): Homolog of NCBI NO: 15237829 NR Description: protein phosphatase 1A; protein id: At5g59160.1, by cDNA: gi_166796 [Arabidopsis thaliana] Serine/threonine protein phosphatase PP1 isozyme 2
  misc_feature (1)..(303): Homolog of NCBI NO: 99751 NR Description: phosphoprotein phosphatase (EC 3.1.3.16) 1A
  misc_feature (1)..(303): Homolog of NCBI NO: 5917726 NR Description: serine/threonine protein phosphatase 1; PP1
  misc_feature (1)..(303): Homolog of NCBI NO: 11133831 NR Description: Serine/threonine protein phosphatase PP1 isozyme 1
  misc_feature (1)..(303): Homolog of NCBI NO: 11133833 NR Description: Serine/threonine protein phosphatase PP1 isozyme 2
  misc_feature (1)..(303): Homolog of NCBI NO: 15227080 NR Description: phosphoprotein phosphatase-type 1 catalytic protein id: At2g29400.1, supported by cDNA: gi_166571, supported cDNA: gi_19424067 [Arabidopsis thaliana]
  misc_feature (1)..(303): Homolog of NCBI NO: 1346764 NR Description: SERINE/THREONINE PROTEIN PHOSPHATASE PP1
  misc_feature (1)..(302): Homolog of NCBI NO: 7435129 NR Description: phosphoprotein phosphatase (EC 3.1.3.16),

SEQ ID NO: 84777 - protein, 278 aa, Arabidopsis thaliana; identical to SEQ ID NO: 22171
  peptide (1)..(278): Ceres Seq. ID no. 12676963
  misc_feature (29)..(224): Pfam Name: Calcineurin-like phosphoesterase Pfam Description: Calcineurin-like phosphoesterase
  misc_feature (1)..(278): Homolog of NCBI NO: 15232651 NR Description: phosphoprotein phosphatase 1, PP1; protein id: supported by cDNA: 32787., supported by cDNA: gi_166802 thaliana] >gi|1346759|sp|P48485|PP15_ARATH Serine/threonine
  misc_feature (1)..(278): Homolog of NCBI NO: 21592807 NR Description: phosphoprotein phosphatase [Arabidopsis thaliana]
  misc_feature (1)..(277): Homolog of NCBI NO: 15237829 NR Description: protein phosphatase 1A; protein id: At5g59160.1, by cDNA: gi_166796 [Arabidopsis thaliana] Serine/threonine protein phosphatase PP1 isozyme 2
  misc_feature (1)..(277): Homolog of NCBI NO: 99751 NR Description: phosphoprotein phosphatase (EC 3.1.3.16) 1A
  misc_feature (1)..(277): Homolog of NCBI NO: 5917726 NR Description: serine/threonine protein phosphatase 1; PP1
  misc_feature (1)..(277): Homolog of NCBI NO: 11133831 NR Description: Serine/threonine protein phosphatase PP1 isozyme 1
  misc_feature (1)..(277): Homolog of NCBI NO: 11133833 NR Description: Serine/threonine protein phosphatase PP1 isozyme 2
  misc_feature (1)..(277): Homolog of NCBI NO: 15227080 NR Description: phosphoprotein phosphatase-type 1 catalytic protein id: At2g29400.1, supported by cDNA: gi_166571, supported cDNA: gi_19424067 [Arabidopsis thaliana]
  misc_feature (1)..(277): Homolog of NCBI NO: 1346764 NR Description: SERINE/THREONINE PROTEIN PHOSPHATASE PP1
  misc_feature (1)..(276): Homolog of NCBI NO: 7435129 NR Description: phosphoprotein phosphatase (EC 3.1.3.16),

SEQ ID NO: 84778 - DNA, 3130 bp, Arabidopsis thaliana
  misc_feature (1)..(3130): Ceres Seq. ID no. 12676972
  misc_feature: MA Experiment ID: 20000185 Result: Up-regulated in Transcription
  misc_feature: MA Experiment 20000185 PARAMETER Experiment Name: At_Roots__P Parameter: Age (day) Value: 7 vs. 21
  misc_feature: MA Experiment 20000185 PARAMETER Experiment Name: At_Roots__P Parameter: Organism Value: A. thaliana
  misc_feature: MA Experiment 20000185 PARAMETER Experiment Name: At_Roots__P Parameter: Tissue Value: Roots vs. Whole Plant
  misc_feature: MA Experiment ID: 20000265 Result: Up-regulated in Transcription
  misc_feature: MA Experiment 20000265 PARAMETER Experiment Name: At_Open_Flower_P Parameter: Age (day) Value: 21
  misc_feature: MA Experiment 20000265 PARAMETER Experiment Name: At_Open_Flower_P Parameter: Plant Line Value: WS
  misc_feature: MA Experiment 20000265 PARAMETER Experiment Name: At_Open_Flower_P Parameter: Tissue Value: Closed Flower vs. Whole Plant
  misc_feature: MA Experiment ID: 20000437 Result: Up-regulated in Transcription
  misc_feature: MA Experiment 20000437 PARAMETER Experiment Name: At_Drought_P Parameter: Age (day) Value: 8
  misc_feature: MA Experiment 20000437 PARAMETER Experiment Name: At_Drought_P Parameter: Organism Value: A. thaliana
  misc_feature: MA Experiment 20000437 PARAMETER Experiment Name: At_Drought_P Parameter: Plant Line Value: WS
  misc_feature: MA Experiment 20000437 PARAMETER Experiment Name: At_Drought_P Parameter: Timepoint (hr) Value: 24
  misc_feature: MA Experiment 20000437 PARAMETER Experiment Name: At_Drought_P Parameter: Tissue Value: Whole Plant
  misc_feature: MA Experiment 20000437 PARAMETER Experiment Name: At_Drought_P Parameter: Treatment Value: Drought vs. No Drought
  misc_feature: MA Experiment ID: 20000439 Result: Up-regulated in Transcription
  misc_feature: MA Experiment 20000439 PARAMETER Experiment Name: At_Roots__P Parameter: Age (day) Value: 14 vs. 21
  misc_feature: MA Experiment 20000439 PARAMETER Experiment Name: At_Roots__P Parameter: Organism Value: A. thaliana
  misc_feature: MA Experiment 20000439 PARAMETER Experiment Name: At_Roots__P Parameter: Tissue Value: Roots vs. Whole Plant
  misc_feature: MA Experiment ID: 20000443 Result: Down-regulated in Transcription
  misc_feature: MA Experiment 20000443 PARAMETER Experiment Name: At_1uM_BR-BRZ__P Parameter: Tissue Value: Shoot Apices
  misc_feature: MA Experiment 20000443 PARAMETER Experiment Name: At_1uM_BR-BRZ__P Parameter: Treatment Value: 1uM BRZ vs. No Treatment
  misc_feature: MA Experiment ID: 20000495 Result: Up-regulated in Transcription
  misc_feature: MA Experiment 20000495 PARAMETER Experiment Name: At_Guard_Cells_P Parameter: Harvest Date Value: 8/2/2002
  misc_feature: MA Experiment 20000495 PARAMETER Experiment Name: At_Guard_Cells_P Parameter: Organism Value: A. thaliana
  misc_feature: MA Experiment 20000495 PARAMETER Experiment Name: At_Guard_Cells_P Parameter: Tissue Value: Guard Cells vs. Leaves
  misc_feature: MA Experiment ID: 20000573 Result: Down-regulated in Transcription
  misc_feature: MA Experiment 20000573 PARAMETER Experiment Name: At_100uM_ABA_Mutants__P Parameter: Organism Value: A. thaliana
  misc_feature: MA Experiment 20000573 PARAMETER Experiment Name: At_100uM_ABA_Mutants__P Parameter: Plant Line Value: CS22 vs. Ler wt
  misc_feature: MA Experiment 20000573 PARAMETER Experiment Name: At_100uM_ABA_Mutants__P Parameter: Timepoint (hr) Value: N/A
  misc_feature: MA Experiment 20000573 PARAMETER Experiment Name: At_100uM_ABA_Mutants__P Parameter: Tissue Value: Whole Plant
  misc_feature: MA Experiment 20000573 PARAMETER Experiment Name: At_100uM_ABA_Mutants__P Parameter: Treatment Value: None
  misc_feature: MA Experiment ID: 20000574 Result: Down-regulated in Transcription
  misc_feature: MA Experiment 20000574 PARAMETER Experiment Name: At_100uM_ABA_Mutants__P Parameter: Organism Value: A. thaliana
  misc_feature: MA Experiment 20000574 PARAMETER Experiment Name: At_100uM_ABA_Mutants__P Parameter: Plant Line Value: CS23 vs. Ler wt
  misc_feature: MA Experiment 20000574 PARAMETER Experiment Name: At_100uM_ABA_Mutants__P Parameter: Timepoint (hr) Value: N/A
  misc_feature: MA Experiment 20000574 PARAMETER Experiment Name: At_100uM_ABA_Mutants__P Parameter: Tissue Value: Whole Plant
  misc_feature: MA Experiment 20000574 PARAMETER Experiment Name: At_100uM_ABA_Mutants__P Parameter: Treatment Value: None
aaaaaaacagcgacgtcttctctctcacggcgataaaaacagagaaccttccatttgtttctttgagcgcgtgaccggcgcgtggcggcttagttagcgccggcgtcggtcctccagtctggttttctttagggtttcattctctacttagtctggttcgtttttagatcctgatttgatgttggcaaggtgaagaatttttggatcttagatctgtaagagccatcgttgtgggctttgattcgtcgaaggttttgtgcgatcggaactcccttttctctgttttgagaaaattatgggtttctcctttgttcttgcagatcttgtttccgacgaaggttgcaaacgaaagttatgacggcggctaatgttattggtggtctggctccttctttgggatagggtggcaacggtacaccggtattttagtgttagttgtctcataattgggttttgcgctttcgttaaccttgttctcttcatttctcttttgggttcctatcctttagtcttcattgttggcttgttggtagcgtttatggaatcaactttattctcagtcttttgtggtctagtatcttgaactcttgcctattctatgtcctgccgagtttgcttgtttctcgatccgattcgttctcttgccgtctccagtcttcggtttgttgcgaattgtatgggctcggtccttgtctctacggtttagacttgatcgaggtctctcttttgcattggtgtcttactaggcgtgaaccaatcttggttttgtttgcttcgatttcgccgtttccagaagttgtgtgggatttctagtcgtctcccattcttgctggtatggatgctttggttctctttatttgtgaggtagtcttcatttggtataggaagagtcgctatccggtgtcgtggattttctcgtctccattggctagccactaattcaagcgtttctcgtttttggattgataatttgcaagatgtttggtgctagattctgagttatgagttttaattccctctgatgtttgctttcttagccgtcagtgttttgacttgtttcttttgtagtgttgttatttgctccccattttcttggacttagtttcctaggatatcttgttatccttcgggttagttttcgggatcatgtattgatcgtcgactccttgtatttcacctagtactcatcaatgaaaattaatcttccagtgaaaaaaaaaaaatgtatataattgttatggaatttctgtgtccagtccatattaagctttttacatatatatatagcatcgaccgcgaagtccgtaacaccatctcttctagaagactcggatttcattggcagaggcgtatgctcctttggatctgatagttaaaacaccaaatcttgtgtaactttcttgtatataatgctctgtttaactttcatttttttttagtaatatttacattcctagcaacaaatatttatttatagcaattaatatatatttttagtaataattacattcctagcaacaaatatatatttattttttaacaaatacacaaatatatttttagtagcaattaacctattttcctaacaagatacaacagaagaataagaaaatagtagacagatagatccacttgctaccatttcctctccctgtagccttctgtgtctattaaaatagacttcacttgtaaagtaaaagtttgaacattttaacatataaaaaaaaaaaccaagtagagaggtaagtggtggtattggttctgcaaaagaacattatggatatacttaccaccattctcaatcttcttcttcctcctcttactatcatctttctcttcctgttttacccattttatcttttgatcaaacttgtgctttgtcttcgtaagaaccttcacttcgaaaacgtagccagaaaagtagttctaatcaccggagcttcctctggcatcggagaggttagttagctttggatgctatgcccttttgttagttagtatattttttttaccaatactaagtaactgagtagatttagtctattatactattactgattcaaatatatgtgtgtatatacataatatagatccgacattggtgatagtgtttatggttttgttttcgaggtcctattttgtcgtggaatctcttgcaactatatgtgtgctatttgatctatttgataatagacgactaaaaataactaaatgtatagatccacataaattgatatgatatttggttgagaacttgagattgttaatgttcttgtcttgtttggttggaaaaaaattaaaaagcatgtggcatacgaatacgcaaagaaaggagcatatttggctcttgttgctcgaagaagggatcgtctagagattgtagcagaaacatcacgtcaattaggatctggtaatgtcatcatcatacctggtgatgtttctaatgttgaggactgcaagaagttcatcgatgagacgattcgtcatttcggaaaactagaccacctgatcaataatgctggtgtatttcaaactgttcttttcgaagatttcacacaaattcaagacgcaaatcctataatggacatcaacttttggggtacaacatacatcacctattttgcaattcctcatcttcgaaagagtaaaggaaaaatcgtcgcgattacatcgggttcagcaaatatacctttgccattggcaagcatctatgcagcaagcaaagcagccttattaagattctttgagacattaagaatagagctaagtcctgatatcaaaataacaattgttctcccaggagttgtatcaacagatatgaccactcctcactgtatagagaagtatggttcggattttattctatcggaatcagtgagtaaatgcgcaaaggcaatcttcagaggtattggcagaggagagacatacatagaagaaccatcttggatgaaatggctgtttataatgaaaaatgtatgtcccgaaatcgttgattacggacttaactatctatttgttagttatctaaaaccttatttcaagcgtgattgatcataacaatcaatcccaaatctataatctttttaataagggttgtgtacttgtcttcctatgatgactatttttcaat

SEQ ID NO: 84779 - protein, 156 aa, Arabidopsis thaliana
  peptide (1)..(156): Ceres Seq. ID no. 12676973
  misc_feature (1)..(156): Homolog of NCBI NO: 15232779 NR Description: putative protein; protein id: At3g47360.1
  misc_feature (1)..(156): Homolog of NCBI NO: 15232777 NR Description: putative protein; protein id: At3g47350.1
  misc_feature (1)..(137): Homolog of NCBI NO: 15241203 NR Description: 11-beta-hydroxysteroid dehydrogenase-like;
  misc_feature (1)..(137): Homolog of NCBI NO: 8777392 NR Description: 11-beta-hydroxysteroid dehydrogenase-like
  misc_feature (1)..(147): Homolog of NCBI NO: 18423187 NR Description: 11-beta-hydroxysteroid dehydrogenase-like; id: At5g50600.1, supported by cDNA: gi_15450584, supported by gi_17065383, supported by cDNA: gi_17386149, supported by cDNA:
  misc_feature (1)..(147): Homolog of NCBI NO: 15824408 NR Description: steroleosin [Sesamum indicum]
  misc_feature (1)..(153): Homolog of NCBI NO: 15241261 NR Description: putative protein; protein id: At5g50770.1 thaliana] >gi|8777400|dbj|BAA96990.1| contains similarity to
  misc_feature (1)..(147): Homolog of NCBI NO: 21311775 NR Description: steroleosin-B [Sesamum indicum]
  misc_feature (1)..(144): Homolog of NCBI NO: 15234888 NR Description: putative oxidoreductase; protein id: At4g10020.1
  misc_feature (1)..(80): Homolog of NCBI NO: 17228913 NR Description: probable short-chain dehydrogenase [Nostoc sp.
MDINFWGTTYITYFAIPHLRKSKGKIVAITSGSANIPLPLASIYAASKAALLRFFETLRIELSPDIKITIVLPGVVSTDMTTPHCIEKYGSDFILSESVSKCAKAIFRGIGRGETYIEEPSWMKWLFIMKNVCPEIVDYGLNYLFVSYLKPYFKRD

SEQ ID NO: 84780 - DNA, 857 bp, Arabidopsis thaliana
  misc_feature (1)..(857): Ceres Seq. ID no. 12677022
  misc_feature: MA Experiment ID: 108434 Result: Up-regulated in Transcription
  misc_feature: MA Experiment 108434 PARAMETER Experiment Name: At_Root_Tips_cDNA_P Parameter: Tissue Value: Root Tips
  misc_feature: MA Experiment ID: 108462 Result: Down-regulated in Transcription
  misc_feature: MA Experiment 108462 PARAMETER Experiment Name: At_Germinating_Seeds_cDNA_P Parameter: Age (day) Value: 2 vs. 0
  misc_feature: MA Experiment 108462 PARAMETER Experiment Name: At_Germinating_Seeds_cDNA_P Parameter: Tissue Value: Germinating Seeds
  misc_feature: MA Experiment ID: 108463 Result: Down-regulated in Transcription
  misc_feature: MA Experiment 108463 PARAMETER Experiment Name: At_Germinating_Seeds_cDNA_P Parameter: Age (day) Value: 3 vs. 0
  misc_feature: MA Experiment 108463 PARAMETER Experiment Name: At_Germinating_Seeds_cDNA_P Parameter: Tissue Value: Germinating Seeds
  misc_feature: MA Experiment ID: 108464 Result: Down-regulated in Transcription
  misc_feature: MA Experiment 108464 PARAMETER Experiment Name: At_Germinating_Seeds_cDNA_P Parameter: Age (day) Value: 4 vs. 0
  misc_feature: MA Experiment 108464 PARAMETER Experiment Name: At_Germinating_Seeds_cDNA_P Parameter: Tissue Value: Germinating Seeds
  misc_feature: MA Experiment ID: 108488 Result: Up-regulated in Transcription
  misc_feature: MA Experiment ID: 108573 Result: Down-regulated in Transcription
  misc_feature: MA Experiment 108573 PARAMETER Experiment Name: At_Drought_cDNA_P Parameter: Timepoint (hr) Value: 6
  misc_feature: MA Experiment 108573 PARAMETER Experiment Name: At_Drought_cDNA_P Parameter: Tissue Value: Aerial
  misc_feature: MA Experiment 108573 PARAMETER Experiment Name: At_Drought_cDNA_P Parameter: Treatment Value: Drought vs. No Drought
  misc_feature: MA Experiment ID: 20000227 Result: Up-regulated in Transcription
  misc_feature: MA Experiment 20000227 PARAMETER Experiment Name: At_Root-Tips-vs-Tops_P Parameter: Tissue Value: Root Tips vs. Root Tops
  misc_feature: MA Experiment ID: 20000234 Result: Up-regulated in Transcription
  misc_feature: MA Experiment 20000234 PARAMETER Experiment Name: At_Siliques_P Parameter: Age (day) Value: 21
  misc_feature: MA Experiment 20000234 PARAMETER Experiment Name: At_Siliques_P Parameter: Organism Value: A. thaliana
  misc_feature: MA Experiment 20000234 PARAMETER Experiment Name: At_Siliques_P Parameter: Plant Line Value: WS
  misc_feature: MA Experiment 20000234 PARAMETER Experiment Name: At_Siliques_P Parameter: Tissue Value: Less Than 5mm Siliques vs. Whole Plant
  misc_feature: MA Experiment ID: 20000437 Result: Down-regulated in Transcription
  misc_feature: MA Experiment 20000437 PARAMETER Experiment Name: At_Drought_P Parameter: Age (day) Value: 8
  misc_feature: MA Experiment 20000437 PARAMETER Experiment Name: At_Drought_P Parameter: Organism Value: A. thaliana
  misc_feature: MA Experiment 20000437 PARAMETER Experiment Name: At_Drought_P Parameter: Plant Line Value: WS
  misc_feature: MA Experiment 20000437 PARAMETER Experiment Name: At_Drought_P Parameter: Timepoint (hr) Value: 24
  misc_feature: MA Experiment 20000437 PARAMETER Experiment Name: At_Drought_P Parameter: Tissue Value: Whole Plant
  misc_feature: MA Experiment 20000437 PARAMETER Experiment Name: At_Drought_P Parameter: Treatment Value: Drought vs. No Drought
  misc_feature: MA Experiment ID: 20001557 Result: Up-regulated in Transcription
  misc_feature: MA Experiment 20001557 PARAMETER Experiment Name: At_Drought_Soil_Dry_P Parameter: Age (day) Value: 27
  misc_feature: MA Experiment 20001557 PARAMETER Experiment Name: At_Drought_Soil_Dry_P Parameter: Organism Value: A. thaliana
  misc_feature: MA Experiment 20001557 PARAMETER Experiment Name: At_Drought_Soil_Dry_P Parameter: Plant Line Value: WS
  misc_feature: MA Experiment 20001557 PARAMETER Experiment Name: At_Drought_Soil_Dry_P Parameter: Post Timepoint (hr) Value: 3
  misc_feature: MA Experiment 20001557 PARAMETER Experiment Name: At_Drought_Soil_Dry_P Parameter: Post-Treatment Value: Re-Water vs. No Drought
  misc_feature: MA Experiment 20001557 PARAMETER Experiment Name: At_Drought_Soil_Dry_P Parameter: Timepoint (day) Value: 13
  misc_feature: MA Experiment 20001557 PARAMETER Experiment Name: At_Drought_Soil_Dry_P Parameter: Treatment Value: Drought vs. No Drought
  misc_feature: MA Experiment ID: 20001558 Result: Up-regulated in Transcription
  misc_feature: MA Experiment 20001558 PARAMETER Experiment Name: At_Drought_Soil_Dry_P Parameter: Age (day) Value: 27
  misc_feature: MA Experiment 20001558 PARAMETER Experiment Name: At_Drought_Soil_Dry_P Parameter: Organism Value: A. thaliana
  misc_feature: MA Experiment 20001558 PARAMETER Experiment Name: At_Drought_Soil_Dry_P Parameter: Plant Line Value: WS
  misc_feature: MA Experiment 20001558 PARAMETER Experiment Name: At_Drought_Soil_Dry_P Parameter: Post Timepoint (hr) Value: 6
  misc_feature: MA Experiment 20001558 PARAMETER Experiment Name: At_Drought_Soil_Dry_P Parameter: Post-Treatment Value: Re-Water vs. No Drought
  misc_feature: MA Experiment 20001558 PARAMETER Experiment Name: At_Drought_Soil_Dry_P Parameter: Timepoint (day) Value: 13
  misc_feature: MA Experiment 20001558 PARAMETER Experiment Name: At_Drought_Soil_Dry_P Parameter: Treatment Value: Drought vs. No Drought
  misc_feature: MA Experiment ID: 20001560 Result: Up-regulated in Transcription
  misc_feature: MA Experiment 20001560 PARAMETER Experiment Name: At_Drought_Soil_Dry_P Parameter: Age (day) Value: 28
  misc_feature: MA Experiment 20001560 PARAMETER Experiment Name: At_Drought_Soil_Dry_P Parameter: Organism Value: A. thaliana
  misc_feature: MA Experiment 20001560 PARAMETER Experiment Name: At_Drought_Soil_Dry_P Parameter: Plant Line Value: WS
  misc_feature: MA Experiment 20001560 PARAMETER Experiment Name: At_Drought_Soil_Dry_P Parameter: Post Timepoint (hr) Value: None
  misc_feature: MA Experiment 20001560 PARAMETER Experiment Name: At_Drought_Soil_Dry_P Parameter: Post-Treatment Value: None
  misc_feature: MA Experiment 20001560 PARAMETER Experiment Name: At_Drought_Soil_Dry_P Parameter: Timepoint (day) Value: 14
  misc_feature: MA Experiment 20001560 PARAMETER Experiment Name: At_Drought_Soil_Dry_P Parameter: Treatment Value: Drought vs. No Drought
  misc_feature: MA Experiment ID: 20001757 Result: Up-regulated in Transcription
  misc_feature: MA Experiment 20001757 PARAMETER Experiment Name: At_50mM_NH4NO3_L-to-H_P Parameter: Timepoint (hr) Value: 6
  misc_feature: MA Experiment 20001757 PARAMETER Experiment Name: At_50mM_NH4NO3_L-to-H_P Parameter: Tissue Value: Leaf
  misc_feature: MA Experiment 20001757 PARAMETER Experiment Name: At_50mM_NH4NO3_L-to-H_P Parameter: Treatment Value: 50mM NH4NO3 vs 100mM Mannitol
atacttcagtctagagccgcgcaagaagacgattctctctcttgagttgaagaaatgaagcacaacaatgttatccccaatggtcacttcaaaaagcactggcagaattatgtcaagacatggttcaaccagcctgccaggaaaaccagaagaagaattgcgaggcaaaagaaggctgtgaagatcttccctcgtccaacttctggacctctccgccctgttgtgcatggtcagactcttaagtacaacatgaaggtcagaaccggtaaaggattcactcttgaagagctcaaggctgctggtatcccaaagaagttggcgcctacaattggtattgctgttgaccatcgtcgcaagaaccgatctttggagggtcttcaaacaaatgtccagaggctgaaaacctacaagaccaagttagtcattttcccgcgtcgtgcccgcaaggtcaaggctggtgactctacaccagaagagttggctaatgctacccaagttcaaggagactacttgcctattgtacgtgagaagcctaccatggaactcgtcaagctgacttcagaaatgaagtctttcaaggcttttgacaagatacgccttgagcgcactaacaagaggcatgccggagctagagccaagagagccgcagaggctgagaaagaagagaagaagtgaggtcgttcttcttaggtagaagaaacttttatcttatcaacttttggaactgaattttgtgtatcagactgtcttttctttcatcagtttttatccttaaatctttgattttgctgctaccttgcttctcttgatttatggaaaagaccgtatctcacatctctacttgctatagtttcctc

SEQ ID NO: 84781 - protein, 206 aa, Arabidopsis thaliana [sequence omitted]

SEQ ID NO: 84782 - protein, 141 aa, Arabidopsis thaliana; identical to SEQ ID NO: 25776
  peptide (1)..(141): Ceres Seq. ID no. 12677024
  misc_feature (1)..(118): Pfam Name: Ribosomal protein L13e Pfam Description: Ribosomal protein L13e
  misc_feature (1)..(141): Homolog of NCBI NO: 15229064 NR Description: 60S ribosomal protein L13, BBC1 protein; protein At3g49010.2, supported by cDNA: 12182., supported by cDNA: supported by cDNA: gi_16226380, supported by cDNA: gi_17473729,
  misc_feature (1)..(141): Homolog of NCBI NO: 21537149 NR Description: 60S ribosomal protein L13, BBC1 protein
  misc_feature (1)..(141): Homolog of NCBI NO: 730449 NR Description: 60S RIBOSOMAL PROTEIN L13-1 (COLD INDUCED PROTEIN >gi|398918|emb|CAA80341.1| cold induced protein (BnC24A)
  misc_feature (1)..(141): Homolog of NCBI NO: 730450 NR Description: 60S RIBOSOMAL PROTEIN L13-2 (COLD INDUCED PROTEIN >gi|398922|emb|CAA80343.1| cold induced protein (BnC24B)
  misc_feature (1)..(141): Homolog of NCBI NO: 7441103 NR Description: ribosomal protein L13.B, cytosolic - rape
  misc_feature (1)..(141): Homolog of NCBI NO: 7441102 NR Description: ribosomal protein L13.A, cytosolic - rape
  misc_feature (1)..(141): Homolog of NCBI NO: 15237847 NR Description: 60S ribosomal protein L13; protein id: supported by cDNA: gi_14190434, supported by cDNA: gi_15450564 thaliana] >gi|10176857|dbj|BAB10063.1| 60S ribosomal protein L13
  misc_feature (1)..(141): Homolog of NCBI NO: 34897952 NR Description: ESTs AU077873(S1878),D40121(S1878) correspond to region of the predicted gene.~Similar to Arabidopsis thaliana 60S
  misc_feature (1)..(141): Homolog of NCBI NO: 18873677 NR Description: putative cold-induced protein [Oryza sativa
  misc_feature (1)..(141): Homolog of NCBI NO: 12580867 NR Description: 60S ribosomal protein L13E [Picea abies]

SEQ ID NO: 84783 - DNA, 1538 bp, Arabidopsis thaliana
  misc_feature (1)..(1538): Ceres Seq. ID no. 12677036
  misc_feature: MA Experiment ID: 20000173 Result: Down-regulated in Transcription
  misc_feature: MA Experiment 20000173 PARAMETER Experiment Name: At_42deg_Heat_P Parameter: Age (day) Value: 14
  misc_feature: MA Experiment 20000173 PARAMETER Experiment Name: At_42deg_Heat_P Parameter: Organism Value: A. thaliana
  misc_feature: MA Experiment 20000173 PARAMETER Experiment Name: At_42deg_Heat_P Parameter: Plant Line Value: WS
  misc_feature: MA Experiment 20000173 PARAMETER Experiment Name: At_42deg_Heat_P Parameter: Temperature (deg C) Value: 42 vs. 22
  misc_feature: MA Experiment 20000173 PARAMETER Experiment Name: At_42deg_Heat_P Parameter: Timepoint (hr) Value: 6
  misc_feature: MA Experiment 20000173 PARAMETER Experiment Name: At_42deg_Heat_P Parameter: Tissue Value: Aerial
  misc_feature: MA Experiment ID: 20000184 Result: Down-regulated in Transcription
  misc_feature: MA Experiment 20000184 PARAMETER Experiment Name: At_Shoots__P Parameter: Age (day) Value: 7
  misc_feature: MA Experiment 20000184 PARAMETER Experiment Name: At_Shoots__P Parameter: Tissue Value: Shoots vs. Whole Plant
  misc_feature: MA Experiment ID: 20000213 Result: Up-regulated in Transcription
  misc_feature: MA Experiment 20000213 PARAMETER Experiment Name: At_4deg_Cold_P Parameter: Timepoint (hr) Value: 2
  misc_feature: MA Experiment ID: 20000227 Result: Down-regulated in Transcription
  misc_feature: MA Experiment 20000227 PARAMETER Experiment Name: At_Root-Tips-vs-Tops_P Parameter: Tissue Value: Root Tips vs. Root Tops
  misc_feature: MA Experiment ID: 20000438 Result: Down-regulated in Transcription
  misc_feature: MA Experiment 20000438 PARAMETER Experiment Name: At_Shoots__P Parameter: Age (day) Value: 14
  misc_feature: MA Experiment 20000438 PARAMETER Experiment Name: At_Shoots__P Parameter: Tissue Value: Shoots vs. Whole Plant
  misc_feature: MA Experiment ID: 20000441 Result: Down-regulated in Transcription
  misc_feature: MA Experiment 20000441 PARAMETER Experiment Name: At_1uM_BR-BRZ__P Parameter: Tissue Value: Shoot Apices
  misc_feature: MA Experiment 20000441 PARAMETER Experiment Name: At_1uM_BR-BRZ__P Parameter: Treatment Value: 1uM BR vs. No Treatment
  misc_feature: MA Experiment ID: 20001247 Result: Down-regulated in Transcription
  misc_feature: MA Experiment 20001247 PARAMETER Experiment Name: At_Far-red-induction_P Parameter: Age (day) Value: 7
  misc_feature: MA Experiment 20001247 PARAMETER Experiment Name: At_Far-red-induction_P Parameter: Light Value: Far-red vs. White
  misc_feature: MA Experiment 20001247 PARAMETER Experiment Name: At_Far-red-induction_P Parameter: Organism Value: A. thaliana
  misc_feature: MA Experiment 20001247 PARAMETER Experiment Name: At_Far-red-induction_P Parameter: Plant Line Value: Columbia
  misc_feature: MA Experiment 20001247 PARAMETER Experiment Name: At_Far-red-induction_P Parameter: Timepoint (hr) Value: 1
  misc_feature: MA Experiment 20001247 PARAMETER Experiment Name: At_Far-red-induction_P Parameter: Tissue Value: Whole Plant
  misc_feature: MA Experiment ID: 20001248 Result: Up-regulated in Transcription
  misc_feature: MA Experiment 20001248 PARAMETER Experiment Name: At_Far-red-induction_P Parameter: Age (day) Value: 7
  misc_feature: MA Experiment 20001248 PARAMETER Experiment Name: At_Far-red-induction_P Parameter: Light Value: Far-red vs. White
  misc_feature: MA Experiment 20001248 PARAMETER Experiment Name: At_Far-red-induction_P Parameter: Organism Value: A. thaliana
  misc_feature: MA Experiment 20001248 PARAMETER Experiment Name: At_Far-red-induction_P Parameter: Plant Line Value: Columbia
  misc_feature: MA Experiment 20001248 PARAMETER Experiment Name: At_Far-red-induction_P Parameter: Timepoint (hr) Value: 4
  misc_feature: MA Experiment 20001248 PARAMETER Experiment Name: At_Far-red-induction_P Parameter: Tissue Value: Whole Plant
atttcgctttaatgagttttatctgatagaatctgctccacccaaaaacagcataagaagaaattcattgtcagagaaaagtgcaaaaaaaaaaaacgatcttcttcatcattctactaaatgggttcttgtctcagttctcgtgtccttaataagagcagtagtggtctcgatgatcttcatctctcgagctgtaaatcttcatcatcagctacagctcataagacagaaggagaaatccttagctcaacgaccgtcaaaagctttagctttaatgaacttaaactcgctactagaaacttcagatcggactctgttgttggagaaggtggctttggttgtgtctttagaggttggcttgatgagactactcttactcctaccaaatctagctctggtcttgttattgctgttaaacgacttaaccctgatggttttcaaggtcaccgagaatggctgacagagattaactatttggggcagttaagtcacccgaatttggttaaattgattggttattgcttggaagatgaacaacggcttcttgtgtatgagtttatgcacaagggtagtcttgagaatcatctgtttgcaaatggaaataaggattttaagccgctatcttggattctacggattaaggttgcacttgatgcagctaaaggtcttgcatttcttcatagtgatcccgtcaaagtcatttacagagacatcaaggcgtcaaacatcttactggactcggacttcaacgcaaagctttcagactttggtttagcgagagacggtccaatgggagaacaaagttatgttagtacaagggtcatgggtacttttgggtacgcagctcctgagtatgtctcaacaggccacttaaatgctagaagcgacgtatacagtttcggggttgttctgctagaactactatgtggaaggcaagcactagaccataaccgcccggccaaggagcaaaaccttgtggattgggctcgaccatacctcacaagcaggcgaaaggttctactaattgtggacactcggcttaactcacagtacaaacccgaaggagcagtgagactggcaagcattgctgtgcaatgcctatcattcgaacccaaatcacgtccgaccatggaccaagtggttcgagccttggtacagctgcaagacagcgtggttaaaccggccaatgttgacccgcttaaggttaaggataccaagaaacttgtgggattgaaaacagaagacaagtaccagagaaacggtttaaacaaaaaaaccgttggattgtagtaggtagagggaaatataaggttacttggttaggtactcttcatgtcttcttcttgtgtattgtaatattgtgcgaagtgattttgacattttgtaacactgcttatagttttgctcctgaaatattcgatttggagatacttgttttctctctatctatagtttggtgatatatgccaaaatgtggtagtgatcaattccactctcttctaacattttagtttactatatatgtaactaatttctgt

SEQ ID NO: 84784 - protein, 389 aa, Arabidopsis thaliana
  peptide (1)..(389): Ceres Seq. ID no. 12677037
  misc_feature (1)..(389): Homolog of NCBI NO: 30694253 NR Description: serine/threonine-specific protein kinase -related
  misc_feature (1)..(389): Homolog of NCBI NO: 28058890 NR Description: serine/threonine-specific protein kinase -like
  misc_feature (13)..(389): Homolog of NCBI NO: 11259786 NR Description: serine/threonine-specific protein kinase-like -
  misc_feature (1)..(373): Homolog of NCBI NO: 15225520 NR Description: putative protein kinase; protein id: At2g39660.1, by cDNA: gi_13272430, supported by cDNA: gi_17064833, supported cDNA: gi_18086423, supported by cDNA: gi_20259859, supported by
  misc_feature (12)..(350): Homolog of NCBI NO: 34906046 NR Description: putative serine/threonine-specific protein kinase
  misc_feature (1)..(347): Homolog of NCBI NO: 166809 NR Description: protein kinase
  misc_feature (1)..(347): Homolog of NCBI NO: 15241749 NR Description: serine/threonine-specific protein kinase NAK; id: At5g02290.1, supported by cDNA: 27477., supported by cDNA:
  misc_feature (1)..(370): Homolog of NCBI NO: 14719339 NR Description: putative protein kinase [Oryza sativa]
  misc_feature (13)..(350): Homolog of NCBI NO: 34897424 NR Description: putative protein kinase [Oryza sativa (japonica group)] >gi|27545044|gb|AAO18450.1| putative protein kinase
  misc_feature (1)..(348): Homolog of NCBI NO: 15222437 NR Description: protein kinase APK1A; protein id: At1g07570.1
MGSCLSSRVLNKSSSGLDDLHLSSCKSSSSATAHKTEGEILSSTTVKSFSFNELKLATRNFRSDSVVGEGGFGCVFRGWLDETTLTPTKSSSGLVIAVKRLNPDGFQGHREWLTEINYLGQLSHPNLVKLIGYCLEDEQRLLVYEFMHKGSLENHLFANGNKDFKPLSWILRIKVALDAAKGLAFLHSDPVKVIYRDIKASNILLDSDFNAKLSDFGLARDGPMGEQSYVSTRVMGTFGYAAPEYVSTGHLNARSDVYSFGVVLLELLCGRQALDHNRPAKEQNLVDWARPYLTSRRKVLLIVDTRLNSQYKPEGAVRLASIAVQCLSFEPKSRPTMDQVVRALVQLQDSVVKPANVDPLKVKDTKKLVGLKTEDKYQRNGLNKKTVGL

SEQ ID NO: 84785 - protein, 243 aa, Arabidopsis thaliana; identical to SEQ ID NO: 72442
  peptide (1)..(243): Ceres Seq. ID no. 12677038
  misc_feature (1)..(243): Homolog of NCBI NO: 30694253 NR Description: serine/threonine-specific protein kinase -related
  misc_feature (1)..(243): Homolog of NCBI NO: 28058890 NR Description: serine/threonine-specific protein kinase -like
  misc_feature (1)..(243): Homolog of NCBI NO: 11259786 NR Description: serine/threonine-specific protein kinase-like -
  misc_feature (1)..(227): Homolog of NCBI NO: 15225520 NR Description: putative protein kinase; protein id: At2g39660.1, by cDNA: gi_13272430, supported by cDNA: gi_17064833, supported cDNA: gi_18086423, supported by cDNA: gi_20259859, supported by
  misc_feature (1)..(204): Homolog of NCBI NO: 34906046 NR Description: putative serine/threonine-specific protein kinase
  misc_feature (1)..(201): Homolog of NCBI NO: 166809 NR Description: protein kinase
  misc_feature (1)..(201): Homolog of NCBI NO: 15241749 NR Description: serine/threonine-specific protein kinase NAK; id: At5g02290.1, supported by cDNA: 27477., supported by cDNA:
  misc_feature (1)..(224): Homolog of NCBI NO: 14719339 NR Description: putative protein kinase [Oryza sativa]
  misc_feature (1)..(204): Homolog of NCBI NO: 34897424 NR Description: putative protein kinase [Oryza sativa (japonica group)] >gi|27545044|gb|AAO18450.1| putative protein kinase
  misc_feature (1)..(202): Homolog of NCBI NO: 15222437 NR Description: protein kinase APK1A; protein id: At1g07570.1

SEQ ID NO: 84786 - DNA, 1454 bp, Arabidopsis thaliana
  misc_feature (1)..(1454): Ceres Seq. ID no. 12677052
  misc_feature: MA Experiment ID: 108434 Result: Down-regulated in Transcription
  misc_feature: MA Experiment 108434 PARAMETER Experiment Name: At_Root_Tips_cDNA_P Parameter: Tissue Value: Root Tips
  misc_feature: MA Experiment ID: 108464 Result: Up-regulated in Transcription
  misc_feature: MA Experiment 108464 PARAMETER Experiment Name: At_Germinating_Seeds_cDNA_P Parameter: Age (day) Value: 4 vs. 0
  misc_feature: MA Experiment 108464 PARAMETER Experiment Name: At_Germinating_Seeds_cDNA_P Parameter: Tissue Value: Germinating Seeds
  misc_feature: MA Experiment ID: 108473 Result: Up-regulated in Transcription
  misc_feature: MA Experiment 108473 PARAMETER Experiment Name: At_Drought_Flowers_cDNA_P Parameter: Timepoint (hr) Value: 7 d
  misc_feature: MA Experiment 108473 PARAMETER Experiment Name: At_Drought_Flowers_cDNA_P Parameter: Tissue Value: Flower
  misc_feature: MA Experiment 108473 PARAMETER Experiment Name: At_Drought_Flowers_cDNA_P Parameter: Treatment Value: Drought vs. No Drought
  misc_feature: MA Experiment ID: 108489 Result: Up-regulated in Transcription
  misc_feature: MA Experiment ID: 108573 Result: Up-regulated in Transcription
  misc_feature: MA Experiment 108573 PARAMETER Experiment Name: At_Drought_cDNA_P Parameter: Timepoint (hr) Value: 6
  misc_feature: MA Experiment 108573 PARAMETER Experiment Name: At_Drought_cDNA_P Parameter: Tissue Value: Aerial
  misc_feature: MA Experiment 108573 PARAMETER Experiment Name: At_Drought_cDNA_P Parameter: Treatment Value: Drought vs. No Drought
  misc_feature: MA Experiment ID: 108574 Result: Up-regulated in Transcription
  misc_feature: MA Experiment 108574 PARAMETER Experiment Name: At_Wounding__cDNA_P Parameter: Timepoint (hr) Value: 1
  misc_feature: MA Experiment 108574 PARAMETER Experiment Name: At_Wounding__cDNA_P Parameter: Tissue Value: Aerial
  misc_feature: MA Experiment 108574 PARAMETER Experiment Name: At_Wounding__cDNA_P Parameter: Treatment Value: Wounding vs. No Wounding
  misc_feature: MA Experiment ID: 108594 Result: Up-regulated in Transcription
  misc_feature: MA Experiment 108594 PARAMETER Experiment Name: At_Ler-rhl_Root_cDNA_P Parameter: Plant Line Value: null
  misc_feature: MA Experiment ID: 108595 Result: Up-regulated in Transcription
  misc_feature: MA Experiment 108595 PARAMETER Experiment Name: At_Ler-pi_Ovule_cDNA_P Parameter: Plant Line Value: null
  misc_feature: MA Experiment ID: 108667 Result: Up-regulated in Transcription
  misc_feature: MA Experiment 108667 PARAMETER Experiment Name: At_2mM_SA_cDNA_P Parameter: Plant Line Value: WS
  misc_feature: MA Experiment 108667 PARAMETER Experiment Name: At_2mM_SA_cDNA_P Parameter: Timepoint (hr) Value: 1
  misc_feature: MA Experiment 108667 PARAMETER Experiment Name: At_2mM_SA_cDNA_P Parameter: Treatment Value: 2mM SA vs. No Treatment
  misc_feature: MA Experiment ID: 20000069 Result: Up-regulated in Transcription
  misc_feature: MA Experiment 20000069 PARAMETER Experiment Name: At_100uM_ABA_Mutants_cDNA_P Parameter: Plant Line Value: CS23
  misc_feature: MA Experiment 20000069 PARAMETER Experiment Name: At_100uM_ABA_Mutants_cDNA_P Parameter: Timepoint (hr) Value: 6
  misc_feature: MA Experiment 20000069 PARAMETER Experiment Name: At_100uM_ABA_Mutants_cDNA_P Parameter: Tissue Value: Aerial
  misc_feature: MA Experiment 20000069 PARAMETER Experiment Name: At_100uM_ABA_Mutants_cDNA_P Parameter: Treatment Value: 100uM ABA vs. No Treatment
  misc_feature: MA Experiment ID: 20000071 Result: Up-regulated in Transcription
  misc_feature: MA Experiment 20000071 PARAMETER Experiment Name: At_100uM_ABA_Mutants_cDNA_P Parameter: Plant Line Value: CS8104
  misc_feature: MA Experiment 20000071 PARAMETER Experiment Name: At_100uM_ABA_Mutants_cDNA_P Parameter: Timepoint (hr) Value: 6
  misc_feature: MA Experiment 20000071 PARAMETER Experiment Name: At_100uM_ABA_Mutants_cDNA_P Parameter: Tissue Value: Aerial
  misc_feature: MA Experiment 20000071 PARAMETER Experiment Name: At_100uM_ABA_Mutants_cDNA_P Parameter: Treatment Value: 100uM ABA vs. No Treatment
  misc_feature: MA Experiment ID: 20000072 Result: Up-regulated in Transcription
  misc_feature: MA Experiment 20000072 PARAMETER Experiment Name: At_100uM_ABA_Mutants_cDNA_P Parameter: Plant Line Value: CS8105
  misc_feature: MA Experiment 20000072 PARAMETER Experiment Name: At_100uM_ABA_Mutants_cDNA_P Parameter: Timepoint (hr) Value: 6
  misc_feature: MA Experiment 20000072 PARAMETER Experiment Name: At_100uM_ABA_Mutants_cDNA_P Parameter: Tissue Value: Aerial
  misc_feature: MA Experiment 20000072 PARAMETER Experiment Name: At_100uM_ABA_Mutants_cDNA_P Parameter: Treatment Value: 100uM ABA vs. No Treatment
  misc_feature: MA Experiment ID: 20000087 Result: Up-regulated in Transcription
  misc_feature: MA Experiment 20000087 PARAMETER Experiment Name: At_100uM_ABA_Mutants_cDNA_P Parameter: Plant Line Value: WS
  misc_feature: MA Experiment 20000087 PARAMETER Experiment Name: At_100uM_ABA_Mutants_cDNA_P Parameter: Timepoint (hr) Value: 6
  misc_feature: MA Experiment 20000087 PARAMETER Experiment Name: At_100uM_ABA_Mutants_cDNA_P Parameter: Tissue Value: Aerial
  misc_feature: MA Experiment 20000087 PARAMETER Experiment Name: At_100uM_ABA_Mutants_cDNA_P Parameter: Treatment Value: 100uM ABA vs. No Treatment
  misc_feature: MA Experiment ID: 20000111 Result: Up-regulated in Transcription
  misc_feature: MA Experiment 20000111 PARAMETER Experiment Name: At_42deg_Heat_cDNA_P Parameter: Temperature (deg C) Value: 42 vs. 22
  misc_feature: MA Experiment 20000111 PARAMETER Experiment Name: At_42deg_Heat_cDNA_P Parameter: Timepoint (hr) Value: 6
  misc_feature: MA Experiment 20000111 PARAMETER Experiment Name: At_42deg_Heat_cDNA_P Parameter: Tissue Value: Aerial
  misc_feature: MA Experiment ID: 20000113 Result: Up-regulated in Transcription
  misc_feature: MA Experiment 20000113 PARAMETER Experiment Name: At_42deg_Heat_cDNA_P Parameter: Temperature (deg C) Value: 42 vs. 22
  misc_feature: MA Experiment 20000113 PARAMETER Experiment Name: At_42deg_Heat_cDNA_P Parameter: Timepoint (hr) Value: 8
  misc_feature: MA Experiment 20000113 PARAMETER Experiment Name: At_42deg_Heat_cDNA_P Parameter: Tissue Value: Aerial
  misc_feature: MA Experiment ID: 20000144 Result: Up-regulated in Transcription
  misc_feature: MA Experiment 20000144 PARAMETER Experiment Name: At_42deg_Heat_cDNA_P Parameter: Temperature (deg C) Value: 42 vs. 22
  misc_feature: MA Experiment 20000144 PARAMETER Experiment Name: At_42deg_Heat_cDNA_P Parameter: Timepoint (hr) Value: 1
  misc_feature: MA Experiment 20000144 PARAMETER Experiment Name: At_42deg_Heat_cDNA_P Parameter: Tissue Value: Aerial
  misc_feature: MA Experiment ID: 20000173 Result: Up-regulated in Transcription
  misc_feature: MA Experiment 20000173 PARAMETER Experiment Name: At_42deg_Heat_P Parameter: Age (day) Value: 14
  misc_feature: MA Experiment 20000173 PARAMETER Experiment Name: At_42deg_Heat_P Parameter: Organism Value: A. thaliana
  misc_feature: MA Experiment 20000173 PARAMETER Experiment Name: At_42deg_Heat_P Parameter: Plant Line Value: WS
  misc_feature: MA Experiment 20000173 PARAMETER Experiment Name: At_42deg_Heat_P Parameter: Temperature (deg C) Value: 42 vs. 22
  misc_feature: MA Experiment 20000173 PARAMETER Experiment Name: At_42deg_Heat_P Parameter: Timepoint (hr) Value: 6
  misc_feature: MA Experiment 20000173 PARAMETER Experiment Name: At_42deg_Heat_P Parameter: Tissue Value: Aerial
  misc_feature: MA Experiment ID: 20000184 Result: Down-regulated in Transcription
  misc_feature: MA Experiment 20000184 PARAMETER Experiment Name: At_Shoots__P Parameter: Age (day) Value: 7
  misc_feature: MA Experiment 20000184 PARAMETER Experiment Name: At_Shoots__P Parameter: Tissue Value: Shoots vs. Whole Plant
  misc_feature: MA Experiment ID: 20000185 Result: Down-regulated in Transcription
  misc_feature: MA Experiment 20000185 PARAMETER Experiment Name: At_Roots__P Parameter: Age (day) Value: 7 vs. 21
  misc_feature: MA Experiment 20000185 PARAMETER Experiment Name: At_Roots__P Parameter: Organism Value: A. thaliana
  misc_feature: MA Experiment 20000185 PARAMETER Experiment Name: At_Roots__P Parameter: Tissue Value: Roots vs. Whole Plant
  misc_feature: MA Experiment ID: 20000234 Result: Down-regulated in Transcription
  misc_feature: MA Experiment 20000234 PARAMETER Experiment Name: At_Siliques_P Parameter: Age (day) Value: 21
  misc_feature: MA Experiment 20000234 PARAMETER Experiment Name: At_Siliques_P Parameter: Organism Value: A. thaliana
  misc_feature: MA Experiment 20000234 PARAMETER Experiment Name: At_Siliques_P Parameter: Plant Line Value: WS
  misc_feature: MA Experiment 20000234 PARAMETER Experiment Name: At_Siliques_P Parameter: Tissue Value: Less Than 5mm Siliques vs. Whole Plant
  misc_feature: MA Experiment ID: 20000235 Result: Down-regulated in Transcription
  misc_feature: MA Experiment 20000235 PARAMETER Experiment Name: At_Siliques_P Parameter: Age (day) Value: 21
  misc_feature: MA Experiment 20000235 PARAMETER Experiment Name: At_Siliques_P Parameter: Organism Value: A. thaliana
  misc_feature: MA Experiment 20000235 PARAMETER Experiment Name: At_Siliques_P Parameter: Plant Line Value: WS
  misc_feature: MA Experiment 20000235 PARAMETER Experiment Name: At_Siliques_P Parameter: Tissue Value: 5-10mm Siliques vs. Whole Plant
  misc_feature: MA Experiment ID: 20000264 Result: Down-regulated in Transcription
  misc_feature: MA Experiment 20000264 PARAMETER Experiment Name: At_Open_Flower_P Parameter: Age (day) Value: 21
  misc_feature: MA Experiment 20000264 PARAMETER Experiment Name: At_Open_Flower_P Parameter: Plant Line Value: WS
  misc_feature: MA Experiment 20000264 PARAMETER Experiment Name: At_Open_Flower_P Parameter: Tissue Value: Open Flower vs. Whole Plant
  misc_feature: MA Experiment ID: 20000265 Result: Down-regulated in Transcription
  misc_feature: MA Experiment 20000265 PARAMETER Experiment Name: At_Open_Flower_P Parameter: Age (day) Value: 21
  misc_feature: MA Experiment 20000265 PARAMETER Experiment Name: At_Open_Flower_P Parameter: Plant Line Value: WS
  misc_feature: MA Experiment 20000265 PARAMETER Experiment Name: At_Open_Flower_P Parameter: Tissue Value: Closed Flower vs. Whole Plant
  misc_feature: MA Experiment ID: 20000267 Result: Up-regulated in Transcription
  misc_feature: MA Experiment 20000267 PARAMETER Experiment Name: At_Drought_P Parameter: Age (day) Value: 7
  misc_feature: MA Experiment 20000267 PARAMETER Experiment Name: At_Drought_P Parameter: Organism Value: A. thaliana
  misc_feature: MA Experiment 20000267 PARAMETER Experiment Name: At_Drought_P Parameter: Plant Line Value: WS
  misc_feature: MA Experiment 20000267 PARAMETER Experiment Name: At_Drought_P Parameter: Timepoint (hr) Value: 6
  misc_feature: MA Experiment 20000267 PARAMETER Experiment Name: At_Drought_P Parameter: Tissue Value: Whole Plant
  misc_feature: MA Experiment 20000267 PARAMETER Experiment Name: At_Drought_P Parameter: Treatment Value: Drought vs. No Drought
  misc_feature: MA Experiment ID: 20000286 Result: Down-regulated in Transcription
  misc_feature: MA Experiment 20000286 PARAMETER Experiment Name: At_Open_Flower_P Parameter: Age (day) Value: 21
  misc_feature: MA Experiment 20000286 PARAMETER Experiment Name: At_Open_Flower_P Parameter: Plant Line Value: WS
  misc_feature: MA Experiment 20000286 PARAMETER Experiment Name: At_Open_Flower_P Parameter: Tissue Value: Half Open vs. Whole Plant
  misc_feature: MA Experiment ID: 20000436 Result: Up-regulated in Transcription
  misc_feature: MA Experiment 20000436 PARAMETER Experiment Name: At_Drought_P Parameter: Age (day) Value: 7
  misc_feature: MA Experiment 20000436 PARAMETER Experiment Name: At_Drought_P Parameter: Organism Value: A. thaliana
  misc_feature: MA Experiment 20000436 PARAMETER Experiment Name: At_Drought_P Parameter: Plant Line Value: WS
  misc_feature: MA Experiment 20000436 PARAMETER Experiment Name: At_Drought_P Parameter: Timepoint (hr) Value: 12
  misc_feature: MA Experiment 20000436 PARAMETER Experiment Name: At_Drought_P Parameter: Tissue Value: Whole Plant
  misc_feature: MA Experiment 20000436 PARAMETER Experiment Name: At_Drought_P Parameter: Treatment Value: Drought vs. No Drought
  misc_feature: MA Experiment ID: 20000437 Result: Up-regulated in Transcription
  misc_feature: MA Experiment 20000437 PARAMETER Experiment Name: At_Drought_P Parameter: Age (day) Value: 8
  misc_feature: MA Experiment 20000437 PARAMETER Experiment Name: At_Drought_P Parameter: Organism Value: A. thaliana
  misc_feature: MA Experiment 20000437 PARAMETER Experiment Name: At_Drought_P Parameter: Plant Line Value: WS
  misc_feature: MA Experiment 20000437 PARAMETER Experiment Name: At_Drought_P Parameter: Timepoint (hr) Value: 24
  misc_feature: MA Experiment 20000437 PARAMETER Experiment Name: At_Drought_P Parameter: Tissue Value: Whole Plant
  misc_feature: MA Experiment 20000437 PARAMETER Experiment Name: At_Drought_P Parameter: Treatment Value: Drought vs. No Drought
  misc_feature: MA Experiment ID: 20000438 Result: Down-regulated in Transcription
  misc_feature: MA Experiment 20000438 PARAMETER Experiment Name: At_Shoots__P Parameter: Age (day) Value: 14
  misc_feature: MA Experiment 20000438 PARAMETER Experiment Name: At_Shoots__P Parameter: Tissue Value: Shoots vs. Whole Plant
  misc_feature: MA Experiment ID: 20000439 Result: Down-regulated in Transcription
  misc_feature: MA Experiment 20000439 PARAMETER Experiment Name: At_Roots__P Parameter: Age (day) Value: 14 vs. 21
  misc_feature: MA Experiment 20000439 PARAMETER Experiment Name: At_Roots__P Parameter: Organism Value: A. thaliana
  misc_feature: MA Experiment 20000439 PARAMETER Experiment Name: At_Roots__P Parameter: Tissue Value: Roots vs. Whole Plant
  misc_feature: MA Experiment ID: 20000441 Result: Up-regulated in Transcription
  misc_feature: MA Experiment 20000441 PARAMETER Experiment Name: At_1uM_BR-BRZ__P Parameter: Tissue Value: Shoot Apices
  misc_feature: MA Experiment 20000441 PARAMETER Experiment Name: At_1uM_BR-BRZ__P Parameter: Treatment Value: 1uM BR vs. No Treatment
  misc_feature: MA Experiment ID: 20000451 Result: Down-regulated in Transcription
  misc_feature: MA Experiment 20000451 PARAMETER Experiment Name: At_CS6879_Shoots-Roots_P Parameter: Age (day) Value: 14
  misc_feature: MA Experiment 20000451 PARAMETER Experiment Name: At_CS6879_Shoots-Roots_P Parameter: Organism Value: A. thaliana
  misc_feature: MA Experiment 20000451 PARAMETER Experiment Name: At_CS6879_Shoots-Roots_P Parameter: Plant Line Value: CS6879 vs. WS
  misc_feature: MA Experiment 20000451 PARAMETER Experiment Name: At_CS6879_Shoots-Roots_P Parameter: Tissue Value: Roots
  misc_feature: MA Experiment ID: 20000460 Result: Up-regulated in Transcription
  misc_feature: MA Experiment 20000460 PARAMETER Experiment Name: At_10percent_PEG_P Parameter: Age (day) Value: 12
  misc_feature: MA Experiment 20000460 PARAMETER Experiment Name: At_10percent_PEG_P Parameter: Organism Value: A. thaliana
  misc_feature: MA Experiment 20000460 PARAMETER Experiment Name: At_10percent_PEG_P Parameter: Plant Line Value: WS
  misc_feature: MA Experiment 20000460 PARAMETER Experiment Name: At_10percent_PEG_P Parameter: Timepoint (day) Value: 12
  misc_feature: MA Experiment 20000460 PARAMETER Experiment Name: At_10percent_PEG_P Parameter: Tissue Value: Whole Plant
  misc_feature: MA Experiment 20000460 PARAMETER Experiment Name: At_10percent_PEG_P Parameter: Treatment Value: 10percent PEG vs. No Treatment
  misc_feature: MA Experiment ID: 20000527 Result: Up-regulated in Transcription
  misc_feature: MA Experiment 20000527 PARAMETER Experiment Name: At_10percent_PEG_P Parameter: Age (day) Value: 20
  misc_feature: MA Experiment 20000527 PARAMETER Experiment Name: At_10percent_PEG_P Parameter: Organism Value: A. thaliana
  misc_feature: MA Experiment 20000527 PARAMETER Experiment Name: At_10percent_PEG_P Parameter: Plant Line Value: WS
  misc_feature: MA Experiment 20000527 PARAMETER Experiment Name: At_10percent_PEG_P Parameter: Timepoint (day) Value: 20
  misc_feature: MA Experiment 20000527 PARAMETER Experiment Name: At_10percent_PEG_P Parameter: Tissue Value: Whole Plant
  misc_feature: MA Experiment 20000527 PARAMETER Experiment Name: At_10percent_PEG_P Parameter: Treatment Value: 10percent PEG vs. No Treatment
  misc_feature: MA Experiment ID: 20000573 Result: Down-regulated in Transcription
  misc_feature: MA Experiment 20000573 PARAMETER Experiment Name: At_100uM_ABA_Mutants__P Parameter: Organism Value: A. thaliana
  misc_feature: MA Experiment 20000573 PARAMETER Experiment Name: At_100uM_ABA_Mutants__P Parameter: Plant Line Value: CS22 vs. Ler wt
  misc_feature: MA Experiment 20000573 PARAMETER Experiment Name: At_100uM_ABA_Mutants__P Parameter: Timepoint (hr) Value: N/A
  misc_feature: MA Experiment 20000573 PARAMETER Experiment Name: At_100uM_ABA_Mutants__P Parameter: Tissue Value: Whole Plant
  misc_feature: MA Experiment 20000573 PARAMETER Experiment Name: At_100uM_ABA_Mutants__P Parameter: Treatment Value: None
  misc_feature: MA Experiment ID: 20000574 Result: Down-regulated in Transcription
  misc_feature: MA Experiment 20000574 PARAMETER Experiment Name: At_100uM_ABA_Mutants__P Parameter: Organism Value: A. thaliana
  misc_feature: MA Experiment 20000574 PARAMETER Experiment Name: At_100uM_ABA_Mutants__P Parameter: Plant Line Value: CS23 vs. Ler wt
  misc_feature: MA Experiment 20000574 PARAMETER Experiment Name: At_100uM_ABA_Mutants__P Parameter: Timepoint (hr) Value: N/A
  misc_feature: MA Experiment 20000574 PARAMETER Experiment Name: At_100uM_ABA_Mutants__P Parameter: Tissue Value: Whole Plant
  misc_feature: MA Experiment 20000574 PARAMETER Experiment Name: At_100uM_ABA_Mutants__P Parameter: Treatment Value: None
  misc_feature: MA Experiment ID: 20000606 Result: Up-regulated in Transcription
  misc_feature: MA Experiment 20000606 PARAMETER Experiment Name: At_CS8548_Mutant_P Parameter: Age (day) Value: 14
  misc_feature: MA Experiment 20000606 PARAMETER Experiment Name: At_CS8548_Mutant_P Parameter: Plant Line Value: CS8548 vs. wt
  misc_feature: MA Experiment 20000606 PARAMETER Experiment Name: At_CS8548_Mutant_P Parameter: Tissue Value: Whole Plant
  misc_feature: MA Experiment ID: 20000709 Result: Up-regulated in Transcription
  misc_feature: MA Experiment 20000709 PARAMETER Experiment Name: At_15mM_NH4NO3_L-to-H_P Parameter: Age (hr) Value: 14
  misc_feature: MA Experiment 20000709 PARAMETER Experiment Name: At_15mM_NH4NO3_L-to-H_P Parameter: Organism Value: A. thaliana
  misc_feature: MA Experiment 20000709 PARAMETER Experiment Name: At_15mM_NH4NO3_L-to-H_P Parameter: Plant Line Value: WS
  misc_feature: MA Experiment 20000709 PARAMETER Experiment Name: At_15mM_NH4NO3_L-to-H_P Parameter: Timepoint (hr) Value: 4
  misc_feature: MA Experiment 20000709 PARAMETER Experiment Name: At_15mM_NH4NO3_L-to-H_P Parameter: Tissue Value: Aerial
  misc_feature: MA Experiment 20000709 PARAMETER Experiment Name: At_15mM_NH4NO3_L-to-H_P Parameter: Treatment Value: 15mM NH4NO3 vs. 30mM Mannitol
  misc_feature: MA Experiment ID: 20000794 Result: Down-regulated in Transcription
  misc_feature: MA Experiment 20000794 PARAMETER Experiment Name: At_Petals_P Parameter: Age (day) Value: 23-25 days
  misc_feature: MA Experiment 20000794 PARAMETER Experiment Name: At_Petals_P Parameter: Plant Line Value: WS
  misc_feature: MA Experiment 20000794 PARAMETER Experiment Name: At_Petals_P Parameter: Tissue Value: Petals vs. Whole plant
  misc_feature: MA Experiment ID: 20001247 Result: Up-regulated in Transcription
  misc_feature: MA Experiment 20001247 PARAMETER Experiment Name: At_Far-red-induction_P Parameter: Age (day) Value: 7
  misc_feature: MA Experiment 20001247 PARAMETER Experiment Name: At_Far-red-induction_P Parameter: Light Value: Far-red vs. White
  misc_feature: MA Experiment 20001247 PARAMETER Experiment Name: At_Far-red-induction_P Parameter: Organism Value: A. thaliana
  misc_feature: MA Experiment 20001247 PARAMETER Experiment Name: At_Far-red-induction_P Parameter: Plant Line Value: Columbia
  misc_feature: MA Experiment 20001247 PARAMETER Experiment Name: At_Far-red-induction_P Parameter: Timepoint (hr) Value: 1
  misc_feature: MA Experiment 20001247 PARAMETER Experiment Name: At_Far-red-induction_P Parameter: Tissue Value: Whole Plant
  misc_feature: MA Experiment ID: 20001450 Result: Up-regulated in Transcription
  misc_feature: MA Experiment 20001450 PARAMETER Experiment Name: At_Far-red-induction_P Parameter: Age (day) Value: 7
  misc_feature: MA Experiment 20001450 PARAMETER Experiment Name: At_Far-red-induction_P Parameter: Light Value: Far-red vs. White
  misc_feature: MA Experiment 20001450 PARAMETER Experiment Name: At_Far-red-induction_P Parameter: Organism Value: A. thaliana
  misc_feature: MA Experiment 20001450 PARAMETER Experiment Name: At_Far-red-induction_P Parameter: Plant Line Value: Columbia
  misc_feature: MA Experiment 20001450 PARAMETER Experiment Name: At_Far-red-induction_P Parameter: Timepoint (hr) Value: 8
  misc_feature: MA Experiment 20001450 PARAMETER Experiment Name: At_Far-red-induction_P Parameter: Tissue Value: Whole Plant
  misc_feature: MA Experiment ID: 20001451 Result: Up-regulated in Transcription
  misc_feature: MA Experiment 20001451 PARAMETER Experiment Name: At_Far-red-induction_P Parameter: Age (day) Value: 7
  misc_feature: MA Experiment 20001451 PARAMETER Experiment Name: At_Far-red-induction_P Parameter: Light Value: Far-red vs. White
  misc_feature: MA Experiment 20001451 PARAMETER Experiment Name: At_Far-red-induction_P Parameter: Organism Value: A. thaliana
  misc_feature: MA Experiment 20001451 PARAMETER Experiment Name: At_Far-red-induction_P Parameter: Plant Line Value: Columbia
  misc_feature: MA Experiment 20001451 PARAMETER Experiment Name: At_Far-red-induction_P Parameter: Timepoint (hr) Value: 24
  misc_feature: MA Experiment 20001451 PARAMETER Experiment Name: At_Far-red-induction_P Parameter: Tissue Value: Whole Plant
  misc_feature: MA Experiment ID: 20001554 Result: Up-regulated in Transcription
  misc_feature: MA Experiment 20001554 PARAMETER Experiment Name: At_Drought_Soil_Dry_P Parameter: Age (day) Value: 21
  misc_feature: MA Experiment 20001554 PARAMETER Experiment Name: At_Drought_Soil_Dry_P Parameter: Organism Value: A. thaliana
  misc_feature: MA Experiment 20001554 PARAMETER Experiment Name: At_Drought_Soil_Dry_P Parameter: Plant Line Value: WS
  misc_feature: MA Experiment 20001554 PARAMETER Experiment Name: At_Drought_Soil_Dry_P Parameter: Post Timepoint (hr) Value: None
  misc_feature: MA Experiment 20001554 PARAMETER Experiment Name: At_Drought_Soil_Dry_P Parameter: Post-Treatment Value: None
  misc_feature: MA Experiment 20001554 PARAMETER Experiment Name: At_Drought_Soil_Dry_P Parameter: Timepoint (day) Value: 7
  misc_feature: MA Experiment 20001554 PARAMETER Experiment Name: At_Drought_Soil_Dry_P Parameter: Treatment Value: Drought vs. No Drought
  misc_feature: MA Experiment ID: 20001557 Result: Up-regulated in Transcription
  misc_feature: MA Experiment 20001557 PARAMETER Experiment Name: At_Drought_Soil_Dry_P Parameter: Age (day) Value: 27
  misc_feature: MA Experiment 20001557 PARAMETER Experiment Name: At_Drought_Soil_Dry_P Parameter: Organism Value: A. thaliana
  misc_feature: MA Experiment 20001557 PARAMETER Experiment Name: At_Drought_Soil_Dry_P Parameter: Plant Line Value: WS
  misc_feature: MA Experiment 20001557 PARAMETER Experiment Name: At_Drought_Soil_Dry_P Parameter: Post Timepoint (hr) Value: 3
  misc_feature: MA Experiment 20001557 PARAMETER Experiment Name: At_Drought_Soil_Dry_P Parameter: Post-Treatment Value: Re-Water vs. No Drought
  misc_feature: MA Experiment 20001557 PARAMETER Experiment Name: At_Drought_Soil_Dry_P Parameter: Timepoint (day) Value: 13
  misc_feature: MA Experiment 20001557 PARAMETER Experiment Name: At_Drought_Soil_Dry_P Parameter: Treatment Value: Drought vs. No Drought
  misc_feature: MA Experiment ID: 20001905 Result: Up-regulated in Transcription
  misc_feature: MA Experiment 20001905 PARAMETER Experiment Name: At_Drought_Reproduction_P Parameter: Age (day) Value: 40
  misc_feature: MA Experiment 20001905 PARAMETER Experiment Name: At_Drought_Reproduction_P Parameter: Organism Value: A. thaliana
  misc_feature: MA Experiment 20001905 PARAMETER Experiment Name: At_Drought_Reproduction_P Parameter: Plant Line Value: WS
  misc_feature: MA Experiment 20001905 PARAMETER Experiment Name: At_Drought_Reproduction_P Parameter: Timepoint (day) Value: 10
  misc_feature: MA Experiment 20001905 PARAMETER Experiment Name: At_Drought_Reproduction_P Parameter: Tissue Value: Rosettes
  misc_feature: MA Experiment 20001905 PARAMETER Experiment Name: At_Drought_Reproduction_P Parameter: Treatment Value: Drought vs. No Drought
  misc_feature: MA Experiment ID: 20001911 Result: Up-regulated in Transcription
  misc_feature: MA Experiment 20001911 PARAMETER Experiment Name: At_Drought_Reproduction_P Parameter: Age (day) Value: 40
  misc_feature: MA Experiment 20001911 PARAMETER Experiment Name: At_Drought_Reproduction_P Parameter: Organism Value: A. thaliana
  misc_feature: MA Experiment 20001911 PARAMETER Experiment Name: At_Drought_Reproduction_P Parameter: Plant Line Value: WS
  misc_feature: MA Experiment 20001911 PARAMETER Experiment Name: At_Drought_Reproduction_P Parameter: Timepoint (day) Value: 10
  misc_feature: MA Experiment 20001911 PARAMETER Experiment Name: At_Drought_Reproduction_P Parameter: Tissue Value: Flowers
  misc_feature: MA Experiment 20001911 PARAMETER Experiment Name: At_Drought_Reproduction_P Parameter: Treatment Value: Drought vs. No Drought
  misc_feature: Pfam Name: Hs1pro-1_C Pfam Description: Hs1pro-1 protein C-terminus
aaatatattcatcaaataaacaaaaatctctgtatttttttttaaaaaagatggctgatttggatttacagaggaagatggtatctccgaagctccacgtcaccattcctgagccgtgtaagctctcctccgtctcttctccaatctcctcctcttcttccgccgcttgctctgcttacgagctttacctccgtttgcctgaacttagaaacctctggtcctctctctatttccctcactggatctccgagcccgttctcaaaccagctcttcaagctcttgagatcactttccggttaatcctcaccgttgcttctgacacacgtccttacatcaaccgccgcgaatggatccgacggttggattccctcactaccagccagataaaaatcgtggcggctatctgcggagatgaagacaactacgaagagaacgtatcggcggctccggtcagcaatggctggagctcgttgagtttgctttcggagatcgccacgtgtcgtacatcggagagtgttggacagaagatcttgtctacgatcgagaatgagatgcgttggtgtaagtatacgctcggtttaggagaaccaaacctcgccggaaaaccgtatcttcaatacgacgccgtttgtctcccggaggagctacatagcctcaagaacaatccttacgcagatcacatcgagaaccaagagaatcaaatgctctacactagtcatcagattcttgaatcgtggatttacgtttctgtgaatcttttatatagaatcgaatcgagaatcgaagagggaaaattcgaaaaagcttcttcagacgtctacttgttggagagaatctggaagcttctatcagagattgaagatttacacattcttatggatcctgaagatttcttgaaggtgaagaaacagttacaaatcaaatcgacgtttccaaacgacgcattttgttttaggtcaaagggcttagtagagatggcgaagatgtccaaagagctgagacagaaagtgccagctgttcttgaggtggaggtggatcccaccggaggtccgaggttgcaagaggcggcgatgaagctttactcgaggaaaacagagtacgagaagatacatttgcttcagggaatgcaggccgtggagtctgcagccaagagattcttcttcggataccagaagttggttgcagcgatgattgggaatgcagaggcgaatgcaaatagaacggtggcgaatcacgagtcctatgattcactgactcaggtgtttatggagccaccgtattacccgagcctagacgccgcaaagacatttctgggagagttctggagccaattgtgatgcaatggaagatattgacacaactacttaacaaacactatcaacagatgtaacactactgaaatttttggaagcatctaacgatcagtgtatgaatatatgtaactcatttttttt

SEQ ID NO: 84787 - protein, 444 aa, Arabidopsis thaliana; identical to SEQ ID NO: 42618
  peptide (1)..(444): Ceres Seq. ID no. 12677053
  misc_feature: Pfam Name: Hs1pro-1_C Pfam Description: Hs1pro-1 protein C-terminus
  misc_feature (17)..(444): Homolog of NCBI NO: 15228750 NR Description: nematode resistance protein-like protein; protein At3g55840.1, supported by cDNA: 149697., supported by cDNA: supported by cDNA: gi_17979106 [Arabidopsis thaliana]
  misc_feature (17)..(444): Homolog of NCBI NO: 21553529 NR Description: nematode resistance protein-like protein
  misc_feature (17)..(444): Homolog of NCBI NO: 21593007 NR Description: putative nematode-resistance protein [Arabidopsis
  misc_feature (17)..(444): Homolog of NCBI NO: 27311581 NR Description: Unknown protein [Arabidopsis thaliana]
  misc_feature (17)..(444): Homolog of NCBI NO: 15225612 NR Description: putative nematode-resistance protein; protein id:

SEQ ID NO: 84788 - protein, 428 aa, Arabidopsis thaliana; identical to SEQ ID NO: 42619
  peptide (1)..(428): Ceres Seq. ID no. 12677054
  misc_feature: Pfam Name: Hs1pro-1_C Pfam Description: Hs1pro-1 protein C-terminus
  misc_feature (1)..(428): Homolog of NCBI NO: 15228750 NR Description: nematode resistance protein-like protein; protein At3g55840.1, supported by cDNA: 149697., supported by cDNA: supported by cDNA: gi_17979106 [Arabidopsis thaliana]
  misc_feature (1)..(428): Homolog of NCBI NO: 21553529 NR Description: nematode resistance protein-like protein
  misc_feature (1)..(428): Homolog of NCBI NO: 21593007 NR Description: putative nematode-resistance protein [Arabidopsis
  misc_feature (1)..(428): Homolog of NCBI NO: 27311581 NR Description: Unknown protein [Arabidopsis thaliana]
  misc_feature (1)..(428): Homolog of NCBI NO: 15225612 NR Description: putative nematode-resistance protein; protein id:

SEQ ID NO: 84789 - protein, 419 aa, Arabidopsis thaliana; identical to SEQ ID NO: 42620
  peptide (1)..(419): Ceres Seq. ID no. 12677055
  misc_feature: Pfam Name: Hs1pro-1_C Pfam Description: Hs1pro-1 protein C-terminus
  misc_feature (1)..(419): Homolog of NCBI NO: 15228750 NR Description: nematode resistance protein-like protein; protein At3g55840.1, supported by cDNA: 149697., supported by cDNA: supported by cDNA: gi_17979106 [Arabidopsis thaliana]
  misc_feature (1)..(419): Homolog of NCBI NO: 21553529 NR Description: nematode resistance protein-like protein
  misc_feature (1)..(419): Homolog of NCBI NO: 21593007 NR Description: putative nematode-resistance protein [Arabidopsis
  misc_feature (1)..(419): Homolog of NCBI NO: 27311581 NR Description: Unknown protein [Arabidopsis thaliana]
  misc_feature (1)..(419): Homolog of NCBI NO: 15225612 NR Description: putative nematode-resistance protein; protein id:

SEQ ID NO: 84790 - DNA, 1145 bp, Arabidopsis thaliana
  misc_feature (1)..(1145): Ceres Seq. ID no. 12677060
  misc_feature: MA Experiment ID: 20000180 Result: Up-regulated in Transcription
  misc_feature: MA Experiment 20000180 PARAMETER Experiment Name: At_Germinating_Seeds_P Parameter: Age (hr) Value: 24 vs. 0
  misc_feature: MA Experiment 20000180 PARAMETER Experiment Name: At_Germinating_Seeds_P Parameter: Tissue Value: Germinating Seeds
  misc_feature: MA Experiment ID: 20000185 Result: Down-regulated in Transcription
  misc_feature: MA Experiment 20000185 PARAMETER Experiment Name: At_Roots__P Parameter: Age (day) Value: 7 vs. 21
  misc_feature: MA Experiment 20000185 PARAMETER Experiment Name: At_Roots__P Parameter: Organism Value: A. thaliana
  misc_feature: MA Experiment 20000185 PARAMETER Experiment Name: At_Roots__P Parameter: Tissue Value: Roots vs. Whole Plant
  misc_feature: MA Experiment ID: 20000234 Result: Up-regulated in Transcription
  misc_feature: MA Experiment 20000234 PARAMETER Experiment Name: At_Siliques_P Parameter: Age (day) Value: 21
  misc_feature: MA Experiment 20000234 PARAMETER Experiment Name: At_Siliques_P Parameter: Organism Value: A. thaliana
  misc_feature: MA Experiment 20000234 PARAMETER Experiment Name: At_Siliques_P Parameter: Plant Line Value: WS
  misc_feature: MA Experiment 20000234 PARAMETER Experiment Name: At_Siliques_P Parameter: Tissue Value: Less Than 5mm Siliques vs. Whole Plant
  misc_feature: MA Experiment ID: 20000265 Result: Up-regulated in Transcription
  misc_feature: MA Experiment 20000265 PARAMETER Experiment Name: At_Open_Flower_P Parameter: Age (day) Value: 21
  misc_feature: MA Experiment 20000265 PARAMETER Experiment Name: At_Open_Flower_P Parameter: Plant Line Value: WS
  misc_feature: MA Experiment 20000265 PARAMETER Experiment Name: At_Open_Flower_P Parameter: Tissue Value: Closed Flower vs. Whole Plant
  misc_feature: MA Experiment ID: 20000286 Result: Up-regulated in Transcription
  misc_feature: MA Experiment 20000286 PARAMETER Experiment Name: At_Open_Flower_P Parameter: Age (day) Value: 21
  misc_feature: MA Experiment 20000286 PARAMETER Experiment Name: At_Open_Flower_P Parameter: Plant Line Value: WS
  misc_feature: MA Experiment 20000286 PARAMETER Experiment Name: At_Open_Flower_P Parameter: Tissue Value: Half Open vs. Whole Plant
  misc_feature: MA Experiment ID: 20000437 Result: Down-regulated in Transcription
  misc_feature: MA Experiment 20000437 PARAMETER Experiment Name: At_Drought_P Parameter: Age (day) Value: 8
  misc_feature: MA Experiment 20000437 PARAMETER Experiment Name: At_Drought_P Parameter: Organism Value: A. thaliana
  misc_feature: MA Experiment 20000437 PARAMETER Experiment Name: At_Drought_P Parameter: Plant Line Value: WS
  misc_feature: MA Experiment 20000437 PARAMETER Experiment Name: At_Drought_P Parameter: Timepoint (hr) Value: 24
  misc_feature: MA Experiment 20000437 PARAMETER Experiment Name: At_Drought_P Parameter: Tissue Value: Whole Plant
  misc_feature: MA Experiment 20000437 PARAMETER Experiment Name: At_Drought_P Parameter: Treatment Value: Drought vs. No Drought
  misc_feature: MA Experiment ID: 20000439 Result: Down-regulated in Transcription
  misc_feature: MA Experiment 20000439 PARAMETER Experiment Name: At_Roots__P Parameter: Age (day) Value: 14 vs. 21
  misc_feature: MA Experiment 20000439 PARAMETER Experiment Name: At_Roots__P Parameter: Organism Value: A. thaliana
  misc_feature: MA Experiment 20000439 PARAMETER Experiment Name: At_Roots__P Parameter: Tissue Value: Roots vs. Whole Plant
  misc_feature: MA Experiment ID: 20000495 Result: Up-regulated in Transcription
  misc_feature: MA Experiment 20000495 PARAMETER Experiment Name: At_Guard_Cells_P Parameter: Harvest Date Value: 8/2/2002
  misc_feature: MA Experiment 20000495 PARAMETER Experiment Name: At_Guard_Cells_P Parameter: Organism Value: A. thaliana
  misc_feature: MA Experiment 20000495 PARAMETER Experiment Name: At_Guard_Cells_P Parameter: Tissue Value: Guard Cells vs. Leaves
  misc_feature: MA Experiment ID: 20001248 Result: Down-regulated in Transcription
  misc_feature: MA Experiment 20001248 PARAMETER Experiment Name: At_Far-red-induction_P Parameter: Age (day) Value: 7
  misc_feature: MA Experiment 20001248 PARAMETER Experiment Name: At_Far-red-induction_P Parameter: Light Value: Far-red vs. White
  misc_feature: MA Experiment 20001248 PARAMETER Experiment Name: At_Far-red-induction_P Parameter: Organism Value: A. thaliana
  misc_feature: MA Experiment 20001248 PARAMETER Experiment Name: At_Far-red-induction_P Parameter: Plant Line Value: Columbia
  misc_feature: MA Experiment 20001248 PARAMETER Experiment Name: At_Far-red-induction_P Parameter: Timepoint (hr) Value: 4
  misc_feature: MA Experiment 20001248 PARAMETER Experiment Name: At_Far-red-induction_P Parameter: Tissue Value: Whole Plant
  misc_feature: MA Experiment ID: 20001555 Result: Down-regulated in Transcription
  misc_feature: MA Experiment 20001555 PARAMETER Experiment Name: At_Drought_Soil_Dry_P Parameter: Age (day) Value: 24
  misc_feature: MA Experiment 20001555 PARAMETER Experiment Name: At_Drought_Soil_Dry_P Parameter: Organism Value: A. thaliana
  misc_feature: MA Experiment 20001555 PARAMETER Experiment Name: At_Drought_Soil_Dry_P Parameter: Plant Line Value: WS
  misc_feature: MA Experiment 20001555 PARAMETER Experiment Name: At_Drought_Soil_Dry_P Parameter: Post Timepoint (hr) Value: None
  misc_feature: MA Experiment 20001555 PARAMETER Experiment Name: At_Drought_Soil_Dry_P Parameter: Post-Treatment Value: None
  misc_feature: MA Experiment 20001555 PARAMETER Experiment Name: At_Drought_Soil_Dry_P Parameter: Timepoint (day) Value: 10
  misc_feature: MA Experiment 20001555 PARAMETER Experiment Name: At_Drought_Soil_Dry_P Parameter: Treatment Value: Drought vs. No Drought
acacatcttaaaaagtaaaaacacattcatctatccaacaaaaaaaaagaaaggagaaatggaaggaatcgatcatagaatggtgagtgtcaatggcataacaatgcacattgccgagaaaggtcccaaagaaggacctgtggtgcttctcctccatggattccctgatctctggtacacgtggcgtcaccagattagtgggttatcatctctaggttaccgcgctgtagctccagacctccgaggctacggagactctgattcgccggagtctttctccgagtacacgtgtcttaacgtcgttggggacctcgtagctcttctggacagtgttgctggaaatcaagagaaggtgtttctggtcggtcatgattggggagccattatcggatggtttctctgtttgtttcgacctgaaaagattaacggctttgtgtgtttgagtgtgccgtatagatcaagaaaccctaaagtcaagcccgttcaagggttcaaggctgtatttggagatgattactacatttgtagatttcaggaaccggggaagattgaaggagagattgcaagtgcagatccaagaatatttctgaggaacctcttcacagggaggacactcggtccgccgattttacctaaggataatccctttggggaaaaacctaaccctaatagcgaaaacattgaattgcctgaatggttttctaagaaagatctcgatttctatgtctccaaattcgagaaggcaggatttaccggtggattgaactactacagagccatggatctgaattgggagctcactgcaccatggaccggagctaagattcaagttccagtgaagttcatgacaggtgacttcgacatggtgtacaccacaccagggatgaaagagtacattcacggtggtggatttgctgcagatgttccaactcttcaagagatagtggtgattgaagatgctggtcacttcgttaaccaagagaaacctcaagaggtcactgctcacatcaatgacttcttcaccaagcttcgggacaacaacaaaagcttttagagttctcgtttggttctattatgttggctctcaaaacaagttggttcttgcatgtgttgtttcgacaagattttgaataagacttggcatt

SEQ ID NO: 84791 - protein, 350 aa, Arabidopsis thaliana; identical to SEQ ID NO: 26920
  peptide (1)..(350): Ceres Seq. ID no. 12677061
  misc_feature (73)..(338): Pfam Name: alpha/beta hydrolase fold Pfam Description: alpha/beta hydrolase fold
  misc_feature (20)..(350): Homolog of NCBI NO: 15230018 NR Description: putative epoxide hydrolase; protein id: supported by cDNA: 1355., supported by cDNA: gi_17979164 thaliana] >gi|6714450|gb|AAF26137.1|AC011620_13 putative epoxide

SEQ ID NO: 84792 - protein, 331 aa, Arabidopsis thaliana; identical to SEQ ID NO: 21476
  peptide (1)..(331): Ceres Seq. ID no. 12677062
  misc_feature (54)..(319): Pfam Name: alpha/beta hydrolase fold Pfam Description: alpha/beta hydrolase fold
  misc_feature (1)..(331): Homolog of NCBI NO: 15230018 NR Description: putative epoxide hydrolase; protein id: supported by cDNA: 1355., supported by cDNA: gi_17979164 thaliana] >gi|6714450|gb|AAF26137.1|AC011620_13 putative epoxide

SEQ ID NO: 84793 - protein, 324 aa, Arabidopsis thaliana; identical to SEQ ID NO: 21477
  peptide (1)..(324): Ceres Seq. ID no. 12677063
  misc_feature (47)..(312): Pfam Name: alpha/beta hydrolase fold Pfam Description: alpha/beta hydrolase fold
  misc_feature (1)..(324): Homolog of NCBI NO: 15230018 NR Description: putative epoxide hydrolase; protein id: supported by cDNA: 1355., supported by cDNA: gi_17979164 thaliana] >gi|6714450|gb|AAF26137.1|AC011620_13 putative epoxide

SEQ ID NO: 84794 - DNA, 1290 bp, Arabidopsis thaliana
  misc_feature (1)..(1290): Ceres Seq. ID no. 12677064
  misc_feature: MA Experiment ID: 108435 Result: Up-regulated in Transcription
  misc_feature: MA Experiment 108435 PARAMETER Experiment Name: At_stm_Mutants_cDNA_P Parameter: Plant Line Value: wt Landsburg vs stm
  misc_feature: MA Experiment 108435 PARAMETER Experiment Name: At_stm_Mutants_cDNA_P Parameter: Tissue Value: Shoot Apical Meristem Region
  misc_feature: MA Experiment ID: 108461 Result: Up-regulated in Transcription
  misc_feature: MA Experiment 108461 PARAMETER Experiment Name: At_Germinating_Seeds_cDNA_P Parameter: Age (day) Value: 1 vs. 0
  misc_feature: MA Experiment 108461 PARAMETER Experiment Name: At_Germinating_Seeds_cDNA_P Parameter: Tissue Value: Germinating Seeds
  misc_feature: MA Experiment ID: 108462 Result: Up-regulated in Transcription
  misc_feature: MA Experiment 108462 PARAMETER Experiment Name: At_Germinating_Seeds_cDNA_P Parameter: Age (day) Value: 2 vs. 0
  misc_feature: MA Experiment 108462 PARAMETER Experiment Name: At_Germinating_Seeds_cDNA_P Parameter: Tissue Value: Germinating Seeds
  misc_feature: MA Experiment ID: 108473 Result: Down-regulated in Transcription
  misc_feature: MA Experiment 108473 PARAMETER Experiment Name: At_Drought_Flowers_cDNA_P Parameter: Timepoint (hr) Value: 7 d
  misc_feature: MA Experiment 108473 PARAMETER Experiment Name: At_Drought_Flowers_cDNA_P Parameter: Tissue Value: Flower
  misc_feature: MA Experiment 108473 PARAMETER Experiment Name: At_Drought_Flowers_cDNA_P Parameter: Treatment Value: Drought vs. No Drought
  misc_feature: MA Experiment ID: 20000069 Result: Down-regulated in Transcription
  misc_feature: MA Experiment 20000069 PARAMETER Experiment Name: At_100uM_ABA_Mutants_cDNA_P Parameter: Plant Line Value: CS23
  misc_feature: MA Experiment 20000069 PARAMETER Experiment Name: At_100uM_ABA_Mutants_cDNA_P Parameter: Timepoint (hr) Value: 6
  misc_feature: MA Experiment 20000069 PARAMETER Experiment Name: At_100uM_ABA_Mutants_cDNA_P Parameter: Tissue Value: Aerial
  misc_feature: MA Experiment 20000069 PARAMETER Experiment Name: At_100uM_ABA_Mutants_cDNA_P Parameter: Treatment Value: 100uM ABA vs. No Treatment
  misc_feature: MA Experiment ID: 20000111 Result: Down-regulated in Transcription
  misc_feature: MA Experiment 20000111 PARAMETER Experiment Name: At_42deg_Heat_cDNA_P Parameter: Temperature (deg C) Value: 42 vs. 22
  misc_feature: MA Experiment 20000111 PARAMETER Experiment Name: At_42deg_Heat_cDNA_P Parameter: Timepoint (hr) Value: 6
  misc_feature: MA Experiment 20000111 PARAMETER Experiment Name: At_42deg_Heat_cDNA_P Parameter: Tissue Value: Aerial
  misc_feature: MA Experiment ID: 20000144 Result: Down-regulated in Transcription
  misc_feature: MA Experiment 20000144 PARAMETER Experiment Name: At_42deg_Heat_cDNA_P Parameter: Temperature (deg C) Value: 42 vs. 22
  misc_feature: MA Experiment 20000144 PARAMETER Experiment Name: At_42deg_Heat_cDNA_P Parameter: Timepoint (hr) Value: 1
  misc_feature: MA Experiment 20000144 PARAMETER Experiment Name: At_42deg_Heat_cDNA_P Parameter: Tissue Value: Aerial
  misc_feature: MA Experiment ID: 20000180 Result: Up-regulated in Transcription
  misc_feature: MA Experiment 20000180 PARAMETER Experiment Name: At_Germinating_Seeds_P Parameter: Age (hr) Value: 24 vs. 0
  misc_feature: MA Experiment 20000180 PARAMETER Experiment Name: At_Germinating_Seeds_P Parameter: Tissue Value: Germinating Seeds
  misc_feature: MA Experiment ID: 20000185 Result: Down-regulated in Transcription
  misc_feature: MA Experiment 20000185 PARAMETER Experiment Name: At_Roots__P Parameter: Age (day) Value: 7 vs. 21
  misc_feature: MA Experiment 20000185 PARAMETER Experiment Name: At_Roots__P Parameter: Organism Value: A. thaliana
  misc_feature: MA Experiment 20000185 PARAMETER Experiment Name: At_Roots__P Parameter: Tissue Value: Roots vs. Whole Plant
  misc_feature: MA Experiment ID: 20000224 Result: Up-regulated in Transcription
  misc_feature: MA Experiment ID: 20000234 Result: Up-regulated in Transcription
  misc_feature: MA Experiment 20000234 PARAMETER Experiment Name: At_Siliques_P Parameter: Age (day) Value: 21
  misc_feature: MA Experiment 20000234 PARAMETER Experiment Name: At_Siliques_P Parameter: Organism Value: A. thaliana
  misc_feature: MA Experiment 20000234 PARAMETER Experiment Name: At_Siliques_P Parameter: Plant Line Value: WS
  misc_feature: MA Experiment 20000234 PARAMETER Experiment Name: At_Siliques_P Parameter: Tissue Value: Less Than 5mm Siliques vs. Whole Plant
  misc_feature: MA Experiment ID: 20000265 Result: Up-regulated in Transcription
  misc_feature: MA Experiment 20000265 PARAMETER Experiment Name: At_Open_Flower_P Parameter: Age (day) Value: 21
  misc_feature: MA Experiment 20000265 PARAMETER Experiment Name: At_Open_Flower_P Parameter: Plant Line Value: WS
  misc_feature: MA Experiment 20000265 PARAMETER Experiment Name: At_Open_Flower_P Parameter: Tissue Value: Closed Flower vs. Whole Plant
  misc_feature: MA Experiment ID: 20000286 Result: Up-regulated in Transcription
  misc_feature: MA Experiment 20000286 PARAMETER Experiment Name: At_Open_Flower_P Parameter: Age (day) Value: 21
  misc_feature: MA Experiment 20000286 PARAMETER Experiment Name: At_Open_Flower_P Parameter: Plant Line Value: WS
  misc_feature: MA Experiment 20000286 PARAMETER Experiment Name: At_Open_Flower_P Parameter: Tissue Value: Half Open vs. Whole Plant
  misc_feature: MA Experiment ID: 20000437 Result: Down-regulated in Transcription
  misc_feature: MA Experiment 20000437 PARAMETER Experiment Name: At_Drought_P Parameter: Age (day) Value: 8
  misc_feature: MA Experiment 20000437 PARAMETER Experiment Name: At_Drought_P Parameter: Organism Value: A. thaliana
  misc_feature: MA Experiment 20000437 PARAMETER Experiment Name: At_Drought_P Parameter: Plant Line Value: WS
  misc_feature: MA Experiment 20000437 PARAMETER Experiment Name: At_Drought_P Parameter: Timepoint (hr) Value: 24
  misc_feature: MA Experiment 20000437 PARAMETER Experiment Name: At_Drought_P Parameter: Tissue Value: Whole Plant
  misc_feature: MA Experiment 20000437 PARAMETER Experiment Name: At_Drought_P Parameter: Treatment Value: Drought vs. No Drought
  misc_feature: MA Experiment ID: 20000439 Result: Down-regulated in Transcription
  misc_feature: MA Experiment 20000439 PARAMETER Experiment Name: At_Roots__P Parameter: Age (day) Value: 14 vs. 21
  misc_feature: MA Experiment 20000439 PARAMETER Experiment Name: At_Roots__P Parameter: Organism Value: A. thaliana
  misc_feature: MA Experiment 20000439 PARAMETER Experiment Name: At_Roots__P Parameter: Tissue Value: Roots vs. Whole Plant
  misc_feature: MA Experiment ID: 20000495 Result: Up-regulated in Transcription
  misc_feature: MA Experiment 20000495 PARAMETER Experiment Name: At_Guard_Cells_P Parameter: Harvest Date Value: 8/2/2002
  misc_feature: MA Experiment 20000495 PARAMETER Experiment Name: At_Guard_Cells_P Parameter: Organism Value: A. thaliana
  misc_feature: MA Experiment 20000495 PARAMETER Experiment Name: At_Guard_Cells_P Parameter: Tissue Value: Guard Cells vs. Leaves
  misc_feature: MA Experiment ID: 20001248 Result: Down-regulated in Transcription
  misc_feature: MA Experiment 20001248 PARAMETER Experiment Name: At_Far-red-induction_P Parameter: Age (day) Value: 7
  misc_feature: MA Experiment 20001248 PARAMETER Experiment Name: At_Far-red-induction_P Parameter: Light Value: Far-red vs. White
  misc_feature: MA Experiment 20001248 PARAMETER Experiment Name: At_Far-red-induction_P Parameter: Organism Value: A. thaliana
  misc_feature: MA Experiment 20001248 PARAMETER Experiment Name: At_Far-red-induction_P Parameter: Plant Line Value: Columbia
  misc_feature: MA Experiment 20001248 PARAMETER Experiment Name: At_Far-red-induction_P Parameter: Timepoint (hr) Value: 4
  misc_feature: MA Experiment 20001248 PARAMETER Experiment Name: At_Far-red-induction_P Parameter: Tissue Value: Whole Plant
  misc_feature: MA Experiment ID: 20001555 Result: Down-regulated in Transcription
  misc_feature: MA Experiment 20001555 PARAMETER Experiment Name: At_Drought_Soil_Dry_P Parameter: Age (day) Value: 24
  misc_feature: MA Experiment 20001555 PARAMETER Experiment Name: At_Drought_Soil_Dry_P Parameter: Organism Value: A. thaliana
  misc_feature: MA Experiment 20001555 PARAMETER Experiment Name: At_Drought_Soil_Dry_P Parameter: Plant Line Value: WS
  misc_feature: MA Experiment 20001555 PARAMETER Experiment Name: At_Drought_Soil_Dry_P Parameter: Post Timepoint (hr) Value: None
  misc_feature: MA Experiment 20001555 PARAMETER Experiment Name: At_Drought_Soil_Dry_P Parameter: Post-Treatment Value: None
  misc_feature: MA Experiment 20001555 PARAMETER Experiment Name: At_Drought_Soil_Dry_P Parameter: Timepoint (day) Value: 10
  misc_feature: MA Experiment 20001555 PARAMETER Experiment Name: At_Drought_Soil_Dry_P Parameter: Treatment Value: Drought vs. No Drought
acacatcttaaaaagtaaaaacacattcatctatccaacaaaaaaaaagaaaggagaaatggaaggaatcgatcatagaatggtgagtgtcaatggcataacaatgcacattgccgagaaaggtcccaaagaaggacctgtggtgcttctcctccatggattccctgatctctggtacacgtggcgtcaccagattagtgggttatcatctctaggttaccgcgctgtagctccagacctccgaggctacggagactctgattcgccggagtctttctccgagtacacgtgtcttaacgtcgttggggacctcgtagctcttctggacagtgttgctggaaatcaagagaaggtgtttctggtcggtcatgattggggagccattatcggatggtttctctgtttgtttcgacctgaaaagattaacggctttgtgtgtttgagtgtgccgtatagatcaagaaaccctaaagtcaagcccgttcaagggttcaaggctgtatttggagatgattactacatttgtagatttcaggaaccggggaagattgaaggagagattgcaagtgcagatccaagaatatttctgaggaacctcttcacagggaggacactcggtccgccgattttacctaaggataatccctttggggaaaaacctaaccctaatagcgaaaacattgaattgcctgaatggttttctaagaaagatctcgatttctatgtctccaaattcgagaaggcaggatttaccggtggattgaactactacagagccatggatctgaattgggagctcactgcaccatggaccggagctaagattcaagttccagtgaagttcatgacaggtgacttcgacatggtgtacaccacaccagggatgaaagagtacattcacggtggtggatttgctgcagatgttccaactcttcaagagatagtggtgattgaagatgctggtcacttcgttaaccaagagaaacctcaagaggtcactgctcacatcaatgacttcttcaccaagcttcgggacaacaacaaaagcttttagagttctcgtttggttctattatgttggctctcaaaacaagttggttcttgcatgtgttgtttcgacaagattttgaataagacttggcattatgaagctcaacgtgtgtaggaacaatcgattctggcgaaaatagttagaaggctggattgaagatttcaaaagaaaaccaattttttttatagatttcacaatgattttataagcaaactaaatgaaccagaaataaccaagtg

SEQ ID NO: 84795 - protein, 350 aa, Arabidopsis thaliana; identical to SEQ ID NO: 26920
  peptide (1)..(350): Ceres Seq. ID no. 12677065
  misc_feature (73)..(338): Pfam Name: alpha/beta hydrolase fold Pfam Description: alpha/beta hydrolase fold
  misc_feature (20)..(350): Homolog of NCBI NO: 15230018 NR Description: putative epoxide hydrolase; protein id: supported by cDNA: 1355., supported by cDNA: gi_17979164 thaliana] >gi|6714450|gb|AAF26137.1|AC011620_13 putative epoxide

SEQ ID NO: 84796 - protein, 331 aa, Arabidopsis thaliana; identical to SEQ ID NO: 21476
  peptide (1)..(331): Ceres Seq. ID no. 12677066
  misc_feature (54)..(319): Pfam Name: alpha/beta hydrolase fold Pfam Description: alpha/beta hydrolase fold
  misc_feature (1)..(331): Homolog of NCBI NO: 15230018 NR Description: putative epoxide hydrolase; protein id: supported by cDNA: 1355., supported by cDNA: gi_17979164 thaliana] >gi|6714450|gb|AAF26137.1|AC011620_13 putative epoxide

SEQ ID NO: 84797 - protein, 324 aa, Arabidopsis thaliana; identical to SEQ ID NO: 21477
  peptide (1)..(324): Ceres Seq. ID no. 12677067
  misc_feature (47)..(312): Pfam Name: alpha/beta hydrolase fold Pfam Description: alpha/beta hydrolase fold
  misc_feature (1)..(324): Homolog of NCBI NO: 15230018 NR Description: putative epoxide hydrolase; protein id: supported by cDNA: 1355., supported by cDNA: gi_17979164 thaliana] >gi|6714450|gb|AAF26137.1|AC011620_13 putative epoxide

SEQ ID NO: 84798 - DNA, 2261 bp, Arabidopsis thaliana
  misc_feature (1)..(2261): Ceres Seq. ID no. 12677084
  misc_feature: MA Experiment ID: 108469 Result: Up-regulated in Transcription
  misc_feature: MA Experiment ID: 108595 Result: Up-regulated in Transcription
  misc_feature: MA Experiment 108595 PARAMETER Experiment Name: At_Ler-pi_Ovule_cDNA_P Parameter: Plant Line Value: null
  misc_feature: MA Experiment ID: 20000086 Result: Down-regulated in Transcription
  misc_feature: MA Experiment 20000086 PARAMETER Experiment Name: At_100uM_ABA_Mutants_cDNA_P Parameter: Plant Line Value: CS22
  misc_feature: MA Experiment 20000086 PARAMETER Experiment Name: At_100uM_ABA_Mutants_cDNA_P Parameter: Timepoint (hr) Value: 6
  misc_feature: MA Experiment 20000086 PARAMETER Experiment Name: At_100uM_ABA_Mutants_cDNA_P Parameter: Tissue Value: Aerial
  misc_feature: MA Experiment 20000086 PARAMETER Experiment Name: At_100uM_ABA_Mutants_cDNA_P Parameter: Treatment Value: 100uM ABA vs. No Treatment
  misc_feature: MA Experiment ID: 20000173 Result: Down-regulated in Transcription
  misc_feature: MA Experiment 20000173 PARAMETER Experiment Name: At_42deg_Heat_P Parameter: Age (day) Value: 14
  misc_feature: MA Experiment 20000173 PARAMETER Experiment Name: At_42deg_Heat_P Parameter: Organism Value: A. thaliana
  misc_feature: MA Experiment 20000173 PARAMETER Experiment Name: At_42deg_Heat_P Parameter: Plant Line Value: WS
  misc_feature: MA Experiment 20000173 PARAMETER Experiment Name: At_42deg_Heat_P Parameter: Temperature (deg C) Value: 42 vs. 22
  misc_feature: MA Experiment 20000173 PARAMETER Experiment Name: At_42deg_Heat_P Parameter: Timepoint (hr) Value: 6
  misc_feature: MA Experiment 20000173 PARAMETER Experiment Name: At_42deg_Heat_P Parameter: Tissue Value: Aerial
  misc_feature: MA Experiment ID: 20000182 Result: Up-regulated in Transcription
  misc_feature: MA Experiment 20000182 PARAMETER Experiment Name: At_2mM_SA_P Parameter: Age (day) Value: 14
  misc_feature: MA Experiment 20000182 PARAMETER Experiment Name: At_2mM_SA_P Parameter: Organism Value: A. thaliana
  misc_feature: MA Experiment 20000182 PARAMETER Experiment Name: At_2mM_SA_P Parameter: Plant Line Value: WS
  misc_feature: MA Experiment 20000182 PARAMETER Experiment Name: At_2mM_SA_P Parameter: Timepoint (hr) Value: 6
  misc_feature: MA Experiment 20000182 PARAMETER Experiment Name: At_2mM_SA_P Parameter: Tissue Value: Aerial
  misc_feature: MA Experiment 20000182 PARAMETER Experiment Name: At_2mM_SA_P Parameter: Treatment Value: 2mM SA vs. No Treatment
  misc_feature: MA Experiment ID: 20000184 Result: Down-regulated in Transcription
  misc_feature: MA Experiment 20000184 PARAMETER Experiment Name: At_Shoots__P Parameter: Age (day) Value: 7
  misc_feature: MA Experiment 20000184 PARAMETER Experiment Name: At_Shoots__P Parameter: Tissue Value: Shoots vs. Whole Plant
  misc_feature: MA Experiment ID: 20000224 Result: Down-regulated in Transcription
  misc_feature: MA Experiment ID: 20000437 Result: Up-regulated in Transcription
  misc_feature: MA Experiment 20000437 PARAMETER Experiment Name: At_Drought_P Parameter: Age (day) Value: 8
  misc_feature: MA Experiment 20000437 PARAMETER Experiment Name: At_Drought_P Parameter: Organism Value: A. thaliana
  misc_feature: MA Experiment 20000437 PARAMETER Experiment Name: At_Drought_P Parameter: Plant Line Value: WS
  misc_feature: MA Experiment 20000437 PARAMETER Experiment Name: At_Drought_P Parameter: Timepoint (hr) Value: 24
  misc_feature: MA Experiment 20000437 PARAMETER Experiment Name: At_Drought_P Parameter: Tissue Value: Whole Plant
  misc_feature: MA Experiment 20000437 PARAMETER Experiment Name: At_Drought_P Parameter: Treatment Value: Drought vs. No Drought
  misc_feature: MA Experiment ID: 20000794 Result: Up-regulated in Transcription
  misc_feature: MA Experiment 20000794 PARAMETER Experiment Name: At_Petals_P Parameter: Age (day) Value: 23-25 days
  misc_feature: MA Experiment 20000794 PARAMETER Experiment Name: At_Petals_P Parameter: Plant Line Value: WS
  misc_feature: MA Experiment 20000794 PARAMETER Experiment Name: At_Petals_P Parameter: Tissue Value: Petals vs. Whole plant
  misc_feature: MA Experiment ID: 20001451 Result: Down-regulated in Transcription
  misc_feature: MA Experiment 20001451 PARAMETER Experiment Name: At_Far-red-induction_P Parameter: Age (day) Value: 7
  misc_feature: MA Experiment 20001451 PARAMETER Experiment Name: At_Far-red-induction_P Parameter: Light Value: Far-red vs. White
  misc_feature: MA Experiment 20001451 PARAMETER Experiment Name: At_Far-red-induction_P Parameter: Organism Value: A. thaliana
  misc_feature: MA Experiment 20001451 PARAMETER Experiment Name: At_Far-red-induction_P Parameter: Plant Line Value: Columbia
  misc_feature: MA Experiment 20001451 PARAMETER Experiment Name: At_Far-red-induction_P Parameter: Timepoint (hr) Value: 24
  misc_feature: MA Experiment 20001451 PARAMETER Experiment Name: At_Far-red-induction_P Parameter: Tissue Value: Whole Plant
cctctgattccgaatcgggtaaattattatggattcttcttcttcgtcttcctccgccgccgcacgccgccgtatcaacgctatccactctcacctcgtcacctcttctcgctcttcccctctcctccgctccaatcccaccgccggcgagttctgtcttgataatggctatagtgttgttcttcccgagaaactgaatactggcagttggaacgtctacagatctgcaaaatctccgttcaagctcgttagcagattcccagatcatcctgacatcgctactctccatgacaattttgagcatgctgttcatgattttcgagattacaagtatttaggaactcgtgttcgtgtcgacggaactgttggagactacaaatggatgacatatggagaagctggtacagcaagaactgctttaggttctggtttggttcatcacggaatccccatgggatcttctgttggaatttacttcatcaatcgcccagagtggctcattgttgatcatgcttgttcttcttattcttatgtgtctgttcctttgtatgatactcttggtcctgatgctgtgaaatttattgtcaatcatgcaactgtgcaagccatattttgtgtggcagagactttaaactctttacttagctgtttgtctgagatgccaagtgtacgcctggtggtggttgttggagggttaattgaatctttaccctcgcttccctcatcatcaggagtgaaagttgtatcctattcggtgttactgaatcagggtcgtagtaaccctcagcgattttttccaccaaaacccgatgatgttgcaaccatatgctatacaagcggaacaactgggacacccaagggagtcgtattaactcatgcaaacttgattgccaatgttgctggctccagctttagtgtgaagtttttctcttcagatgtttacatttcgtatcttccacttgctcacatttacgaacgagctaatcagatcctaacagtgtactttggagttgctgttggattctaccaaggggacaatatgaaactactggatgatttggctgctctgagacctactgtatttagcagtgtccctcgattatacaatagaatatatgctggtatcattaatgcagtaaaaacctctggtggtctgaaagagagactcttcaatgctgcctataatgcaaagaagcaggctctcttgaatgggaaagagtgcttctcccatatgggacaggttggtatttaataaaataaaggacagacttggagggcgggttcgttttatgacgtctggtgcttcacctctctctcctgaagtgatggaatttttgaaagtatgctttggaggaagggtaacagagggatatggaatgactgaaacatcttgtgttataagtggaatggacgagggtgataacctcactggacatgttggctctcctaatccagcttgtgaagtaaagcttgtggatgtcccagaaatgaactatacatcagcggatcagccccatccccgtggcgaaatatgtgttaggggtcctatcatttttacaggctattacaaagatgaaattcaaacgaaagaggtgattgatgaagatggatggcttcacactggagatataggtctgtggctgccgggaggacgtctaaaaattattgacagaaagaagaacatcttcaaattggcgcagggggagtatatagctccagagaaaattgaaaacgtctatgccaaatgcaaatttgtgggccagtgcttcatatatggtgatagctttaattcatcattggtagctgttgtatcggttgatccagatgtgctgaaaagctgggcagcttcagaaggcattaagggaggagatctgagagaattgtgtaataatccgagagtgaaagcagcagtactatctgacatggacactgttggaagagaagctcagttgagaggcttcgagtttgcaaaggctgtgacattggtgctggaaccatttactctggaaaatggcttgttgactccgacgttcaagattaagagaccacaagcaaaggaatatttcgcagaagcaataacaaacatgtacaaggagcttggtgcttctgatccctctgctaatagaggtttgtgatgatggtataatcgtgtgattaataaaaagcctacgcaaaagttgtttctcccacaaattgtattcttttttgttttcttgctacatatttattgaatagtaaaggtaataaaggtgctacattac

SEQ ID NO: 84799 - protein, 407 aa, Arabidopsis thaliana
  peptide (1)..(407): Ceres Seq. ID no. 12677085
  misc_feature (120)..(396): Pfam Name: AMP-binding enzyme Pfam Description: AMP-binding enzyme
  misc_feature (13)..(396): Homolog of NCBI NO: 22327099 NR Description: long-chain-fatty-acid--CoA ligase-like protein; id: At5g27600.1, supported by cDNA: gi_20805874 [Arabidopsis
  misc_feature (13)..(396): Homolog of NCBI NO: 20805875 NR Description: long chain acyl-CoA synthetase 7 [Arabidopsis
  misc_feature (65)..(395): Homolog of NCBI NO: 28565633 NR Description: fatty acyl-CoA synthetase [Dictyostelium
  misc_feature (80)..(395): Homolog of NCBI NO: 13431637 NR Description: Long-chain-fatty-acid--CoA ligase 1 (Long-chain
  misc_feature (82)..(394): Homolog of NCBI NO: 17510401 NR Description: Fatty long (79.0 kD) [Caenorhabditis elegans]
  misc_feature (53)..(395): Homolog of NCBI NO: 16769794 NR Description: SD01152p [Drosophila melanogaster]
  misc_feature (53)..(395): Homolog of NCBI NO: 24666497 NR Description: CG3961-PA [Drosophila melanogaster]
  misc_feature (116)..(395): Homolog of NCBI NO: 28628069 NR Description: long-chain acyl-CoA synthetase [Mus musculus]
  misc_feature (80)..(395): Homolog of NCBI NO: 27882609 NR Description: similar to fatty acid Coenzyme A ligase [Xenopus
  misc_feature (116)..(395): Homolog of NCBI NO: 16359313 NR Description: Similar to fatty-acid-Coenzyme A ligase,
MDSSSSSSSAAARRRINAIHSHLVTSSRSSPLLRSNPTAGEFCLDNGYSVVLPEKLNTGSWNVYRSAKSPFKLVSRFPDHPDIATLHDNFEHAVHDFRDYKYLGTRVRVDGTVGDYKWMTYGEAGTARTALGSGLVHHGIPMGSSVGIYFINRPEWLIVDHACSSYSYVSVPLYDTLGPDAVKFIVNHATVQAIFCVAETLNSLLSCLSEMPSVRLVVVVGGLIESLPSLPSSSGVKVVSYSVLLNQGRSNPQRFFPPKPDDVATICYTSGTTGTPKGVVLTHANLIANVAGSSFSVKFFSSDVYISYLPLAHIYERANQILTVYFGVAVGFYQGDNMKLLDDLAALRPTVFSSVPRLYNRIYAGIINAVKTSGGLKERLFNAAYNAKKQALLNGKECFSHMGQVGI

SEQ ID NO: 84800 - protein, 308 aa, Arabidopsis thaliana
  peptide (1)..(308): Ceres Seq. ID no. 12677086
  misc_feature (2)..(188): Pfam Name: AMP-binding enzyme Pfam Description: AMP-binding enzyme
  misc_feature (2)..(302): Homolog of NCBI NO: 22327099 NR Description: long-chain-fatty-acid--CoA ligase-like protein; id: At5g27600.1, supported by cDNA: gi_20805874 [Arabidopsis
  misc_feature (2)..(302): Homolog of NCBI NO: 20805875 NR Description: long chain acyl-CoA synthetase 7 [Arabidopsis
  misc_feature (4)..(302): Homolog of NCBI NO: 28565633 NR Description: fatty acyl-CoA synthetase [Dictyostelium
  misc_feature (8)..(297): Homolog of NCBI NO: 13431637 NR Description: Long-chain-fatty-acid--CoA ligase 1 (Long-chain
  misc_feature (9)..(297): Homolog of NCBI NO: 17510401 NR Description: Fatty long (79.0 kD) [Caenorhabditis elegans]
  misc_feature (9)..(297): Homolog of NCBI NO: 16769794 NR Description: SD01152p [Drosophila melanogaster]
  misc_feature (9)..(297): Homolog of NCBI NO: 24666497 NR Description: CG3961-PA [Drosophila melanogaster]
  misc_feature (8)..(294): Homolog of NCBI NO: 28628069 NR Description: long-chain acyl-CoA synthetase [Mus musculus]
  misc_feature (8)..(294): Homolog of NCBI NO: 16359313 NR Description: Similar to fatty-acid-Coenzyme A ligase,
  misc_feature (9)..(294): Homolog of NCBI NO: 27882609 NR Description: similar to fatty acid Coenzyme A ligase [Xenopus
MGKSASPIWDRLVFNKIKDRLGGRVRFMTSGASPLSPEVMEFLKVCFGGRVTEGYGMTETSCVISGMDEGDNLTGHVGSPNPACEVKLVDVPEMNYTSADQPHPRGEICVRGPIIFTGYYKDEIQTKEVIDEDGWLHTGDIGLWLPGGRLKIIDRKKNIFKLAQGEYIAPEKIENVYAKCKFVGQCFIYGDSFNSSLVAVVSVDPDVLKSWAASEGIKGGDLRELCNNPRVKAAVLSDMDTVGREAQLRGFEFAKAVTLVLEPFTLENGLLTPTFKIKRPQAKEYFAEAITNMYKELGASDPSANRGL

SEQ ID NO: 84801 - protein, 289 aa, Arabidopsis thaliana
  peptide (1)..(289): Ceres Seq. ID no. 12677087
  misc_feature (2)..(278): Pfam Name: AMP-binding enzyme Pfam Description: AMP-binding enzyme
  misc_feature (1)..(278): Homolog of NCBI NO: 22327099 NR Description: long-chain-fatty-acid--CoA ligase-like protein; id: At5g27600.1, supported by cDNA: gi_20805874 [Arabidopsis
  misc_feature (1)..(278): Homolog of NCBI NO: 20805875 NR Description: long chain acyl-CoA synthetase 7 [Arabidopsis
  misc_feature (1)..(277): Homolog of NCBI NO: 28565633 NR Description: fatty acyl-CoA synthetase [Dictyostelium
  misc_feature (1)..(277): Homolog of NCBI NO: 13431637 NR Description: Long-chain-fatty-acid--CoA ligase 1 (Long-chain
  misc_feature (1)..(276): Homolog of NCBI NO: 17510401 NR Description: Fatty long (79.0 kD) [Caenorhabditis elegans]
  misc_feature (1)..(277): Homolog of NCBI NO: 16769794 NR Description: SD01152p [Drosophila melanogaster]
  misc_feature (1)..(277): Homolog of NCBI NO: 24666497 NR Description: CG3961-PA [Drosophila melanogaster]
  misc_feature (1)..(277): Homolog of NCBI NO: 28628069 NR Description: long-chain acyl-CoA synthetase [Mus musculus]
  misc_feature (1)..(277): Homolog of NCBI NO: 27882609 NR Description: similar to fatty acid Coenzyme A ligase [Xenopus
  misc_feature (1)..(277): Homolog of NCBI NO: 16359313 NR Description: Similar to fatty-acid-Coenzyme A ligase,
MTYGEAGTARTALGSGLVHHGIPMGSSVGIYFINRPEWLIVDHACSSYSYVSVPLYDTLGPDAVKFIVNHATVQAIFCVAETLNSLLSCLSEMPSVRLVVVVGGLIESLPSLPSSSGVKVVSYSVLLNQGRSNPQRFFPPKPDDVATICYTSGTTGTPKGVVLTHANLIANVAGSSFSVKFFSSDVYISYLPLAHIYERANQILTVYFGVAVGFYQGDNMKLLDDLAALRPTVFSSVPRLYNRIYAGIINAVKTSGGLKERLFNAAYNAKKQALLNGKECFSHMGQVGI

SEQ ID NO: 84802 - DNA, 917 bp, Arabidopsis thaliana
  misc_feature (1)..(917): Ceres Seq. ID no. 12677099
  misc_feature: MA Experiment ID: 108434 Result: Up-regulated in Transcription
  misc_feature: MA Experiment 108434 PARAMETER Experiment Name: At_Root_Tips_cDNA_P Parameter: Tissue Value: Root Tips
  misc_feature: MA Experiment ID: 20001247 Result: Up-regulated in Transcription
  misc_feature: MA Experiment 20001247 PARAMETER Experiment Name: At_Far-red-induction_P Parameter: Age (day) Value: 7
  misc_feature: MA Experiment 20001247 PARAMETER Experiment Name: At_Far-red-induction_P Parameter: Light Value: Far-red vs. White
  misc_feature: MA Experiment 20001247 PARAMETER Experiment Name: At_Far-red-induction_P Parameter: Organism Value: A. thaliana
  misc_feature: MA Experiment 20001247 PARAMETER Experiment Name: At_Far-red-induction_P Parameter: Plant Line Value: Columbia
  misc_feature: MA Experiment 20001247 PARAMETER Experiment Name: At_Far-red-induction_P Parameter: Timepoint (hr) Value: 1
  misc_feature: MA Experiment 20001247 PARAMETER Experiment Name: At_Far-red-induction_P Parameter: Tissue Value: Whole Plant
aacatagtcctgaagatgtcaaattcacgattgacgtaaatcttgttgggagcttcaatgtgattaaagccgctttgcctgccatgaaagcaaggaaagatcgtggacctgcttccatcagtctcgtctcctctcaagctggtcaggttggtgtctatggttatgctgcatattcagcaagcaagtttggtcttcagggtttagcgcaagcattgcaacaggaagttatatctgatgatattcatgtcactcttatttttcctcctgacactaatacacccggctttgaagaagaacagaagagcagacctgaagtcactgccataatagctgcatcctctggttcaatggaaacagaagaagtagcaaaaaaggctatggatggcataaaagcaggaaacttcaccgtctcatgcaactttgagggattcttactgtctctcgcgacaaccggcatgtcccctcaaagatcattttggcttgcttttcttgaagttataaccgcagggcctataagattaatcgctctcttctttcaatgggattggtataaagccattgaaaaatggagcaaaaccaaaaccaaatgacagcccgacaatgtatcttgaagtgcttttggcagaagcttaaacattgatgggtattctcaaaccttcttctcagtccggtaccacgccagctagtcgactataccaattcagaatatcgacattgctgatagttttgtagaaactcgtcaagattcatgtttccggtctttgaacaagctctgttttttctttttttttatagagaaatcaaagaactcatttgaatgtattttttacttggtcaagaagtgaatgtttttcacaagatgaaatgtaaatgatgtatttgaaagaagtaaaaacttcaaaaccaaaatttgagtg

SEQ ID NO: 84803 - protein, 195 aa, Arabidopsis thaliana
  peptide (1)..(195): Ceres Seq. ID no. 12677100
  misc_feature (1)..(195): Homolog of NCBI NO: 7658344 NR Description: unknown protein; 15741-13972 [Arabidopsis
  misc_feature (1)..(195): Homolog of NCBI NO: 30679701 NR Description: short-chain dehydrogenase/reductase family
  misc_feature (2)..(195): Homolog of NCBI NO: 15239681 NR Description: FVT1 - like protein; protein id: At5g19200.1
  misc_feature (7)..(178): Homolog of NCBI NO: 27882572 NR Description: Similar to follicular lymphoma variant
  misc_feature (10)..(178): Homolog of NCBI NO: 4503817 NR Description: follicular lymphoma variant translocation 1 [Homo >gi|544358|sp|Q06136|FVT1_HUMAN Follicular variant translocation
  misc_feature (10)..(178): Homolog of NCBI NO: 30585239 NR Description: Homo sapiens follicular lymphoma variant
  misc_feature (10)..(195): Homolog of NCBI NO: 34878781 NR Description: similar to 6330410P18Rik protein [Rattus
  misc_feature (2)..(175): Homolog of NCBI NO: 21356301 NR Description: CG10425-PA [Drosophila melanogaster]
  misc_feature (5)..(188): Homolog of NCBI NO: 39583655 NR Description: Hypothetical protein CBG08294 [Caenorhabditis
  misc_feature (9)..(191): Homolog of NCBI NO: 28828725 NR Description: similar to Homo sapiens (Human). Follicular
HSPEDVKFTIDVNLVGSFNVIKAALPAMKARKDRGPASISLVSSQAGQVGVYGYAAYSASKFGLQGLAQALQQEVISDDIHVTLIFPPDTNTPGFEEEQKSRPEVTAIIAASSGSMETEEVAKKAMDGIKAGNFTVSCNFEGFLLSLATTGMSPQRSFWLAFLEVITAGPIRLIALFFQWDWYKAIEKWSKTKTK

SEQ ID NO: 84804 - protein, 168 aa, Arabidopsis thaliana
  peptide (1)..(168): Ceres Seq. ID no. 12677101
  misc_feature (1)..(168): Homolog of NCBI NO: 7658344 NR Description: unknown protein; 15741-13972 [Arabidopsis
  misc_feature (1)..(168): Homolog of NCBI NO: 30679701 NR Description: short-chain dehydrogenase/reductase family
  misc_feature (1)..(168): Homolog of NCBI NO: 15239681 NR Description: FVT1 - like protein; protein id: At5g19200.1
  misc_feature (1)..(151): Homolog of NCBI NO: 27882572 NR Description: Similar to follicular lymphoma variant
  misc_feature (1)..(151): Homolog of NCBI NO: 4503817 NR Description: follicular lymphoma variant translocation 1 [Homo >gi|544358|sp|Q06136|FVT1_HUMAN Follicular variant translocation
  misc_feature (1)..(151): Homolog of NCBI NO: 30585239 NR Description: Homo sapiens follicular lymphoma variant
  misc_feature (1)..(168): Homolog of NCBI NO: 34878781 NR Description: similar to 6330410P18Rik protein [Rattus
  misc_feature (1)..(148): Homolog of NCBI NO: 21356301 NR Description: CG10425-PA [Drosophila melanogaster]
  misc_feature (1)..(161): Homolog of NCBI NO: 39583655 NR Description: Hypothetical protein CBG08294 [Caenorhabditis
  misc_feature (1)..(164): Homolog of NCBI NO: 28828725 NR Description: similar to Homo sapiens (Human). Follicular
MKARKDRGPASISLVSSQAGQVGVYGYAAYSASKFGLQGLAQALQQEVISDDIHVTLIFPPDTNTPGFEEEQKSRPEVTAIIAASSGSMETEEVAKKAMDGIKAGNFTVSCNFEGFLLSLATTGMSPQRSFWLAFLEVITAGPIRLIALFFQWDWYKAIEKWSKTKTK

SEQ ID NO: 84805 - DNA, 662 bp, Arabidopsis thaliana
  misc_feature (1)..(662): Ceres Seq. ID no. 12677114
  misc_feature: MA Experiment ID: 108569 Result: Down-regulated in Transcription
  misc_feature: MA Experiment 108569 PARAMETER Experiment Name: At_0.001%_MeJA__cDNA_P Parameter: Timepoint (hr) Value: 6
  misc_feature: MA Experiment 108569 PARAMETER Experiment Name: At_0.001%_MeJA__cDNA_P Parameter: Tissue Value: Aerial
  misc_feature: MA Experiment 108569 PARAMETER Experiment Name: At_0.001%_MeJA__cDNA_P Parameter: Treatment Value: 0.001% MeJA vs. No Treatment
  misc_feature: MA Experiment ID: 20000087 Result: Up-regulated in Transcription
  misc_feature: MA Experiment 20000087 PARAMETER Experiment Name: At_100uM_ABA_Mutants_cDNA_P Parameter: Plant Line Value: WS
  misc_feature: MA Experiment 20000087 PARAMETER Experiment Name: At_100uM_ABA_Mutants_cDNA_P Parameter: Timepoint (hr) Value: 6
  misc_feature: MA Experiment 20000087 PARAMETER Experiment Name: At_100uM_ABA_Mutants_cDNA_P Parameter: Tissue Value: Aerial
  misc_feature: MA Experiment 20000087 PARAMETER Experiment Name: At_100uM_ABA_Mutants_cDNA_P Parameter: Treatment Value: 100uM ABA vs. No Treatment
  misc_feature: MA Experiment ID: 20000111 Result: Up-regulated in Transcription
  misc_feature: MA Experiment 20000111 PARAMETER Experiment Name: At_42deg_Heat_cDNA_P Parameter: Temperature (deg C) Value: 42 vs. 22
  misc_feature: MA Experiment 20000111 PARAMETER Experiment Name: At_42deg_Heat_cDNA_P Parameter: Timepoint (hr) Value: 6
  misc_feature: MA Experiment 20000111 PARAMETER Experiment Name: At_42deg_Heat_cDNA_P Parameter: Tissue Value: Aerial
  misc_feature: MA Experiment ID: 20000113 Result: Up-regulated in Transcription
  misc_feature: MA Experiment 20000113 PARAMETER Experiment Name: At_42deg_Heat_cDNA_P Parameter: Temperature (deg C) Value: 42 vs. 22
  misc_feature: MA Experiment 20000113 PARAMETER Experiment Name: At_42deg_Heat_cDNA_P Parameter: Timepoint (hr) Value: 8
  misc_feature: MA Experiment 20000113 PARAMETER Experiment Name: At_42deg_Heat_cDNA_P Parameter: Tissue Value: Aerial
  misc_feature: MA Experiment ID: 20000496 Result: Up-regulated in Transcription
  misc_feature: MA Experiment 20000496 PARAMETER Experiment Name: At_Guard_Cells_P Parameter: Harvest Date Value: 7/19/2002
  misc_feature: MA Experiment 20000496 PARAMETER Experiment Name: At_Guard_Cells_P Parameter: Organism Value: Canola
  misc_feature: MA Experiment 20000496 PARAMETER Experiment Name: At_Guard_Cells_P Parameter: Tissue Value: Guard Cells vs. Leaves
gaaacactatcgaacctcaaaatctctgttgccggaaattttcttcaccgaaactgaaagaagtcgaaagagagaagagaagaaattgaagcaatggagggagcagaggaagctggggctgagatagcggttgattcaaaggacttgcagcaacaaagcaaagctttcgacaagctcaccgatcgtgtcgaggatcgccagctcgattcctctcgtgttcaatcggctatggcttcgattgctgcttctagggaggctgatctgaatgctaagaggttgagggagaaagaactggcctctgtgaagatcaatcctgcagatgttgagtttattgtaaacgaacttgagatagaaaagaatgtggcggaaagaactctaagggagcacaaaggtgatgcggttgctgcgactaggcaattgctttcacgatatcctctatgatggagcaggaccattctttacttccaaggttttttgtatgtttgagaggttgagagcaagtctcctaatatttaaccgagttaaaattgtctattgctgaaccgatctctctgagaagccctgaatacagttacaatcgattctggggtggtgttttgtggttctacctgaagtttgaagttcaatcttattatcaagatataagaatgtgttcttcgttt

SEQ ID NO: 84806 - protein, 115 aa, Arabidopsis thaliana; identical to SEQ ID NO: 26995
  peptide (1)..(115): Ceres Seq. ID no. 12677115
  misc_feature (1)..(115): Homolog of NCBI NO: 18397632 NR Description: expressed protein; protein id: At3g06610.1, by cDNA: 4853., supported by cDNA: gi_18252854 [Arabidopsis
  misc_feature (1)..(105): Homolog of NCBI NO: 7020527 NR Description: unnamed protein product [Homo sapiens]
  misc_feature (1)..(105): Homolog of NCBI NO: 27229055 NR Description: RIKEN cDNA 2310003F16 [Mus musculus] unnamed protein product [Mus musculus]
  misc_feature (1)..(105): Homolog of NCBI NO: 34856780 NR Description: similar to RIKEN cDNA 2310003F16 [Rattus >gi|34861312|ref|XP_347215.1| similar to RIKEN cDNA 2310003F16
  misc_feature (1)..(105): Homolog of NCBI NO: 27734984 NR Description: Huntingtin interacting protein K; hypothetical [Homo sapiens] >gi|27692116|gb|AAH19262.2| Unknown (protein for
  misc_feature (1)..(105): Homolog of NCBI NO: 3329429 NR Description: huntingtin interacting protein HYPK [Homo sapiens]
  misc_feature (1)..(105): Homolog of NCBI NO: 6841494 NR Description: HSPC136 [Homo sapiens]
  misc_feature (1)..(111): Homolog of NCBI NO: 21358275 NR Description: CG9922-PA [Drosophila melanogaster]

SEQ ID NO: 84807 - protein, 70 aa, Arabidopsis thaliana; identical to SEQ ID NO: 26996
  peptide (1)..(70): Ceres Seq. ID no. 12677116
  misc_feature (1)..(70): Homolog of NCBI NO: 18397632 NR Description: expressed protein; protein id: At3g06610.1, by cDNA: 4853., supported by cDNA: gi_18252854 [Arabidopsis
  misc_feature (1)..(60): Homolog of NCBI NO: 7020527 NR Description: unnamed protein product [Homo sapiens]
  misc_feature (1)..(60): Homolog of NCBI NO: 27229055 NR Description: RIKEN cDNA 2310003F16 [Mus musculus] unnamed protein product [Mus musculus]
  misc_feature (1)..(60): Homolog of NCBI NO: 34856780 NR Description: similar to RIKEN cDNA 2310003F16 [Rattus >gi|34861312|ref|XP_347215.1| similar to RIKEN cDNA 2310003F16
  misc_feature (1)..(60): Homolog of NCBI NO: 27734984 NR Description: Huntingtin interacting protein K; hypothetical [Homo sapiens] >gi|27692116|gb|AAH19262.2| Unknown (protein for
  misc_feature (1)..(60): Homolog of NCBI NO: 3329429 NR Description: huntingtin interacting protein HYPK [Homo sapiens]
  misc_feature (1)..(60): Homolog of NCBI NO: 6841494 NR Description: HSPC136 [Homo sapiens]
  misc_feature (1)..(66): Homolog of NCBI NO: 21358275 NR Description: CG9922-PA [Drosophila melanogaster]

SEQ ID NO: 84808 - DNA, 918 bp, Arabidopsis thaliana
  misc_feature (1)..(918): Ceres Seq. ID no. 12677117
  misc_feature: MA Experiment ID: 108463 Result: Down-regulated in Transcription
  misc_feature: MA Experiment 108463 PARAMETER Experiment Name: At_Germinating_Seeds_cDNA_P Parameter: Age (day) Value: 3 vs. 0
  misc_feature: MA Experiment 108463 PARAMETER Experiment Name: At_Germinating_Seeds_cDNA_P Parameter: Tissue Value: Germinating Seeds
  misc_feature: MA Experiment ID: 108488 Result: Down-regulated in Transcription
  misc_feature: MA Experiment ID: 108576 Result: Up-regulated in Transcription
  misc_feature: MA Experiment 108576 PARAMETER Experiment Name: At_42deg_Heat_cDNA_P Parameter: Temperature (deg C) Value: 42 vs. 22
  misc_feature: MA Experiment 108576 PARAMETER Experiment Name: At_42deg_Heat_cDNA_P Parameter: Timepoint (hr) Value: 1
  misc_feature: MA Experiment 108576 PARAMETER Experiment Name: At_42deg_Heat_cDNA_P Parameter: Tissue Value: Aerial
  misc_feature: MA Experiment ID: 20000093 Result: Up-regulated in Transcription
  misc_feature: MA Experiment 20000093 PARAMETER Experiment Name: At_42deg_Heat_cDNA_P Parameter: Temperature (deg C) Value: 42 vs. 22
  misc_feature: MA Experiment 20000093 PARAMETER Experiment Name: At_42deg_Heat_cDNA_P Parameter: Timepoint (hr) Value: 0.5
  misc_feature: MA Experiment 20000093 PARAMETER Experiment Name: At_42deg_Heat_cDNA_P Parameter: Tissue Value: Aerial
  misc_feature: MA Experiment ID: 20000113 Result: Up-regulated in Transcription
  misc_feature: MA Experiment 20000113 PARAMETER Experiment Name: At_42deg_Heat_cDNA_P Parameter: Temperature (deg C) Value: 42 vs. 22
  misc_feature: MA Experiment 20000113 PARAMETER Experiment Name: At_42deg_Heat_cDNA_P Parameter: Timepoint (hr) Value: 8
  misc_feature: MA Experiment 20000113 PARAMETER Experiment Name: At_42deg_Heat_cDNA_P Parameter: Tissue Value: Aerial
  misc_feature: MA Experiment ID: 20000144 Result: Up-regulated in Transcription
  misc_feature: MA Experiment 20000144 PARAMETER Experiment Name: At_42deg_Heat_cDNA_P Parameter: Temperature (deg C) Value: 42 vs. 22
  misc_feature: MA Experiment 20000144 PARAMETER Experiment Name: At_42deg_Heat_cDNA_P Parameter: Timepoint (hr) Value: 1
  misc_feature: MA Experiment 20000144 PARAMETER Experiment Name: At_42deg_Heat_cDNA_P Parameter: Tissue Value: Aerial
aagaaatctttcagatttgcgcatatcgacaattttccgagcggccagtttacgtattttgtttgtagttaacgtgtttcaaggactttgacaatggctgaggaagcgcataaggtaacattgaatgtctatgatttaagccaaggcttggcacgccagctctcacaatcactcctgggaaaggttattgaaggtgtatggcatacaggaatagttgtctatgggaatgagtacttttttggaggagggatacaacatttaccagttggaagaactccatatggaacaccaattcgaacgatagagttgggtctatcacatgtgcctaaagatgtattcgagatgtacttggaagaaatcagtcctcgttacactgctgaatcctacaatttacttactcacaactgcaacaacttcagcaacgaggtcgctcagtttttggtgggtaaagggattcctgactacattctccagcttcctaatgatgttctaaacagtcccatgggtggtcttataatgcctatgttgcaaggcctcgaaacaactctaaaggctggtgctgttcctcaagttccacagtttaggccacagccacaaccttttggagcttttagtaaagatgatggcccacaaattgtgatagctcctaagctcgaggcagcagaaacctcaactgcaactgagaaagtgccacctgttattcaaccatcagctagtaaagagaaggtcaaggacgacccgttgggtgatgctagggccaagattcaggaagagattacaagcgaatttgcagctctaatggcacaaggcacattacgagcaagtgaagcagctgctatggcgacaaaaagagtcatgcaaaagtacggacatctcaatgtaaacgcttagtgcaataacagagagatgaaacatttt

SEQ ID NO: 84809 - protein, 265 aa, Arabidopsis thaliana; identical to SEQ ID NO: 38015
  peptide (1)..(265): Ceres Seq. ID no. 12677118
  misc_feature (6)..(129): Pfam Name: Eukaryotic protein of unknown function (DUF862) Pfam Description: Eukaryotic protein of unknown function (DUF862)
  misc_feature (1)..(265): Homolog of NCBI NO: 15231383 NR Description: unknown protein; protein id: At3g07090.1, by cDNA: gi_17529195 [Arabidopsis thaliana] unknown protein [Arabidopsis thaliana]
  misc_feature (1)..(254): Homolog of NCBI NO: 37535296 NR Description: unknown protein [Oryza sativa (japonica
  misc_feature (5)..(151): Homolog of NCBI NO: 28277916 NR Description: Similar to DNA segment, Chr 15, Wayne State
  misc_feature (7)..(169): Homolog of NCBI NO: 29246854 NR Description: GLP_191_9337_10773 [Giardia lamblia ATCC 50803]
  misc_feature (8)..(157): Homolog of NCBI NO: 37589651 NR Description: Unknown (protein for MGC:73066) [Danio rerio]
  misc_feature (6)..(156): Homolog of NCBI NO: 14779199 NR Description: similar to LD11371p [Drosophila melanogaster] sapiens] >gi|21618960|gb|AAH32147.1| DNA segment, Chr 15, Wayne
  misc_feature (1)..(149): Homolog of NCBI NO: 34867307 NR Description: similar to D15Wsu75e protein [Rattus norvegicus]
  misc_feature (6)..(149): Homolog of NCBI NO: 20162548 NR Description: D15Wsu75e protein [Mus musculus] unnamed protein product [Mus musculus]
  misc_feature (8)..(175): Homolog of NCBI NO: 40738408 NR Description: hypothetical protein AN6915.2 [Aspergillus
  misc_feature (8)..(155): Homolog of NCBI NO: 23508869 NR Description: hypothetical protein [Plasmodium falciparum 3D7]

SEQ ID NO: 84810 - protein, 182 aa, Arabidopsis thaliana; identical to SEQ ID NO: 38016
  peptide (1)..(182): Ceres Seq. ID no. 12677119
  misc_feature (1)..(182): Homolog of NCBI NO: 15231383 NR Description: unknown protein; protein id: At3g07090.1, by cDNA: gi_17529195 [Arabidopsis thaliana] unknown protein [Arabidopsis thaliana]
  misc_feature (1)..(171): Homolog of NCBI NO: 37535296 NR Description: unknown protein [Oryza sativa (japonica
  misc_feature (1)..(68): Homolog of NCBI NO: 28277916 NR Description: Similar to DNA segment, Chr 15, Wayne State
  misc_feature (1)..(86): Homolog of NCBI NO: 29246854 NR Description: GLP_191_9337_10773 [Giardia lamblia ATCC 50803]
  misc_feature (1)..(74): Homolog of NCBI NO: 37589651 NR Description: Unknown (protein for MGC:73066) [Danio rerio]
  misc_feature (1)..(73): Homolog of NCBI NO: 14779199 NR Description: similar to LD11371p [Drosophila melanogaster] sapiens] >gi|21618960|gb|AAH32147.1| DNA segment, Chr 15, Wayne
  misc_feature (1)..(66): Homolog of NCBI NO: 34867307 NR Description: similar to D15Wsu75e protein [Rattus norvegicus]
  misc_feature (1)..(66): Homolog of NCBI NO: 20162548 NR Description: D15Wsu75e protein [Mus musculus] unnamed protein product [Mus musculus]
  misc_feature (1)..(92): Homolog of NCBI NO: 40738408 NR Description: hypothetical protein AN6915.2 [Aspergillus
  misc_feature (1)..(72): Homolog of NCBI NO: 23508869 NR Description: hypothetical protein [Plasmodium falciparum 3D7]

SEQ ID NO: 84811 - DNA, 2589 bp, Arabidopsis thaliana
  misc_feature (1)..(2589): Ceres Seq. ID no. 12677120
  misc_feature: MA Experiment ID: 20000214 Result: Down-regulated in Transcription
  misc_feature: MA Experiment 20000214 PARAMETER Experiment Name: At_4deg_Cold_P Parameter: Timepoint (hr) Value: 6
  misc_feature: MA Experiment ID: 20000794 Result: Up-regulated in Transcription
  misc_feature: MA Experiment 20000794 PARAMETER Experiment Name: At_Petals_P Parameter: Age (day) Value: 23-25 days
  misc_feature: MA Experiment 20000794 PARAMETER Experiment Name: At_Petals_P Parameter: Plant Line Value: WS
  misc_feature: MA Experiment 20000794 PARAMETER Experiment Name: At_Petals_P Parameter: Tissue Value: Petals vs. Whole plant
  misc_feature: MA Experiment ID: 20001451 Result: Down-regulated in Transcription
  misc_feature: MA Experiment 20001451 PARAMETER Experiment Name: At_Far-red-induction_P Parameter: Age (day) Value: 7
  misc_feature: MA Experiment 20001451 PARAMETER Experiment Name: At_Far-red-induction_P Parameter: Light Value: Far-red vs. White
  misc_feature: MA Experiment 20001451 PARAMETER Experiment Name: At_Far-red-induction_P Parameter: Organism Value: A. thaliana
  misc_feature: MA Experiment 20001451 PARAMETER Experiment Name: At_Far-red-induction_P Parameter: Plant Line Value: Columbia
  misc_feature: MA Experiment 20001451 PARAMETER Experiment Name: At_Far-red-induction_P Parameter: Timepoint (hr) Value: 24
  misc_feature: MA Experiment 20001451 PARAMETER Experiment Name: At_Far-red-induction_P Parameter: Tissue Value: Whole Plant
  misc_feature: MA Experiment ID: 20001757 Result: Down-regulated in Transcription
  misc_feature: MA Experiment 20001757 PARAMETER Experiment Name: At_50mM_NH4NO3_L-to-H_P Parameter: Timepoint (hr) Value: 6
  misc_feature: MA Experiment 20001757 PARAMETER Experiment Name: At_50mM_NH4NO3_L-to-H_P Parameter: Tissue Value: Leaf
  misc_feature: MA Experiment 20001757 PARAMETER Experiment Name: At_50mM_NH4NO3_L-to-H_P Parameter: Treatment Value: 50mM NH4NO3 vs 100mM Mannitol
aattccgaaaattttgactcgcaaaatctcaacgaagctcgaaaatggattcacgaaccaaggggaagacggtgatggaagttggtggcgatggcgttgccgtcataacactcatcaatcctcccgtcaattctctatccttcgacgtgctatacaatctcaaaagtaattacgaggaggccttgagcaggaatgatgttaaagctattgttattactggtgcaaaggggaggttctctggtggctttgatatatctggttttggtgaaatgcagaaggggaatgtcaaagagccaaaggctggttacatttcgattgacatcataaccgacttgcttgaagctgctaggaaaccgtctgtcgctgccattgatggacttgccttgggaggaggattagaacttgctatggcttgtcatgctaggatatcagctcctgctgcacagttaggcttgcctgagctgcaacttggtgttattcctggttttggaggaacgcagcgtctcccgcgtcttgttggtctcaccaaagcccttgaaatgattttgacatctaagccagttaaagctgaggaaggtcattctttgggtcttattgatgctgtggtgccacctgcggagttagtaaccactgctcgtcgctgggcccttgacatagtcgggaggagaaaaccatgggtatctagtgtttccaagactgataagttacctcctcttggagaggcaagggagatactgacgtttgccaaggcacagacactcaagcgtgcccccaatatgaaacaccctttaatgtgccttgacgctattgaagtaggtattgtttctggtccaagggctggtttagaaaaggaagctgaagtcgcctcacaagtggtaaaactggataccaccaaaggcttgatccacgtcttcttttctcagcgaggaactgctaaggttcctggagttactgatcgtgggttggtgccaaggaagattaagaaggtagccataattggaggcgggttgatgggatctggaatagctactgcgttgatcctaagtaactatccagtgattctcaaggaggtaaatgagaaattcctggaggctggaattggcagagttaaagctaatctccagagccgtgtaaggaagggaagcatgtctcaggaaaagtttgagaaaaccatgtctctccttaagggttctcttgattatgaaagctttagagatgtggacatggtcattgaggtaaggatgaacataacaagctgaagtgttgtttttttattgggttacatgatctaagtgaattgatttcttatgatgtctttttggtggcttgaacaggctgttattgagaatatatctttgaagcaacaaatttttgctgatctggagaaatactgtcctcagcattgtatccttgctagcaacacatcgaccattgacttgaacaaaattggggagcggaccaagtctcaggatcgaattgttggagcacattttttcagtccagcacatatcatgccgctacttgaaatagttcggaccaatcatacctctgcccaagtaattgttgacctgttagatgttgggaagaagattaagaaaacaccagttgtggtgggaaactgcacagggtttgcagtgaataggatgttcttcccttacacacaggcagctatgttccttgttgagtgtggagcagatccatatctaatcgacagggcaatcagcaagtttggaatgccaatgggtcccttcagactgtgtgacctggttggatttggtgtggcgattgcaaccgcaacgcagtttatcgagaacttctcagaacggacttacaaatcaatgattattccacttatgcaagaggacaagagagctggtgaagccactcgcaaaggtttctatttgtatgatgataagcgcaaggcgaaacctgatcctgagctaaagaaatatatcgaaaaggcaagaagcatatctggagtaaagcttgaccctaagttggcgaatttgtcggagaaggacattattgaaatgacattcttcccagtagtaaacgaggcgtgtagggtttttgctgaaggtatcgctgtcaaagcagcagaccttgacattgctggcataatgggaatgggttttccaccttacagaggaggaatcatgttctgggctgattccatcggatcgaaatacatttactcgaggctggatgagtggtcgaaggcttatggtgaattcttcaagccttgtgcttttttggctgagaggggatctaaaggagttcttttgagcgctcccgtgaaacaagccagctcacggttgtaaggtcagcgtttcagtggaaccatttctccattggtgcatcttctgtgttttctttatgttcacattttacttagccgggaagtgggtatcttttggcctcagaagcttttaaataaagtctcatctcagacatatgaatctgggaggaagtagggattaagttgtagtagcaataagatttgttttatgttgtgctttgtcatacaacaaagttgtcagatacatttgttgttataaagctatatggagtaagttctatgatttaatg

SEQ ID NO: 84812 - protein, 404 aa, Arabidopsis thaliana
  peptide (1)..(404): Ceres Seq. ID no. 12677121
  misc_feature (309)..(404): Pfam Name: 3-hydroxyacyl-CoA dehydrogenase, NAD binding domain Pfam Description: 3-hydroxyacyl-CoA dehydrogenase, NAD binding
  misc_feature (1)..(404): Homolog of NCBI NO: 34922495 NR Description: Glyoxysomal fatty acid beta-oxidation
  misc_feature (6)..(397): Homolog of NCBI NO: 34895142 NR Description: putative tetrafunctional protein of glyoxysomal
  misc_feature (93)..(404): Homolog of NCBI NO: 551444 NR Description: protein MFP-b [Cucumis sativus]
  misc_feature (11)..(397): Homolog of NCBI NO: 15235527 NR Description: AIM1 protein; protein id: At4g29010.1, supported cDNA: gi_16648890, supported by cDNA: gi_18175605, supported by gi_20465648 [Arabidopsis thaliana] >gi|7436974|pir||T08956 AIM1
  misc_feature (8)..(397): Homolog of NCBI NO: 39931684 NR Description: Peroxisomal fatty acid beta-oxidation
  misc_feature (1)..(404): Homolog of NCBI NO: 17065148 NR Description: fatty acid multifunctional protein (AtMFP2)
  misc_feature (11)..(404): Homolog of NCBI NO: 34897626 NR Description: putative tetrafunctional protein for glyoxysomal
  misc_feature (16)..(397): Homolog of NCBI NO: 17546478 NR Description: PROBABLE TRIFUNCTONAL: ENOYL-COA HYDRATASE AND
  misc_feature (1)..(397): Homolog of NCBI NO: 15806500 NR Description: enoyl-CoA hydratase/3,2-trans-enoyl-CoA
  misc_feature (6)..(397): Homolog of NCBI NO: 23103221 NR Description: hypothetical protein [Azotobacter vinelandii]
MDSRTKGKTVMEVGGDGVAVITLINPPVNSLSFDVLYNLKSNYEEALSRNDVKAIVITGAKGRFSGGFDISGFGEMQKGNVKEPKAGYISIDIITDLLEAARKPSVAAIDGLALGGGLELAMACHARISAPAAQLGLPELQLGVIPGFGGTQRLPRLVGLTKALEMILTSKPVKAEEGHSLGLIDAVVPPAELVTTARRWALDIVGRRKPWVSSVSKTDKLPPLGEAREILTFAKAQTLKRAPNMKHPLMCLDAIEVGIVSGPRAGLEKEAEVASQVVKLDTTKGLIHVFFSQRGTAKVPGVTDRGLVPRKIKKVAIIGGGLMGSGIATALILSNYPVILKEVNEKFLEAGIGRVKANLQSRVRKGSMSQEKFEKTMSLLKGSLDYESFRDVDMVIEVRMNITS

SEQ ID NO: 84813 - protein, 394 aa, Arabidopsis thaliana
  peptide (1)..(394): Ceres Seq. ID no. 12677122
  misc_feature (299)..(394): Pfam Name: 3-hydroxyacyl-CoA dehydrogenase, NAD binding domain Pfam Description: 3-hydroxyacyl-CoA dehydrogenase, NAD binding
  misc_feature (1)..(394): Homolog of NCBI NO: 34922495 NR Description: Glyoxysomal fatty acid beta-oxidation
  misc_feature (1)..(387): Homolog of NCBI NO: 34895142 NR Description: putative tetrafunctional protein of glyoxysomal
  misc_feature (83)..(394): Homolog of NCBI NO: 551444 NR Description: protein MFP-b [Cucumis sativus]
  misc_feature (1)..(387): Homolog of NCBI NO: 15235527 NR Description: AIM1 protein; protein id: At4g29010.1, supported cDNA: gi_16648890, supported by cDNA: gi_18175605, supported by gi_20465648 [Arabidopsis thaliana] >gi|7436974|pir||T08956 AIM1
  misc_feature (1)..(387): Homolog of NCBI NO: 39931684 NR Description: Peroxisomal fatty acid beta-oxidation
  misc_feature (1)..(394): Homolog of NCBI NO: 17065148 NR Description: fatty acid multifunctional protein (AtMFP2)
  misc_feature (1)..(394): Homolog of NCBI NO: 34897626 NR Description: putative tetrafunctional protein for glyoxysomal
  misc_feature (6)..(387): Homolog of NCBI NO: 17546478 NR Description: PROBABLE TRIFUNCTONAL: ENOYL-COA HYDRATASE AND
  misc_feature (1)..(387): Homolog of NCBI NO: 15806500 NR Description: enoyl-CoA hydratase/3,2-trans-enoyl-CoA
  misc_feature (1)..(387): Homolog of NCBI NO: 23103221 NR Description: hypothetical protein [Azotobacter vinelandii]
MEVGGDGVAVITLINPPVNSLSFDVLYNLKSNYEEALSRNDVKAIVITGAKGRFSGGFDISGFGEMQKGNVKEPKAGYISIDIITDLLEAARKPSVAAIDGLALGGGLELAMACHARISAPAAQLGLPELQLGVIPGFGGTQRLPRLVGLTKALEMILTSKPVKAEEGHSLGLIDAVVPPAELVTTARRWALDIVGRRKPWVSSVSKTDKLPPLGEAREILTFAKAQTLKRAPNMKHPLMCLDAIEVGIVSGPRAGLEKEAEVASQVVKLDTTKGLIHVFFSQRGTAKVPGVTDRGLVPRKIKKVAIIGGGLMGSGIATALILSNYPVILKEVNEKFLEAGIGRVKANLQSRVRKGSMSQEKFEKTMSLLKGSLDYESFRDVDMVIEVRMNITS

SEQ ID NO: 84814 - protein, 337 aa, Arabidopsis thaliana
  peptide (1)..(337): Ceres Seq. ID no. 12677123
  misc_feature (9)..(105): Pfam Name: 3-hydroxyacyl-CoA dehydrogenase, NAD binding domain Pfam Description: 3-hydroxyacyl-CoA dehydrogenase, NAD binding
  misc_feature (9)..(337): Homolog of NCBI NO: 34922495 NR Description: Glyoxysomal fatty acid beta-oxidation
  misc_feature (9)..(337): Homolog of NCBI NO: 34895142 NR Description: putative tetrafunctional protein of glyoxysomal
  misc_feature (9)..(337): Homolog of NCBI NO: 551444 NR Description: protein MFP-b [Cucumis sativus]
  misc_feature (9)..(337): Homolog of NCBI NO: 15235527 NR Description: AIM1 protein; protein id: At4g29010.1, supported cDNA: gi_16648890, supported by cDNA: gi_18175605, supported by gi_20465648 [Arabidopsis thaliana] >gi|7436974|pir||T08956 AIM1
  misc_feature (9)..(336): Homolog of NCBI NO: 39931684 NR Description: Peroxisomal fatty acid beta-oxidation
  misc_feature (1)..(59): Homolog of NCBI NO: 34897626 NR Description: putative tetrafunctional protein for glyoxysomal
  misc_feature (9)..(337): Homolog of NCBI NO: 34897626 NR Description: putative tetrafunctional protein for glyoxysomal
  misc_feature (9)..(323): Homolog of NCBI NO: 17546478 NR Description: PROBABLE TRIFUNCTONAL: ENOYL-COA HYDRATASE AND
  misc_feature (9)..(314): Homolog of NCBI NO: 15806500 NR Description: enoyl-CoA hydratase/3,2-trans-enoyl-CoA
  misc_feature (9)..(323): Homolog of NCBI NO: 23103221 NR Description: hypothetical protein [Azotobacter vinelandii]
MMSFWWLEQAVIENISLKQQIFADLEKYCPQHCILASNTSTIDLNKIGERTKSQDRIVGAHFFSPAHIMPLLEIVRTNHTSAQVIVDLLDVGKKIKKTPVVVGNCTGFAVNRMFFPYTQAAMFLVECGADPYLIDRAISKFGMPMGPFRLCDLVGFGVAIATATQFIENFSERTYKSMIIPLMQEDKRAGEATRKGFYLYDDKRKAKPDPELKKYIEKARSISGVKLDPKLANLSEKDIIEMTFFPVVNEACRVFAEGIAVKAADLDIAGIMGMGFPPYRGGIMFWADSIGSKYIYSRLDEWSKAYGEFFKPCAFLAERGSKGVLLSAPVKQASSRL

SEQ ID NO: 84815 - DNA, 1157 bp, Arabidopsis thaliana
  misc_feature (1)..(1157): Ceres Seq. ID no. 12677140
  misc_feature: MA Experiment ID: 108464 Result: Down-regulated in Transcription
  misc_feature: MA Experiment 108464 PARAMETER Experiment Name: At_Germinating_Seeds_cDNA_P Parameter: Age (day) Value: 4 vs. 0
  misc_feature: MA Experiment 108464 PARAMETER Experiment Name: At_Germinating_Seeds_cDNA_P Parameter: Tissue Value: Germinating Seeds
  misc_feature: MA Experiment ID: 108573 Result: Up-regulated in Transcription
  misc_feature: MA Experiment 108573 PARAMETER Experiment Name: At_Drought_cDNA_P Parameter: Timepoint (hr) Value: 6
  misc_feature: MA Experiment 108573 PARAMETER Experiment Name: At_Drought_cDNA_P Parameter: Tissue Value: Aerial
  misc_feature: MA Experiment 108573 PARAMETER Experiment Name: At_Drought_cDNA_P Parameter: Treatment Value: Drought vs. No Drought
  misc_feature: MA Experiment ID: 20000234 Result: Up-regulated in Transcription
  misc_feature: MA Experiment 20000234 PARAMETER Experiment Name: At_Siliques_P Parameter: Age (day) Value: 21
  misc_feature: MA Experiment 20000234 PARAMETER Experiment Name: At_Siliques_P Parameter: Organism Value: A. thaliana
  misc_feature: MA Experiment 20000234 PARAMETER Experiment Name: At_Siliques_P Parameter: Plant Line Value: WS
  misc_feature: MA Experiment 20000234 PARAMETER Experiment Name: At_Siliques_P Parameter: Tissue Value: Less Than 5mm Siliques vs. Whole Plant
  misc_feature: MA Experiment ID: 20000235 Result: Up-regulated in Transcription
  misc_feature: MA Experiment 20000235 PARAMETER Experiment Name: At_Siliques_P Parameter: Age (day) Value: 21
  misc_feature: MA Experiment 20000235 PARAMETER Experiment Name: At_Siliques_P Parameter: Organism Value: A. thaliana
  misc_feature: MA Experiment 20000235 PARAMETER Experiment Name: At_Siliques_P Parameter: Plant Line Value: WS
  misc_feature: MA Experiment 20000235 PARAMETER Experiment Name: At_Siliques_P Parameter: Tissue Value: 5-10mm Siliques vs. Whole Plant
  misc_feature: MA Experiment ID: 20000437 Result: Up-regulated in Transcription
  misc_feature: MA Experiment 20000437 PARAMETER Experiment Name: At_Drought_P Parameter: Age (day) Value: 8
  misc_feature: MA Experiment 20000437 PARAMETER Experiment Name: At_Drought_P Parameter: Organism Value: A. thaliana
  misc_feature: MA Experiment 20000437 PARAMETER Experiment Name: At_Drought_P Parameter: Plant Line Value: WS
  misc_feature: MA Experiment 20000437 PARAMETER Experiment Name: At_Drought_P Parameter: Timepoint (hr) Value: 24
  misc_feature: MA Experiment 20000437 PARAMETER Experiment Name: At_Drought_P Parameter: Tissue Value: Whole Plant
  misc_feature: MA Experiment 20000437 PARAMETER Experiment Name: At_Drought_P Parameter: Treatment Value: Drought vs. No Drought
  misc_feature: MA Experiment ID: 20001555 Result: Up-regulated in Transcription
  misc_feature: MA Experiment 20001555 PARAMETER Experiment Name: At_Drought_Soil_Dry_P Parameter: Age (day) Value: 24
  misc_feature: MA Experiment 20001555 PARAMETER Experiment Name: At_Drought_Soil_Dry_P Parameter: Organism Value: A. thaliana
  misc_feature: MA Experiment 20001555 PARAMETER Experiment Name: At_Drought_Soil_Dry_P Parameter: Plant Line Value: WS
  misc_feature: MA Experiment 20001555 PARAMETER Experiment Name: At_Drought_Soil_Dry_P Parameter: Post Timepoint (hr) Value: None
  misc_feature: MA Experiment 20001555 PARAMETER Experiment Name: At_Drought_Soil_Dry_P Parameter: Post-Treatment Value: None
  misc_feature: MA Experiment 20001555 PARAMETER Experiment Name: At_Drought_Soil_Dry_P Parameter: Timepoint (day) Value: 10
  misc_feature: MA Experiment 20001555 PARAMETER Experiment Name: At_Drought_Soil_Dry_P Parameter: Treatment Value: Drought vs. No Drought
  misc_feature: MA Experiment ID: 20001556 Result: Up-regulated in Transcription
  misc_feature: MA Experiment 20001556 PARAMETER Experiment Name: At_Drought_Soil_Dry_P Parameter: Age (day) Value: 26
  misc_feature: MA Experiment 20001556 PARAMETER Experiment Name: At_Drought_Soil_Dry_P Parameter: Organism Value: A. thaliana
  misc_feature: MA Experiment 20001556 PARAMETER Experiment Name: At_Drought_Soil_Dry_P Parameter: Plant Line Value: WS
  misc_feature: MA Experiment 20001556 PARAMETER Experiment Name: At_Drought_Soil_Dry_P Parameter: Post Timepoint (hr) Value: None
  misc_feature: MA Experiment 20001556 PARAMETER Experiment Name: At_Drought_Soil_Dry_P Parameter: Post-Treatment Value: None
  misc_feature: MA Experiment 20001556 PARAMETER Experiment Name: At_Drought_Soil_Dry_P Parameter: Timepoint (day) Value: 12
  misc_feature: MA Experiment 20001556 PARAMETER Experiment Name: At_Drought_Soil_Dry_P Parameter: Treatment Value: Drought vs. No Drought
agagagacagagagagagaaagctcaaattcaatcatcaatgttaacggacgagagagaagtagtctgtgtcaccggcgccagtggctgcatcggctcgtggctggtccatcagctcctcctccgcggctactccgtccacgccaccgtgaaaaacctccaggatgagaaagagacgaaacatctagaaggtctcgaaggtgcagccacacgcctccatctattcgagatggatctcctacaatacgacaccgtttccgccgccatcaatggttgctccggcgtattccacctcgcatcaccttgtatcgtcgatgaagtccaagatccccagaagcaactacttgacccggcggttaaaggaaccataaatgttctgacggcggcaaaagaagccagtgttaagagagttgttgtgacgtcttcgatatcggcgattactccaagtcccaactggcctgctgataagatcaagaatgaggaatgttgggctgctgaagactactgcaggcaaaatggattgtggtatccactgtcgaagacgcttgctgagaaggcagcttgggaatttgcagaggagaaaggattggatgtggttgtggtgaatccaggcactgtcatggggcctgtgattcctccgtctcttaacgctagcatgcacatgcttctacgccttcttcaggggtgcacggagacatacgagaacttctttatggggtctgtgcatttcaaggatgtggctttagctcatattcttgtatacgaggatccatattcgaaaggaaggcacttgtgcgttgaggctatctctcactacggtgattttgtagccaaagttgctgagctctatcccaattacaatgtccccaagttaccgagagagactcaaccgggtttacttcgagataagaatgcatcaaagaagctcatagatttggggttaaagttcatttccatggaggaaatcatcaaggaaggtgtggagagtcttaaaagcaaaggatttatctcttaatacctacctctgtaactctgtttgattgagcaattaacacaatctctaggcagcagaaacatttcatatgatatacgattttgcacttttgtaataaataagctggcctatggtatggtatgaacatccaattaatatttatt

SEQ ID NO: 84816 - protein, 337 aa, Arabidopsis thaliana
  peptide (1)..(337): Ceres Seq. ID no. 12677141
  misc_feature (19)..(208): Pfam Name: 3-beta hydroxysteroid dehydrogenase/isomerase family Pfam Description: 3-beta hydroxysteroid dehydrogenase/isomerase
  misc_feature (14)..(337): Homolog of NCBI NO: 15237678 NR Description: cinnamoyl-CoA reductase - like protein; protein At5g58490.1, supported by cDNA: 30064., supported by cDNA:
  misc_feature (18)..(337): Homolog of NCBI NO: 28876000 NR Description: putative cinnamoyl-CoA reductase [Oryza sativa
  misc_feature (19)..(336): Homolog of NCBI NO: 15226955 NR Description: putative cinnamoyl-CoA reductase; protein id:
  misc_feature (21)..(336): Homolog of NCBI NO: 34907928 NR Description: putative cinnamoyl CoA reductase [Oryza sativa
  misc_feature (2)..(337): Homolog of NCBI NO: 34913420 NR Description: putative cinnamyl-alcohol dehydrogenase [Oryza
  misc_feature (16)..(337): Homolog of NCBI NO: 17978649 NR Description: cinnamoyl-CoA reductase [Pinus taeda]
  misc_feature (14)..(336): Homolog of NCBI NO: 30694964 NR Description: cinnamyl-alcohol dehydrogenase (CAD), putative
  misc_feature (14)..(336): Homolog of NCBI NO: 25405464 NR Description: hypothetical protein F5D21.12 [imported] - thaliana >gi|12325359|gb|AAG52618.1|AC024261_5 cinnamyl alcohol
  misc_feature (14)..(336): Homolog of NCBI NO: 25140434 NR Description: cinnamoyl CoA reductase [Solanum tuberosum]
  misc_feature (18)..(335): Homolog of NCBI NO: 15239741 NR Description: cinnamyl-alcohol dehydrogenase - like protein;
RETEREKAQIQSSMLTDEREVVCVTGASGCIGSWLVHQLLLRGYSVHATVKNLQDEKETKHLEGLEGAATRLHLFEMDLLQYDTVSAAINGCSGVFHLASPCIVDEVQDPQKQLLDPAVKGTINVLTAAKEASVKRVVVTSSISAITPSPNWPADKIKNEECWAAEDYCRQNGLWYPLSKTLAEKAAWEFAEEKGLDVVVVNPGTVMGPVIPPSLNASMHMLLRLLQGCTETYENFFMGSVHFKDVALAHILVYEDPYSKGRHLCVEAISHYGDFVAKVAELYPNYNVPKLPRETQPGLLRDKNASKKLIDLGLKFISMEEIIKEGVESLKSKGFIS

SEQ ID NO: 84817 - protein, 324 aa, Arabidopsis thaliana; identical to SEQ ID NO: 21487
  peptide (1)..(324): Ceres Seq. ID no. 12677142
  misc_feature (6)..(195): Pfam Name: 3-beta hydroxysteroid dehydrogenase/isomerase family Pfam Description: 3-beta hydroxysteroid dehydrogenase/isomerase
  misc_feature (1)..(324): Homolog of NCBI NO: 15237678 NR Description: cinnamoyl-CoA reductase - like protein; protein At5g58490.1, supported by cDNA: 30064., supported by cDNA:
  misc_feature (5)..(324): Homolog of NCBI NO: 28876000 NR Description: putative cinnamoyl-CoA reductase [Oryza sativa
  misc_feature (6)..(323): Homolog of NCBI NO: 15226955 NR Description: putative cinnamoyl-CoA reductase; protein id:
  misc_feature (8)..(323): Homolog of NCBI NO: 34907928 NR Description: putative cinnamoyl CoA reductase [Oryza sativa
  misc_feature (1)..(324): Homolog of NCBI NO: 34913420 NR Description: putative cinnamyl-alcohol dehydrogenase [Oryza
  misc_feature (3)..(324): Homolog of NCBI NO: 17978649 NR Description: cinnamoyl-CoA reductase [Pinus taeda]
  misc_feature (1)..(323): Homolog of NCBI NO: 30694964 NR Description: cinnamyl-alcohol dehydrogenase (CAD), putative
  misc_feature (1)..(323): Homolog of NCBI NO: 25405464 NR Description: hypothetical protein F5D21.12 [imported] - thaliana >gi|12325359|gb|AAG52618.1|AC024261_5 cinnamyl alcohol
  misc_feature (1)..(323): Homolog of NCBI NO: 25140434 NR Description: cinnamoyl CoA reductase [Solanum tuberosum]
  misc_feature (5)..(322): Homolog of NCBI NO: 15239741 NR Description: cinnamyl-alcohol dehydrogenase - like protein;

SEQ ID NO: 84818 - protein, 261 aa, Arabidopsis thaliana; identical to SEQ ID NO: 21488
  peptide (1)..(261): Ceres Seq. ID no. 12677143
  misc_feature (1)..(132): Pfam Name: 3-beta hydroxysteroid dehydrogenase/isomerase family Pfam Description: 3-beta hydroxysteroid dehydrogenase/isomerase
  misc_feature (1)..(261): Homolog of NCBI NO: 15237678 NR Description: cinnamoyl-CoA reductase - like protein; protein At5g58490.1, supported by cDNA: 30064., supported by cDNA:
  misc_feature (1)..(261): Homolog of NCBI NO: 28876000 NR Description: putative cinnamoyl-CoA reductase [Oryza sativa
  misc_feature (1)..(260): Homolog of NCBI NO: 15226955 NR Description: putative cinnamoyl-CoA reductase; protein id:
  misc_feature (1)..(260): Homolog of NCBI NO: 34907928 NR Description: putative cinnamoyl CoA reductase [Oryza sativa
  misc_feature (1)..(261): Homolog of NCBI NO: 34913420 NR Description: putative cinnamyl-alcohol dehydrogenase [Oryza
  misc_feature (1)..(261): Homolog of NCBI NO: 17978649 NR Description: cinnamoyl-CoA reductase [Pinus taeda]
  misc_feature (1)..(260): Homolog of NCBI NO: 30694964 NR Description: cinnamyl-alcohol dehydrogenase (CAD), putative
  misc_feature (1)..(260): Homolog of NCBI NO: 25405464 NR Description: hypothetical protein F5D21.12 [imported] - thaliana >gi|12325359|gb|AAG52618.1|AC024261_5 cinnamyl alcohol
  misc_feature (1)..(260): Homolog of NCBI NO: 25140434 NR Description: cinnamoyl CoA reductase [Solanum tuberosum]
  misc_feature (1)..(259): Homolog of NCBI NO: 15239741 NR Description: cinnamyl-alcohol dehydrogenase - like protein;

SEQ ID NO: 84819 - DNA, 1150 bp, Arabidopsis thaliana
  misc_feature (1)..(1150): Ceres Seq. ID no. 12677164
  misc_feature: MA Experiment ID: 108464 Result: Down-regulated in Transcription
  misc_feature: MA Experiment 108464 PARAMETER Experiment Name: At_Germinating_Seeds_cDNA_P Parameter: Age (day) Value: 4 vs. 0
  misc_feature: MA Experiment 108464 PARAMETER Experiment Name: At_Germinating_Seeds_cDNA_P Parameter: Tissue Value: Germinating Seeds
  misc_feature: MA Experiment ID: 108573 Result: Up-regulated in Transcription
  misc_feature: MA Experiment 108573 PARAMETER Experiment Name: At_Drought_cDNA_P Parameter: Timepoint (hr) Value: 6
  misc_feature: MA Experiment 108573 PARAMETER Experiment Name: At_Drought_cDNA_P Parameter: Tissue Value: Aerial
  misc_feature: MA Experiment 108573 PARAMETER Experiment Name: At_Drought_cDNA_P Parameter: Treatment Value: Drought vs. No Drought
  misc_feature: MA Experiment ID: 20000234 Result: Up-regulated in Transcription
  misc_feature: MA Experiment 20000234 PARAMETER Experiment Name: At_Siliques_P Parameter: Age (day) Value: 21
  misc_feature: MA Experiment 20000234 PARAMETER Experiment Name: At_Siliques_P Parameter: Organism Value: A. thaliana
  misc_feature: MA Experiment 20000234 PARAMETER Experiment Name: At_Siliques_P Parameter: Plant Line Value: WS
  misc_feature: MA Experiment 20000234 PARAMETER Experiment Name: At_Siliques_P Parameter: Tissue Value: Less Than 5mm Siliques vs. Whole Plant
  misc_feature: MA Experiment ID: 20000235 Result: Up-regulated in Transcription
  misc_feature: MA Experiment 20000235 PARAMETER Experiment Name: At_Siliques_P Parameter: Age (day) Value: 21
  misc_feature: MA Experiment 20000235 PARAMETER Experiment Name: At_Siliques_P Parameter: Organism Value: A. thaliana
  misc_feature: MA Experiment 20000235 PARAMETER Experiment Name: At_Siliques_P Parameter: Plant Line Value: WS
  misc_feature: MA Experiment 20000235 PARAMETER Experiment Name: At_Siliques_P Parameter: Tissue Value: 5-10mm Siliques vs. Whole Plant
  misc_feature: MA Experiment ID: 20000437 Result: Up-regulated in Transcription
  misc_feature: MA Experiment 20000437 PARAMETER Experiment Name: At_Drought_P Parameter: Age (day) Value: 8
  misc_feature: MA Experiment 20000437 PARAMETER Experiment Name: At_Drought_P Parameter: Organism Value: A. thaliana
  misc_feature: MA Experiment 20000437 PARAMETER Experiment Name: At_Drought_P Parameter: Plant Line Value: WS
  misc_feature: MA Experiment 20000437 PARAMETER Experiment Name: At_Drought_P Parameter: Timepoint (hr) Value: 24
  misc_feature: MA Experiment 20000437 PARAMETER Experiment Name: At_Drought_P Parameter: Tissue Value: Whole Plant
  misc_feature: MA Experiment 20000437 PARAMETER Experiment Name: At_Drought_P Parameter: Treatment Value: Drought vs. No Drought
  misc_feature: MA Experiment ID: 20001555 Result: Up-regulated in Transcription
  misc_feature: MA Experiment 20001555 PARAMETER Experiment Name: At_Drought_Soil_Dry_P Parameter: Age (day) Value: 24
  misc_feature: MA Experiment 20001555 PARAMETER Experiment Name: At_Drought_Soil_Dry_P Parameter: Organism Value: A. thaliana
  misc_feature: MA Experiment 20001555 PARAMETER Experiment Name: At_Drought_Soil_Dry_P Parameter: Plant Line Value: WS
  misc_feature: MA Experiment 20001555 PARAMETER Experiment Name: At_Drought_Soil_Dry_P Parameter: Post Timepoint (hr) Value: None
  misc_feature: MA Experiment 20001555 PARAMETER Experiment Name: At_Drought_Soil_Dry_P Parameter: Post-Treatment Value: None
  misc_feature: MA Experiment 20001555 PARAMETER Experiment Name: At_Drought_Soil_Dry_P Parameter: Timepoint (day) Value: 10
  misc_feature: MA Experiment 20001555 PARAMETER Experiment Name: At_Drought_Soil_Dry_P Parameter: Treatment Value: Drought vs. No Drought
  misc_feature: MA Experiment ID: 20001556 Result: Up-regulated in Transcription
  misc_feature: MA Experiment 20001556 PARAMETER Experiment Name: At_Drought_Soil_Dry_P Parameter: Age (day) Value: 26
  misc_feature: MA Experiment 20001556 PARAMETER Experiment Name: At_Drought_Soil_Dry_P Parameter: Organism Value: A. thaliana
  misc_feature: MA Experiment 20001556 PARAMETER Experiment Name: At_Drought_Soil_Dry_P Parameter: Plant Line Value: WS
  misc_feature: MA Experiment 20001556 PARAMETER Experiment Name: At_Drought_Soil_Dry_P Parameter: Post Timepoint (hr) Value: None
  misc_feature: MA Experiment 20001556 PARAMETER Experiment Name: At_Drought_Soil_Dry_P Parameter: Post-Treatment Value: None
  misc_feature: MA Experiment 20001556 PARAMETER Experiment Name: At_Drought_Soil_Dry_P Parameter: Timepoint (day) Value: 12
  misc_feature: MA Experiment 20001556 PARAMETER Experiment Name: At_Drought_Soil_Dry_P Parameter: Treatment Value: Drought vs. No Drought
gaaacttagagagacagagagagagaaagctcaaattcaatcatcaatgttaacggacgagagagaagtagtctgtgtcaccggcgccagtggctgcatcggctcgtggctggtccatcagctcctcctccgcggctactccgtccacgccaccgtgaaaaacctccaggatgagaaagagacgaaacatctagaaggtctcgaaggtgcagccacacgcctccatctattcgagatggatctcctacaatacgacaccgtttccgccgccatcaatggttgctccggcgtattccacctcgcatcaccttgtatcgtcgatgaagtccaagatccccagaagcaactacttgacccggcggttaaaggaaccataaatgttctgacggcggcaaaagaagccagtgttaagagagttgttgtgacgtcttcgatatcggcgattactccaagtcccaactggcctgctgataagatcaagaatgaggaatgttgggctgctgaagactactgcaggcaaaatggattgtggtatccactgtcgaagacgcttgctgagaaggcagcttgggaatttgcagaggagaaaggattggatgtggttgtggtgaatccaggcactgtcatggggcctgtgattcctccgtctcttaacgctagcatgcacatgcttctacgccttcttcaggggtgcacggagacatacgagaacttctttatggggtctgtgcatttcaaggatgtggctttagctcatattcttgtatacgaggatccatattcgaaaggaaggcacttgtgcgttgaggctatctctcactacggtgattttgtagccaaagttgctgagctctatcccaattacaatgtccccaagttaccgagagagactcaaccgggtttacttcgagataagaatgcatcaaagaagctcatagatttggggttaaagttcatttccatggaggaaatcatcaaggaaggtgtggagagtcttaaaagcaaaggatttatctcttaatacctacctctgtaactctgtttgattgagcaattaacacaatctctaggcagcagaaacatttcatatgatatacgattttgcacttttgtaataaataagctggcctatggtatggtatgaacatcc

SEQ ID NO: 84820 - protein, 339 aa, Arabidopsis thaliana; identical to SEQ ID NO: 21486
  peptide (1)..(339): Ceres Seq. ID no. 12677165
  misc_feature (21)..(210): Pfam Name: 3-beta hydroxysteroid dehydrogenase/isomerase family Pfam Description: 3-beta hydroxysteroid dehydrogenase/isomerase
  misc_feature (16)..(339): Homolog of NCBI NO: 15237678 NR Description: cinnamoyl-CoA reductase - like protein; protein At5g58490.1, supported by cDNA: 30064., supported by cDNA:
  misc_feature (20)..(339): Homolog of NCBI NO: 28876000 NR Description: putative cinnamoyl-CoA reductase [Oryza sativa
  misc_feature (21)..(338): Homolog of NCBI NO: 15226955 NR Description: putative cinnamoyl-CoA reductase; protein id:
  misc_feature (23)..(338): Homolog of NCBI NO: 34907928 NR Description: putative cinnamoyl CoA reductase [Oryza sativa
  misc_feature (4)..(339): Homolog of NCBI NO: 34913420 NR Description: putative cinnamyl-alcohol dehydrogenase [Oryza
  misc_feature (18)..(339): Homolog of NCBI NO: 17978649 NR Description: cinnamoyl-CoA reductase [Pinus taeda]
  misc_feature (16)..(338): Homolog of NCBI NO: 30694964 NR Description: cinnamyl-alcohol dehydrogenase (CAD), putative
  misc_feature (2)..(338): Homolog of NCBI NO: 25405464 NR Description: hypothetical protein F5D21.12 [imported] - thaliana >gi|12325359|gb|AAG52618.1|AC024261_5 cinnamyl alcohol
  misc_feature (16)..(338): Homolog of NCBI NO: 25140434 NR Description: cinnamoyl CoA reductase [Solanum tuberosum]
  misc_feature (20)..(337): Homolog of NCBI NO: 15239741 NR Description: cinnamyl-alcohol dehydrogenase - like protein;

SEQ ID NO: 84821 - protein, 324 aa, Arabidopsis thaliana; identical to SEQ ID NO: 21487
  peptide (1)..(324): Ceres Seq. ID no. 12677166
  misc_feature (6)..(195): Pfam Name: 3-beta hydroxysteroid dehydrogenase/isomerase family Pfam Description: 3-beta hydroxysteroid dehydrogenase/isomerase
  misc_feature (1)..(324): Homolog of NCBI NO: 15237678 NR Description: cinnamoyl-CoA reductase - like protein; protein At5g58490.1, supported by cDNA: 30064., supported by cDNA:
  misc_feature (5)..(324): Homolog of NCBI NO: 28876000 NR Description: putative cinnamoyl-CoA reductase [Oryza sativa
  misc_feature (6)..(323): Homolog of NCBI NO: 15226955 NR Description: putative cinnamoyl-CoA reductase; protein id:
  misc_feature (8)..(323): Homolog of NCBI NO: 34907928 NR Description: putative cinnamoyl CoA reductase [Oryza sativa
  misc_feature (1)..(324): Homolog of NCBI NO: 34913420 NR Description: putative cinnamyl-alcohol dehydrogenase [Oryza
  misc_feature (3)..(324): Homolog of NCBI NO: 17978649 NR Description: cinnamoyl-CoA reductase [Pinus taeda]
  misc_feature (1)..(323): Homolog of NCBI NO: 30694964 NR Description: cinnamyl-alcohol dehydrogenase (CAD), putative
  misc_feature (1)..(323): Homolog of NCBI NO: 25405464 NR Description: hypothetical protein F5D21.12 [imported] - thaliana >gi|12325359|gb|AAG52618.1|AC024261_5 cinnamyl alcohol
  misc_feature (1)..(323): Homolog of NCBI NO: 25140434 NR Description: cinnamoyl CoA reductase [Solanum tuberosum]
  misc_feature (5)..(322): Homolog of NCBI NO: 15239741 NR Description: cinnamyl-alcohol dehydrogenase - like protein;

SEQ ID NO: 84822 - protein, 261 aa, Arabidopsis thaliana; identical to SEQ ID NO: 21488
  peptide (1)..(261): Ceres Seq. ID no. 12677167
  misc_feature (1)..(132): Pfam Name: 3-beta hydroxysteroid dehydrogenase/isomerase family Pfam Description: 3-beta hydroxysteroid dehydrogenase/isomerase
  misc_feature (1)..(261): Homolog of NCBI NO: 15237678 NR Description: cinnamoyl-CoA reductase - like protein; protein At5g58490.1, supported by cDNA: 30064., supported by cDNA:
  misc_feature (1)..(261): Homolog of NCBI NO: 28876000 NR Description: putative cinnamoyl-CoA reductase [Oryza sativa
  misc_feature (1)..(260): Homolog of NCBI NO: 15226955 NR Description: putative cinnamoyl-CoA reductase; protein id:
  misc_feature (1)..(260): Homolog of NCBI NO: 34907928 NR Description: putative cinnamoyl CoA reductase [Oryza sativa
  misc_feature (1)..(261): Homolog of NCBI NO: 34913420 NR Description: putative cinnamyl-alcohol dehydrogenase [Oryza
  misc_feature (1)..(261): Homolog of NCBI NO: 17978649 NR Description: cinnamoyl-CoA reductase [Pinus taeda]
  misc_feature (1)..(260): Homolog of NCBI NO: 30694964 NR Description: cinnamyl-alcohol dehydrogenase (CAD), putative
  misc_feature (1)..(260): Homolog of NCBI NO: 25405464 NR Description: hypothetical protein F5D21.12 [imported] - thaliana >gi|12325359|gb|AAG52618.1|AC024261_5 cinnamyl alcohol
  misc_feature (1)..(260): Homolog of NCBI NO: 25140434 NR Description: cinnamoyl CoA reductase [Solanum tuberosum]
  misc_feature (1)..(259): Homolog of NCBI NO: 15239741 NR Description: cinnamyl-alcohol dehydrogenase - like protein;

SEQ ID NO: 84823 - DNA, 2616 bp, Arabidopsis thaliana
  misc_feature (1)..(2616): Ceres Seq. ID no. 12677182
  misc_feature: MA Experiment ID: 20000234 Result: Down-regulated in Transcription
  misc_feature: MA Experiment 20000234 PARAMETER Experiment Name: At_Siliques_P Parameter: Age (day) Value: 21
  misc_feature: MA Experiment 20000234 PARAMETER Experiment Name: At_Siliques_P Parameter: Organism Value: A. thaliana
  misc_feature: MA Experiment 20000234 PARAMETER Experiment Name: At_Siliques_P Parameter: Plant Line Value: WS
  misc_feature: MA Experiment 20000234 PARAMETER Experiment Name: At_Siliques_P Parameter: Tissue Value: Less Than 5mm Siliques vs. Whole Plant
  misc_feature: MA Experiment ID: 20000264 Result: Down-regulated in Transcription
  misc_feature: MA Experiment 20000264 PARAMETER Experiment Name: At_Open_Flower_P Parameter: Age (day) Value: 21
  misc_feature: MA Experiment 20000264 PARAMETER Experiment Name: At_Open_Flower_P Parameter: Plant Line Value: WS
  misc_feature: MA Experiment 20000264 PARAMETER Experiment Name: At_Open_Flower_P Parameter: Tissue Value: Open Flower vs. Whole Plant
  misc_feature: MA Experiment ID: 20000265 Result: Down-regulated in Transcription
  misc_feature: MA Experiment 20000265 PARAMETER Experiment Name: At_Open_Flower_P Parameter: Age (day) Value: 21
  misc_feature: MA Experiment 20000265 PARAMETER Experiment Name: At_Open_Flower_P Parameter: Plant Line Value: WS
  misc_feature: MA Experiment 20000265 PARAMETER Experiment Name: At_Open_Flower_P Parameter: Tissue Value: Closed Flower vs. Whole Plant
  misc_feature: MA Experiment ID: 20000495 Result: Up-regulated in Transcription
  misc_feature: MA Experiment 20000495 PARAMETER Experiment Name: At_Guard_Cells_P Parameter: Harvest Date Value: 8/2/2002
  misc_feature: MA Experiment 20000495 PARAMETER Experiment Name: At_Guard_Cells_P Parameter: Organism Value: A. thaliana
  misc_feature: MA Experiment 20000495 PARAMETER Experiment Name: At_Guard_Cells_P Parameter: Tissue Value: Guard Cells vs. Leaves
gaaactttattgagtatttgtctatttgagtttctctcatcttcttttgttttgcttcacatcgttcacatcaattagtttctatcagctccagcaaatggttagtgtgttcatcagctaaaatcattaaggattgcgttacttcttcttcaggaaggactagaaatgagaaagagttgattactccatattgagtgtgaagatgacgaggtggtctatgtctatgcactgcacattgttcttgctatttctgttgaggctcacttgtatattctcagattccgattatttgatgggtcttggaagctatgacatcacaggacctgcagctgatgttaacatgatgggttatgctaacatggaacaagtagcatctggtgttcacttcaggctcagagctcgtgcgttcatcgtggctgagccatacaagaaaaggattgcttttgttaatcttgatgctggtatggcctcacagcttgtgaccatcaaagtgattgaaagattgaaacagaggtacggtgagctttatacggaggaaaatgttgcaattagtggaactcatactcatgctggtccagggggttatctccaatacattttgtacttagttacatctctcgggtttgttcatcaatctttcaatgctcttgtggacggtatagagcaaagtattatacaagctcatgaaaatcttcgtcccgggtccattttaatcaacaaaggggagctcttggatgctggtgtgaaccgtagtcccagtgcttaccttaacaatccggcacatgaacgtagtaaatatgaatatgatgtagataaagagatgacacttgtcaaattcgttgatgatcaatggggtccagtgggtagtttcaattggtttgcaactcatggcacttcgatgagccgtacaaatgccttgaatcagcggggacaataaaggcactgcagcacgtatcatggaagactggtttgaacgagaaaacggttgtagatcagttgatgttgaatctcctagaagagtctcaagcataatcagtgatccttatgatcaagatttgatggaaatggcatcctcgttactgtctaccggcggtaaaaccgttacaaggatgtcaagcgttgctagacgggtcagaagtagatttagacacgctgacaaacctagatttgtctctgccttctgtcaaactaactgcggtgatgttagtccgaatgtgttgggagccttctgtatagacacaggccttccttgtgaattcaaccaaagtacttgtggtggaaagaatgagcaatgctacggccgtggaccaggctaccctgatgaatttgagagtacccgcattattggagagaggcagttcaagaaggctgcggatcttttcactaaagcctctgaggagatacaaggaaaagttgactatcgtcatgcatatgttgatttctctcagcttgaagtgacgattaatggacaaaatggaggttccgaagtggtgaaaacatgtccagctgcaatgggttttggtttcgctgcaggaacaactgatggacctggagcatttgactttaaacaaggagatgatcaggtaaaacccaaattctccttctaacttggtaatgaaagatgtttagtactatactttatgttgtgactttgtgtaagggaaatcctttctggaggcttgtaaggaaccttctcaagaatccaactgaggaacaagtacgatgccaacgacctaaacccatattgcttgataccggtgaaatgaaacaaccatacgactgggcgccgtcgatattaccagttcagatcctccgcattggccagctagtgattctctgcgtccccggagaattcacaacaatggcagggaggcgactacgtgatgccgtgaaaacagtgcttaaagaaggcagcaatggaagagaattcagcgtggtaatagccgggctaaccaattcgtattcgcagtatattgccacatttgaggaataccaagttcagagatatgagggtgcatcgactttgtatggacctcacacgctaagcggatacattcaagaattcaagaaactagcaaatgatcttctatctgctcaaaccactgacccgggtccccaaccacctgacttacttcacaagcaaataagcttactaacacctgttgttgcggatatgacaccaattggaactgcattcggagatgttacatcggatgttcctcggttatccaaattcaggaagggagctgacatagtgagggttcaattccggtcagctaacccgagaaacgatctgatgacggaaggaactttcgcgcttgttgagaggtggctcgaaggaagagagacatgggtacctgtttatgatgatgatgacttttgcctccggtttaagtggtcaagaccgtttaaactcagcacgcagagcacagcaactatcgaatggagaatccctgaaaccgcatcacctggtgtttatagaatcactcactttggttcagctaaaactcctataagctccattcaccatttctctggttcatctagtgcctttgttgtatattgaaatgtacacgtgaatagtctttatacgtatccctagcaacaccatccagt

SEQ ID NO: 84824 - protein, 314 aa, Arabidopsis thaliana
  peptide (1)..(314): Ceres Seq. ID no. 12677183
  misc_feature (13)..(313): Homolog of NCBI NO: 15222380 NR Description: unknown protein; protein id: At1g07380.1
  misc_feature (13)..(295): Homolog of NCBI NO: 25333800 NR Description: protein F22G5.28 [imported] - Arabidopsis >gi|8778548|gb|AAF79556.1|AC022464_14 F22G5.28 [Arabidopsis
  misc_feature (13)..(314): Homolog of NCBI NO: 34912830 NR Description: P0501G01.24 [Oryza sativa (japonica
  misc_feature (13)..(313): Homolog of NCBI NO: 15224424 NR Description: hypothetical protein; protein id: At2g38010.1
  misc_feature (1)..(314): Homolog of NCBI NO: 15982799 NR Description: AT5g58980/k19m22_180 [Arabidopsis thaliana]
  misc_feature (15)..(313): Homolog of NCBI NO: 2367392 NR Description: random slug cDNA25 protein [Dictyostelium
  misc_feature (13)..(313): Homolog of NCBI NO: 9845267 NR Description: N-acylsphingosine amidohydrolase (non-lysosomal
  misc_feature (13)..(313): Homolog of NCBI NO: 33317288 NR Description: neutral/alkaline ceramidase [Homo sapiens]
  misc_feature (13)..(313): Homolog of NCBI NO: 16758458 NR Description: N-acylsphingosine amidohydrolase 2 [Rattus
  misc_feature (13)..(313): Homolog of NCBI NO: 9055168 NR Description: N-acylsphingosine amidohydrolase 2; neutral/alkaline ceramidase [Mus musculus] neutral ceramidase [Mus musculus] >gi|7576311|dbj|BAA94546.1|
MFSTILYVVTLCKGNPFWRLVRNLLKNPTEEQVRCQRPKPILLDTGEMKQPYDWAPSILPVQILRIGQLVILCVPGEFTTMAGRRLRDAVKTVLKEGSNGREFSVVIAGLTNSYSQYIATFEEYQVQRYEGASTLYGPHTLSGYIQEFKKLANDLLSAQTTDPGPQPPDLLHKQISLLTPVVADMTPIGTAFGDVTSDVPRLSKFRKGADIVRVQFRSANPRNDLMTEGTFALVERWLEGRETWVPVYDDDDFCLRFKWSRPFKLSTQSTATIEWRIPETASPGVYRITHFGSAKTPISSIHHFSGSSSAFVVY

SEQ ID NO: 84825 - protein, 267 aa, Arabidopsis thaliana
  peptide (1)..(267): Ceres Seq. ID no. 12677184
  misc_feature (1)..(266): Homolog of NCBI NO: 15222380 NR Description: unknown protein; protein id: At1g07380.1
  misc_feature (1)..(248): Homolog of NCBI NO: 25333800 NR Description: protein F22G5.28 [imported] - Arabidopsis >gi|8778548|gb|AAF79556.1|AC022464_14 F22G5.28 [Arabidopsis
  misc_feature (1)..(267): Homolog of NCBI NO: 34912830 NR Description: P0501G01.24 [Oryza sativa (japonica
  misc_feature (1)..(266): Homolog of NCBI NO: 15224424 NR Description: hypothetical protein; protein id: At2g38010.1
  misc_feature (1)..(267): Homolog of NCBI NO: 15982799 NR Description: AT5g58980/k19m22_180 [Arabidopsis thaliana]
  misc_feature (1)..(266): Homolog of NCBI NO: 2367392 NR Description: random slug cDNA25 protein [Dictyostelium
  misc_feature (1)..(266): Homolog of NCBI NO: 9845267 NR Description: N-acylsphingosine amidohydrolase (non-lysosomal
  misc_feature (1)..(266): Homolog of NCBI NO: 33317288 NR Description: neutral/alkaline ceramidase [Homo sapiens]
  misc_feature (1)..(266): Homolog of NCBI NO: 16758458 NR Description: N-acylsphingosine amidohydrolase 2 [Rattus
  misc_feature (1)..(266): Homolog of NCBI NO: 9055168 NR Description: N-acylsphingosine amidohydrolase 2; neutral/alkaline ceramidase [Mus musculus] neutral ceramidase [Mus musculus] >gi|7576311|dbj|BAA94546.1|
MKQPYDWAPSILPVQILRIGQLVILCVPGEFTTMAGRRLRDAVKTVLKEGSNGREFSVVIAGLTNSYSQYIATFEEYQVQRYEGASTLYGPHTLSGYIQEFKKLANDLLSAQTTDPGPQPPDLLHKQISLLTPVVADMTPIGTAFGDVTSDVPRLSKFRKGADIVRVQFRSANPRNDLMTEGTFALVERWLEGRETWVPVYDDDDFCLRFKWSRPFKLSTQSTATIEWRIPETASPGVYRITHFGSAKTPISSIHHFSGSSSAFVVY

SEQ ID NO: 84826 - protein, 244 aa, Arabidopsis thaliana
  peptide (1)..(244): Ceres Seq. ID no. 12677185
  misc_feature (28)..(129): Pfam Name: Neutral/alkaline non-lysosomal ceramidase Pfam Description: Neutral/alkaline non-lysosomal ceramidase
  misc_feature (14)..(239): Homolog of NCBI NO: 15222380 NR Description: unknown protein; protein id: At1g07380.1
  misc_feature (14)..(239): Homolog of NCBI NO: 25333800 NR Description: protein F22G5.28 [imported] - Arabidopsis >gi|8778548|gb|AAF79556.1|AC022464_14 F22G5.28 [Arabidopsis
  misc_feature (12)..(239): Homolog of NCBI NO: 34912830 NR Description: P0501G01.24 [Oryza sativa (japonica
  misc_feature (111)..(239): Homolog of NCBI NO: 15224424 NR Description: hypothetical protein; protein id: At2g38010.1
  misc_feature (5)..(126): Homolog of NCBI NO: 15224424 NR Description: hypothetical protein; protein id: At2g38010.1
  misc_feature (26)..(239): Homolog of NCBI NO: 2367392 NR Description: random slug cDNA25 protein [Dictyostelium
  misc_feature (27)..(239): Homolog of NCBI NO: 9845267 NR Description: N-acylsphingosine amidohydrolase (non-lysosomal
  misc_feature (27)..(239): Homolog of NCBI NO: 33317288 NR Description: neutral/alkaline ceramidase [Homo sapiens]
  misc_feature (27)..(239): Homolog of NCBI NO: 16758458 NR Description: N-acylsphingosine amidohydrolase 2 [Rattus
  misc_feature (27)..(237): Homolog of NCBI NO: 9055168 NR Description: N-acylsphingosine amidohydrolase 2; neutral/alkaline ceramidase [Mus musculus] neutral ceramidase [Mus musculus] >gi|7576311|dbj|BAA94546.1|
MTRWSMSMHCTLFLLFLLRLTCIFSDSDYLMGLGSYDITGPAADVNMMGYANMEQVASGVHFRLRARAFIVAEPYKKRIAFVNLDAGMASQLVTIKVIERLKQRYGELYTEENVAISGTHTHAGPGGYLQYILYLVTSLGFVHQSFNALVDGIEQSIIQAHENLRPGSILINKGELLDAGVNRSPSAYLNNPAHERSKYEYDVDKEMTLVKFVDDQWGPVGSFNWFATHGTSMSRTNALNQRGQ

SEQ ID NO: 84827 - DNA, 1386 bp, Arabidopsis thaliana
  misc_feature (1)..(1386): Ceres Seq. ID no. 12677204
  misc_feature: MA Experiment ID: 108434 Result: Up-regulated in Transcription
  misc_feature: MA Experiment 108434 PARAMETER Experiment Name: At_Root_Tips_cDNA_P Parameter: Tissue Value: Root Tips
  misc_feature: MA Experiment ID: 108461 Result: Down-regulated in Transcription
  misc_feature: MA Experiment 108461 PARAMETER Experiment Name: At_Germinating_Seeds_cDNA_P Parameter: Age (day) Value: 1 vs. 0
  misc_feature: MA Experiment 108461 PARAMETER Experiment Name: At_Germinating_Seeds_cDNA_P Parameter: Tissue Value: Germinating Seeds
  misc_feature: MA Experiment ID: 108462 Result: Down-regulated in Transcription
  misc_feature: MA Experiment 108462 PARAMETER Experiment Name: At_Germinating_Seeds_cDNA_P Parameter: Age (day) Value: 2 vs. 0
  misc_feature: MA Experiment 108462 PARAMETER Experiment Name: At_Germinating_Seeds_cDNA_P Parameter: Tissue Value: Germinating Seeds
  misc_feature: MA Experiment ID: 108463 Result: Down-regulated in Transcription
  misc_feature: MA Experiment 108463 PARAMETER Experiment Name: At_Germinating_Seeds_cDNA_P Parameter: Age (day) Value: 3 vs. 0
  misc_feature: MA Experiment 108463 PARAMETER Experiment Name: At_Germinating_Seeds_cDNA_P Parameter: Tissue Value: Germinating Seeds
  misc_feature: MA Experiment ID: 108464 Result: Down-regulated in Transcription
  misc_feature: MA Experiment 108464 PARAMETER Experiment Name: At_Germinating_Seeds_cDNA_P Parameter: Age (day) Value: 4 vs. 0
  misc_feature: MA Experiment 108464 PARAMETER Experiment Name: At_Germinating_Seeds_cDNA_P Parameter: Tissue Value: Germinating Seeds
  misc_feature: MA Experiment ID: 108469 Result: Down-regulated in Transcription
  misc_feature: MA Experiment ID: 108489 Result: Up-regulated in Transcription
  misc_feature: MA Experiment ID: 108579 Result: Up-regulated in Transcription
  misc_feature: MA Experiment 108579 PARAMETER Experiment Name: At_4deg_Cold_cDNA_P Parameter: Temperature (deg C) Value: 4 vs. 22
  misc_feature: MA Experiment 108579 PARAMETER Experiment Name: At_4deg_Cold_cDNA_P Parameter: Timepoint (hr) Value: 6
  misc_feature: MA Experiment 108579 PARAMETER Experiment Name: At_4deg_Cold_cDNA_P Parameter: Tissue Value: Aerial
  misc_feature: MA Experiment ID: 108585 Result: Up-regulated in Transcription
  misc_feature: MA Experiment 108585 PARAMETER Experiment Name: At_5mM_NaNP_cDNA_P Parameter: Timepoint (hr) Value: 6
  misc_feature: MA Experiment 108585 PARAMETER Experiment Name: At_5mM_NaNP_cDNA_P Parameter: Tissue Value: Aerial
  misc_feature: MA Experiment 108585 PARAMETER Experiment Name: At_5mM_NaNP_cDNA_P Parameter: Treatment Value: null
  misc_feature: MA Experiment ID: 108594 Result: Down-regulated in Transcription
  misc_feature: MA Experiment 108594 PARAMETER Experiment Name: At_Ler-rhl_Root_cDNA_P Parameter: Plant Line Value: null
  misc_feature: MA Experiment ID: 20000069 Result: Up-regulated in Transcription
  misc_feature: MA Experiment 20000069 PARAMETER Experiment Name: At_100uM_ABA_Mutants_cDNA_P Parameter: Plant Line Value: CS23
  misc_feature: MA Experiment 20000069 PARAMETER Experiment Name: At_100uM_ABA_Mutants_cDNA_P Parameter: Timepoint (hr) Value: 6
  misc_feature: MA Experiment 20000069 PARAMETER Experiment Name: At_100uM_ABA_Mutants_cDNA_P Parameter: Tissue Value: Aerial
  misc_feature: MA Experiment 20000069 PARAMETER Experiment Name: At_100uM_ABA_Mutants_cDNA_P Parameter: Treatment Value: 100uM ABA vs. No Treatment
  misc_feature: MA Experiment ID: 20000070 Result: Up-regulated in Transcription
  misc_feature: MA Experiment 20000070 PARAMETER Experiment Name: At_100uM_ABA_Mutants_cDNA_P Parameter: Plant Line Value: CS24
  misc_feature: MA Experiment 20000070 PARAMETER Experiment Name: At_100uM_ABA_Mutants_cDNA_P Parameter: Timepoint (hr) Value: 6
  misc_feature: MA Experiment 20000070 PARAMETER Experiment Name: At_100uM_ABA_Mutants_cDNA_P Parameter: Tissue Value: Aerial
  misc_feature: MA Experiment 20000070 PARAMETER Experiment Name: At_100uM_ABA_Mutants_cDNA_P Parameter: Treatment Value: 100uM ABA vs. No Treatment
  misc_feature: MA Experiment ID: 20000071 Result: Up-regulated in Transcription
  misc_feature: MA Experiment 20000071 PARAMETER Experiment Name: At_100uM_ABA_Mutants_cDNA_P Parameter: Plant Line Value: CS8104
  misc_feature: MA Experiment 20000071 PARAMETER Experiment Name: At_100uM_ABA_Mutants_cDNA_P Parameter: Timepoint (hr) Value: 6
  misc_feature: MA Experiment 20000071 PARAMETER Experiment Name: At_100uM_ABA_Mutants_cDNA_P Parameter: Tissue Value: Aerial
  misc_feature: MA Experiment 20000071 PARAMETER Experiment Name: At_100uM_ABA_Mutants_cDNA_P Parameter: Treatment Value: 100uM ABA vs. No Treatment
  misc_feature: MA Experiment ID: 20000072 Result: Up-regulated in Transcription
  misc_feature: MA Experiment 20000072 PARAMETER Experiment Name: At_100uM_ABA_Mutants_cDNA_P Parameter: Plant Line Value: CS8105
  misc_feature: MA Experiment 20000072 PARAMETER Experiment Name: At_100uM_ABA_Mutants_cDNA_P Parameter: Timepoint (hr) Value: 6
  misc_feature: MA Experiment 20000072 PARAMETER Experiment Name: At_100uM_ABA_Mutants_cDNA_P Parameter: Tissue Value: Aerial
  misc_feature: MA Experiment 20000072 PARAMETER Experiment Name: At_100uM_ABA_Mutants_cDNA_P Parameter: Treatment Value: 100uM ABA vs. No Treatment
  misc_feature: MA Experiment ID: 20000086 Result: Up-regulated in Transcription
  misc_feature: MA Experiment 20000086 PARAMETER Experiment Name: At_100uM_ABA_Mutants_cDNA_P Parameter: Plant Line Value: CS22
  misc_feature: MA Experiment 20000086 PARAMETER Experiment Name: At_100uM_ABA_Mutants_cDNA_P Parameter: Timepoint (hr) Value: 6
  misc_feature: MA Experiment 20000086 PARAMETER Experiment Name: At_100uM_ABA_Mutants_cDNA_P Parameter: Tissue Value: Aerial
  misc_feature: MA Experiment 20000086 PARAMETER Experiment Name: At_100uM_ABA_Mutants_cDNA_P Parameter: Treatment Value: 100uM ABA vs. No Treatment
  misc_feature: MA Experiment ID: 20000087 Result: Up-regulated in Transcription
  misc_feature: MA Experiment 20000087 PARAMETER Experiment Name: At_100uM_ABA_Mutants_cDNA_P Parameter: Plant Line Value: WS
  misc_feature: MA Experiment 20000087 PARAMETER Experiment Name: At_100uM_ABA_Mutants_cDNA_P Parameter: Timepoint (hr) Value: 6
  misc_feature: MA Experiment 20000087 PARAMETER Experiment Name: At_100uM_ABA_Mutants_cDNA_P Parameter: Tissue Value: Aerial
  misc_feature: MA Experiment 20000087 PARAMETER Experiment Name: At_100uM_ABA_Mutants_cDNA_P Parameter: Treatment Value: 100uM ABA vs. No Treatment
  misc_feature: MA Experiment ID: 20000117 Result: Up-regulated in Transcription
  misc_feature: MA Experiment 20000117 PARAMETER Experiment Name: At_100uM_ABA_Mutants_cDNA_P Parameter: Plant Line Value: Columbia
  misc_feature: MA Experiment 20000117 PARAMETER Experiment Name: At_100uM_ABA_Mutants_cDNA_P Parameter: Timepoint (hr) Value: 6
  misc_feature: MA Experiment 20000117 PARAMETER Experiment Name: At_100uM_ABA_Mutants_cDNA_P Parameter: Tissue Value: Aerial
  misc_feature: MA Experiment 20000117 PARAMETER Experiment Name: At_100uM_ABA_Mutants_cDNA_P Parameter: Treatment Value: 100uM ABA vs. No Treatment
  misc_feature: MA Experiment ID: 20000179 Result: Down-regulated in Transcription
  misc_feature: MA Experiment 20000179 PARAMETER Experiment Name: At_Germinating_Seeds_P Parameter: Age (hr) Value: 6 vs. 0
  misc_feature: MA Experiment 20000179 PARAMETER Experiment Name: At_Germinating_Seeds_P Parameter: Tissue Value: Germinating Seeds
  misc_feature: MA Experiment ID: 20000180 Result: Down-regulated in Transcription
  misc_feature: MA Experiment 20000180 PARAMETER Experiment Name: At_Germinating_Seeds_P Parameter: Age (hr) Value: 24 vs. 0
  misc_feature: MA Experiment 20000180 PARAMETER Experiment Name: At_Germinating_Seeds_P Parameter: Tissue Value: Germinating Seeds
  misc_feature: MA Experiment ID: 20000185 Result: Up-regulated in Transcription
  misc_feature: MA Experiment 20000185 PARAMETER Experiment Name: At_Roots__P Parameter: Age (day) Value: 7 vs. 21
  misc_feature: MA Experiment 20000185 PARAMETER Experiment Name: At_Roots__P Parameter: Organism Value: A. thaliana
  misc_feature: MA Experiment 20000185 PARAMETER Experiment Name: At_Roots__P Parameter: Tissue Value: Roots vs. Whole Plant
  misc_feature: MA Experiment ID: 20000227 Result: Up-regulated in Transcription
  misc_feature: MA Experiment 20000227 PARAMETER Experiment Name: At_Root-Tips-vs-Tops_P Parameter: Tissue Value: Root Tips vs. Root Tops
  misc_feature: MA Experiment ID: 20000234 Result: Up-regulated in Transcription
  misc_feature: MA Experiment 20000234 PARAMETER Experiment Name: At_Siliques_P Parameter: Age (day) Value: 21
  misc_feature: MA Experiment 20000234 PARAMETER Experiment Name: At_Siliques_P Parameter: Organism Value: A. thaliana
  misc_feature: MA Experiment 20000234 PARAMETER Experiment Name: At_Siliques_P Parameter: Plant Line Value: WS
  misc_feature: MA Experiment 20000234 PARAMETER Experiment Name: At_Siliques_P Parameter: Tissue Value: Less Than 5mm Siliques vs. Whole Plant
  misc_feature: MA Experiment ID: 20000235 Result: Up-regulated in Transcription
  misc_feature: MA Experiment 20000235 PARAMETER Experiment Name: At_Siliques_P Parameter: Age (day) Value: 21
  misc_feature: MA Experiment 20000235 PARAMETER Experiment Name: At_Siliques_P Parameter: Organism Value: A. thaliana
  misc_feature: MA Experiment 20000235 PARAMETER Experiment Name: At_Siliques_P Parameter: Plant Line Value: WS
  misc_feature: MA Experiment 20000235 PARAMETER Experiment Name: At_Siliques_P Parameter: Tissue Value: 5-10mm Siliques vs. Whole Plant
  misc_feature: MA Experiment ID: 20000265 Result: Up-regulated in Transcription
  misc_feature: MA Experiment 20000265 PARAMETER Experiment Name: At_Open_Flower_P Parameter: Age (day) Value: 21
  misc_feature: MA Experiment 20000265 PARAMETER Experiment Name: At_Open_Flower_P Parameter: Plant Line Value: WS
  misc_feature: MA Experiment 20000265 PARAMETER Experiment Name: At_Open_Flower_P Parameter: Tissue Value: Closed Flower vs. Whole Plant
  misc_feature: MA Experiment ID: 20000286 Result: Up-regulated in Transcription
  misc_feature: MA Experiment 20000286 PARAMETER Experiment Name: At_Open_Flower_P Parameter: Age (day) Value: 21
  misc_feature: MA Experiment 20000286 PARAMETER Experiment Name: At_Open_Flower_P Parameter: Plant Line Value: WS
  misc_feature: MA Experiment 20000286 PARAMETER Experiment Name: At_Open_Flower_P Parameter: Tissue Value: Half Open vs. Whole Plant
  misc_feature: MA Experiment ID: 20000439 Result: Up-regulated in Transcription
  misc_feature: MA Experiment 20000439 PARAMETER Experiment Name: At_Roots__P Parameter: Age (day) Value: 14 vs. 21
  misc_feature: MA Experiment 20000439 PARAMETER Experiment Name: At_Roots__P Parameter: Organism Value: A. thaliana
  misc_feature: MA Experiment 20000439 PARAMETER Experiment Name: At_Roots__P Parameter: Tissue Value: Roots vs. Whole Plant
  misc_feature: MA Experiment ID: 20000709 Result: Up-regulated in Transcription
  misc_feature: MA Experiment 20000709 PARAMETER Experiment Name: At_15mM_NH4NO3_L-to-H_P Parameter: Age (hr) Value: 14
  misc_feature: MA Experiment 20000709 PARAMETER Experiment Name: At_15mM_NH4NO3_L-to-H_P Parameter: Organism Value: A. thaliana
  misc_feature: MA Experiment 20000709 PARAMETER Experiment Name: At_15mM_NH4NO3_L-to-H_P Parameter: Plant Line Value: WS
  misc_feature: MA Experiment 20000709 PARAMETER Experiment Name: At_15mM_NH4NO3_L-to-H_P Parameter: Timepoint (hr) Value: 4
  misc_feature: MA Experiment 20000709 PARAMETER Experiment Name: At_15mM_NH4NO3_L-to-H_P Parameter: Tissue Value: Aerial
  misc_feature: MA Experiment 20000709 PARAMETER Experiment Name: At_15mM_NH4NO3_L-to-H_P Parameter: Treatment Value: 15mM NH4NO3 vs. 30mM Mannitol
acgttctcagagttagttacacagctttcaacgatgaatcagctcgcgctttcaagatccggttacaccgccgccgtgaggtttctccctatgctttccgcagctgttccgaagatcttatcatctctcgccgccgcatccaccgtccgcaacttcagctctaccggaagtcctctcaccagctaccaaatcaataaaccttcgccgtcaaaatccttcacttccaggcttctccaccaatcctcctccgccggtactcctccgcaacaacttttcggcgcccgtagcttctcatctcccagcagtgatttcaacagctaccacattaatccgccgtctaactggggaatccgaatcgtgccggagaggaaagcttgtgtgattgagcggtttggtaaattccacacgactttgccggcggggattcacttccttgttccgtttgtggatcgtatcgcttatgttcattctctaaaggaagaagcgattcctattggtaatcagactgcgattacaaaggataacgttagcatccacatcgatggtgttctctacgttaagattgtggatcctaagttggcttcttatggcgttgagaatccgatctatgctgttatgcagttggctcagactacaatgcgtagtgagctcggtaaaattactcttgacaagacttttgaggaacgggacactctcaatgagaagattgtggaagccatcaatgttgctgcaaaagattggggtcttcagtgccttcgttatgagatcagggatatcatgcctcctaatggagtgagagttgctatggaaatgcaagctgaagctgaacgtaaaaagagagcccagattcttgagtctgaaggagaacgtcaagcccatatcaatagagctgatggtaagaaaagttctgtaatcttggaatcagaagctgcaatgatggaccaagtcaatcgtgcacaaggtgaggctgaagcaatattagctagagcacaagcaacagccaagggactggccatggtatctcaatccctcaaggaagctggtggagaggaggctgcgagtttgagagttgcggagcaatacattcaagcttttggcaaaattgctaaggagggtacaacaatgctgcttccgagtaatgtcgacaatcctgctagcatgatcgctcaagctttaggaatgtacaaagggttgtcaacaaaggtcccaacagtggtttcagggaaacttctggagtagaatcctctactaacgtggttgttgccaaacttgaatagaagctataatgtagctgaacctagggaacaactattcttttgatttgtccaggctttttagccattttcagtttgtttatttcttcatatgagaaacagttatcttacc

SEQ ID NO: 84828 - protein, 412 aa, Arabidopsis thaliana
  peptide (1)..(412): Ceres Seq. ID no. 12677205
  misc_feature (12)..(412): Homolog of NCBI NO: 15239547 NR Description: putative protein; protein id: At5g54100.1, by cDNA: 205622. [Arabidopsis thaliana] contains similarity to stomatin like protein~gene_id:MJP23.8
  misc_feature (12)..(412): Homolog of NCBI NO: 21554125 NR Description: stomatin-like protein [Arabidopsis thaliana]
  misc_feature (61)..(404): Homolog of NCBI NO: 7487517 NR Description: hypothetical protein T29A15.70 - Arabidopsis >gi|4469009|emb|CAB38270.1| putative protein [Arabidopsis >gi|7269612|emb|CAB81408.1| putative protein [Arabidopsis
  misc_feature (61)..(404): Homolog of NCBI NO: 18417021 NR Description: putative protein; protein id: At4g27585.1, by cDNA: 20829., supported by cDNA: gi_14334465, supported by
  misc_feature (82)..(412): Homolog of NCBI NO: 7716464 NR Description: stomatin-like protein [Zea mays]
  misc_feature (112)..(409): Homolog of NCBI NO: 23394406 NR Description: unknown [Phytophthora infestans]
  misc_feature (117)..(400): Homolog of NCBI NO: 15604196 NR Description: unknown [Rickettsia prowazekii]
  misc_feature (117)..(398): Homolog of NCBI NO: 15892375 NR Description: unknown [Rickettsia conorii]
  misc_feature (112)..(403): Homolog of NCBI NO: 7305503 NR Description: stomatin (EPB72)-like 2; stomatin-like 2; protein 2 [Homo sapiens] >gi|6456118|gb|AAF09142.1|AF190167_1
  misc_feature (72)..(401): Homolog of NCBI NO: 7500183 NR Description: hypothetical protein F30A10.5 - Caenorhabditis
TFSELVTQLSTMNQLALSRSGYTAAVRFLPMLSAAVPKILSSLAAASTVRNFSSTGSPLTSYQINKPSPSKSFTSRLLHQSSSAGTPPQQLFGARSFSSPSSDFNSYHINPPSNWGIRIVPERKACVIERFGKFHTTLPAGIHFLVPFVDRIAYVHSLKEEAIPIGNQTAITKDNVSIHIDGVLYVKIVDPKLASYGVENPIYAVMQLAQTTMRSELGKITLDKTFEERDTLNEKIVEAINVAAKDWGLQCLRYEIRDIMPPNGVRVAMEMQAEAERKKRAQILESEGERQAHINRADGKKSSVILESEAAMMDQVNRAQGEAEAILARAQATAKGLAMVSQSLKEAGGEEAASLRVAEQYIQAFGKIAKEGTTMLLPSNVDNPASMIAQALGMYKGLSTKVPTVVSGKLLE

SEQ ID NO: 84829 - protein, 401 aa, Arabidopsis thaliana; identical to SEQ ID NO: 43480
  peptide (1)..(401): Ceres Seq. ID no. 12677206
  misc_feature (1)..(401): Homolog of NCBI NO: 15239547 NR Description: putative protein; protein id: At5g54100.1, by cDNA: 205622. [Arabidopsis thaliana] contains similarity to stomatin like protein~gene_id:MJP23.8
  misc_feature (1)..(401): Homolog of NCBI NO: 21554125 NR Description: stomatin-like protein [Arabidopsis thaliana]
  misc_feature (50)..(393): Homolog of NCBI NO: 7487517 NR Description: hypothetical protein T29A15.70 - Arabidopsis >gi|4469009|emb|CAB38270.1| putative protein [Arabidopsis >gi|7269612|emb|CAB81408.1| putative protein [Arabidopsis
  misc_feature (50)..(393): Homolog of NCBI NO: 18417021 NR Description: putative protein; protein id: At4g27585.1, by cDNA: 20829., supported by cDNA: gi_14334465, supported by
  misc_feature (71)..(401): Homolog of NCBI NO: 7716464 NR Description: stomatin-like protein [Zea mays]
  misc_feature (101)..(398): Homolog of NCBI NO: 23394406 NR Description: unknown [Phytophthora infestans]
  misc_feature (106)..(389): Homolog of NCBI NO: 15604196 NR Description: unknown [Rickettsia prowazekii]
  misc_feature (106)..(387): Homolog of NCBI NO: 15892375 NR Description: unknown [Rickettsia conorii]
  misc_feature (101)..(392): Homolog of NCBI NO: 7305503 NR Description: stomatin (EPB72)-like 2; stomatin-like 2; protein 2 [Homo sapiens] >gi|6456118|gb|AAF09142.1|AF190167_1
  misc_feature (61)..(390): Homolog of NCBI NO: 7500183 NR Description: hypothetical protein F30A10.5 - Caenorhabditis

SEQ ID NO: 84830 - protein, 382 aa, Arabidopsis thaliana; identical to SEQ ID NO: 43481
  peptide (1)..(382): Ceres Seq. ID no. 12677207
  misc_feature (1)..(382): Homolog of NCBI NO: 15239547 NR Description: putative protein; protein id: At5g54100.1, by cDNA: 205622. [Arabidopsis thaliana] contains similarity to stomatin like protein~gene_id:MJP23.8
  misc_feature (1)..(382): Homolog of NCBI NO: 21554125 NR Description: stomatin-like protein [Arabidopsis thaliana]
  misc_feature (31)..(374): Homolog of NCBI NO: 7487517 NR Description: hypothetical protein T29A15.70 - Arabidopsis >gi|4469009|emb|CAB38270.1| putative protein [Arabidopsis >gi|7269612|emb|CAB81408.1| putative protein [Arabidopsis
  misc_feature (31)..(374): Homolog of NCBI NO: 18417021 NR Description: putative protein; protein id: At4g27585.1, by cDNA: 20829., supported by cDNA: gi_14334465, supported by
  misc_feature (52)..(382): Homolog of NCBI NO: 7716464 NR Description: stomatin-like protein [Zea mays]
  misc_feature (82)..(379): Homolog of NCBI NO: 23394406 NR Description: unknown [Phytophthora infestans]
  misc_feature (87)..(370): Homolog of NCBI NO: 15604196 NR Description: unknown [Rickettsia prowazekii]
  misc_feature (87)..(368): Homolog of NCBI NO: 15892375 NR Description: unknown [Rickettsia conorii]
  misc_feature (82)..(373): Homolog of NCBI NO: 7305503 NR Description: stomatin (EPB72)-like 2; stomatin-like 2; protein 2 [Homo sapiens] >gi|6456118|gb|AAF09142.1|AF190167_1
  misc_feature (42)..(371): Homolog of NCBI NO: 7500183 NR Description: hypothetical protein F30A10.5 - Caenorhabditis

SEQ ID NO: 84831 - DNA, 2067 bp, Arabidopsis thaliana
  misc_feature (1)..(2067): Ceres Seq. ID no. 12677246
  misc_feature: MA Experiment ID: 108461 Result: Up-regulated in Transcription
  misc_feature: MA Experiment 108461 PARAMETER Experiment Name: At_Germinating_Seeds_cDNA_P Parameter: Age (day) Value: 1 vs. 0
  misc_feature: MA Experiment 108461 PARAMETER Experiment Name: At_Germinating_Seeds_cDNA_P Parameter: Tissue Value: Germinating Seeds
  misc_feature: MA Experiment ID: 108463 Result: Up-regulated in Transcription
  misc_feature: MA Experiment 108463 PARAMETER Experiment Name: At_Germinating_Seeds_cDNA_P Parameter: Age (day) Value: 3 vs. 0
  misc_feature: MA Experiment 108463 PARAMETER Experiment Name: At_Germinating_Seeds_cDNA_P Parameter: Tissue Value: Germinating Seeds
  misc_feature: MA Experiment ID: 108464 Result: Up-regulated in Transcription
  misc_feature: MA Experiment 108464 PARAMETER Experiment Name: At_Germinating_Seeds_cDNA_P Parameter: Age (day) Value: 4 vs. 0
  misc_feature: MA Experiment 108464 PARAMETER Experiment Name: At_Germinating_Seeds_cDNA_P Parameter: Tissue Value: Germinating Seeds
  misc_feature: MA Experiment ID: 108573 Result: Up-regulated in Transcription
  misc_feature: MA Experiment 108573 PARAMETER Experiment Name: At_Drought_cDNA_P Parameter: Timepoint (hr) Value: 6
  misc_feature: MA Experiment 108573 PARAMETER Experiment Name: At_Drought_cDNA_P Parameter: Tissue Value: Aerial
  misc_feature: MA Experiment 108573 PARAMETER Experiment Name: At_Drought_cDNA_P Parameter: Treatment Value: Drought vs. No Drought
  misc_feature: MA Experiment ID: 20000113 Result: Down-regulated in Transcription
  misc_feature: MA Experiment 20000113 PARAMETER Experiment Name: At_42deg_Heat_cDNA_P Parameter: Temperature (deg C) Value: 42 vs. 22
  misc_feature: MA Experiment 20000113 PARAMETER Experiment Name: At_42deg_Heat_cDNA_P Parameter: Timepoint (hr) Value: 8
  misc_feature: MA Experiment 20000113 PARAMETER Experiment Name: At_42deg_Heat_cDNA_P Parameter: Tissue Value: Aerial
  misc_feature: MA Experiment ID: 20000224 Result: Up-regulated in Transcription
  misc_feature: MA Experiment ID: 20000306 Result: Up-regulated in Transcription
  misc_feature: MA Experiment 20000306 PARAMETER Experiment Name: At_Germinating_Seeds_Sub_P Parameter: Age (hr) Value: 6 vs. 0
  misc_feature: MA Experiment 20000306 PARAMETER Experiment Name: At_Germinating_Seeds_Sub_P Parameter: Organism Value: A. thaliana
  misc_feature: MA Experiment 20000306 PARAMETER Experiment Name: At_Germinating_Seeds_Sub_P Parameter: Plant Line Value: WS
  misc_feature: MA Experiment 20000306 PARAMETER Experiment Name: At_Germinating_Seeds_Sub_P Parameter: Tissue Value: Germinating Seeds
  misc_feature: MA Experiment ID: 20000307 Result: Up-regulated in Transcription
  misc_feature: MA Experiment 20000307 PARAMETER Experiment Name: At_Germinating_Seeds_Sub_P Parameter: Age (hr) Value: 24 vs. 0
  misc_feature: MA Experiment 20000307 PARAMETER Experiment Name: At_Germinating_Seeds_Sub_P Parameter: Organism Value: A. thaliana
  misc_feature: MA Experiment 20000307 PARAMETER Experiment Name: At_Germinating_Seeds_Sub_P Parameter: Plant Line Value: WS
  misc_feature: MA Experiment 20000307 PARAMETER Experiment Name: At_Germinating_Seeds_Sub_P Parameter: Tissue Value: Germinating Seeds
  misc_feature: MA Experiment ID: 20000314 Result: Up-regulated in Transcription
  misc_feature: MA Experiment 20000314 PARAMETER Experiment Name: At_14day_Shoots-Roots_Sub_P Parameter: Age (day) Value: 14
  misc_feature: MA Experiment 20000314 PARAMETER Experiment Name: At_14day_Shoots-Roots_Sub_P Parameter: Organism Value: A. thaliana
  misc_feature: MA Experiment 20000314 PARAMETER Experiment Name: At_14day_Shoots-Roots_Sub_P Parameter: Plant Line Value: WS
  misc_feature: MA Experiment 20000314 PARAMETER Experiment Name: At_14day_Shoots-Roots_Sub_P Parameter: Tissue Value: Roots vs. Whole Plant
  misc_feature: MA Experiment ID: 20000328 Result: Down-regulated in Transcription
  misc_feature: MA Experiment 20000328 PARAMETER Experiment Name: At_42deg_Heat_Sub_P Parameter: Age (day) Value: 14
  misc_feature: MA Experiment 20000328 PARAMETER Experiment Name: At_42deg_Heat_Sub_P Parameter: Organism Value: A. thaliana
  misc_feature: MA Experiment 20000328 PARAMETER Experiment Name: At_42deg_Heat_Sub_P Parameter: Plant Line Value: WS
  misc_feature: MA Experiment 20000328 PARAMETER Experiment Name: At_42deg_Heat_Sub_P Parameter: Temperature (deg C) Value: 42 vs. 22
  misc_feature: MA Experiment 20000328 PARAMETER Experiment Name: At_42deg_Heat_Sub_P Parameter: Timepoint (hr) Value: 6
  misc_feature: MA Experiment 20000328 PARAMETER Experiment Name: At_42deg_Heat_Sub_P Parameter: Tissue Value: Aerial
  misc_feature: MA Experiment ID: 20000440 Result: Up-regulated in Transcription
  misc_feature: MA Experiment 20000440 PARAMETER Experiment Name: At_Closed-Flower__Sub_P Parameter: Tissue Value: Closed Flower vs. Whole Plant
atgaacaaaaacatcctctgtttctctcttttcatatttttctccacatttcctcatctgggtcatctccaaaaatgatttgatgataacccaaattcgcaatttgattaggacaacaacaacaactttatttatctgattccgtctttgattttcagacaagaaaaaaaaaaaaaagatggaatcggatctggggaagctcttcattggtgggatttcgtgggatacagacgaagaaaggttaagagactactttagcaactatggtgatgttgttgaagctgtgatcatgagagatcgtgccacaggtcgtgcacgtggcttcggcttcattgtctttgcagacccctgtgtctcagagagagtgatcatggataaacacatcatcgatggccgcacggttgaggcgaagaaggctgtgcctcgagatgatcagcaggtgctaaagcgacacgctagtcctatccaccttatgtcacctgtccatggtggtggtggaaggacaaagaagatcttcgttggaggtttaccgtctagcattaccgaggaggagttcaagaactactttgatcagtttggtactattgctgatgttgttgtaatgtatgatcataacacgcagaggccaagaggttttggcttcatcacatttgattcagatgatgctgttgatagagttcttcacaagaccttccatgagctcaatgggaaactagttgaggtcaaaagagctgtacctaaggagatttcccctgtttctaatatccgaagcccgcttgctagcggtgttaactatggaggcgggtctaataggatgcctgctaatagctactttaacaactttgctcctggtcctggtttttataacagtctaggtcctgttggtcgtcggtttagtcctgttattggtagtggtagaaatgcggtttctgcttttggcctcggtttgaatcatgacttgagtttgaatttgaatccaagctgcgatgggacaagttctacgtttggttataaccgtattccaagcaacccttacttcaacggtgcttccccgaaccgttacacctctccaatcgggcacaatagaactgagtctccttacaattcgaacaatagagacttatggggaaacagaaccgacactgcaggtcccggttggaacttgaatgtctcgaatggaaacaacagaggaaattggggacttccttcttcttctgctgttagtaatgataacaatggctttggaaggaactatgggacaagttctggactttcctcgtccccatttaatggttttgaaggttctataggggaactgtacagaggcggctcagtctacagcgactcaacgtggcagcaacagcagctaccatctcagtcttctcacgagctagacaatttgtctcgcgcttacggttatgatattgacaatgtaggttcagacccatctgcaaatgacccagaaacttacaatggaagctacaatgttggaaatagacaaactaatagaggtattgctgcataggttatcaaaaaccaagaaaacaaaaaaaaaagttgagagatttgtagattgaaagcaaccaaatttcagttgcagagtttgaacaggttctcatgacaaagaaaccaactttgttgatcacagtgccaaagattatggtttgctttctcttttgttagaccaaaaaaaaaaaaaaaaaagagaaaaacaaagaaccgtttttgtttttcttcttcttacataaagatcagatcgtagcagccagacaaccaaagatactacaaggtggatttagatttgcttctcaaaaaagtttttttttttctttcatagaataaccaaacaaagatcgtagaattttcgatcaaagattcttcagagttctgtgctctgttttgtaattgtactttttttttcttgtttacaaaatgaattgttcatgaaaactttgttttcttaaaaaaaaaattagcgtgggagaaatattgtgtaagagagggatatgactattttgttgcatgtatccctaatgagatatatatatatatatatttttttaaagc

SEQ ID NO: 84832 - protein, 448 aa, Arabidopsis thaliana
  peptide (1)..(448): Ceres Seq. ID no. 12677247
  misc_feature (112)..(182): Pfam Name: RNA recognition motif. (a.k.a. RRM, RBD, or RNP domain) Pfam Description: RNA recognition motif. (a.k.a. RRM, RBD, or RNP
  misc_feature (1)..(444): Homolog of NCBI NO: 9758187 NR Description: RNA-binding protein-like [Arabidopsis thaliana]
  misc_feature (1)..(448): Homolog of NCBI NO: 30696616 NR Description: RNA recognition motif (RRM)-containing protein
  misc_feature (1)..(448): Homolog of NCBI NO: 22531168 NR Description: RNA-binding protein-like [Arabidopsis thaliana]
  misc_feature (1)..(445): Homolog of NCBI NO: 18423760 NR Description: heterogeneous nuclear ribonucleoprotein (hnRNP), protein id: At5g55550.1, supported by cDNA: gi_15292724,
  misc_feature (3)..(448): Homolog of NCBI NO: 7487039 NR Description: hypothetical protein T15N24.100 - Arabidopsis
  misc_feature (1)..(448): Homolog of NCBI NO: 18416794 NR Description: heterogeneous nuclear ribonucleoprotein (hnRNP), protein id: At4g26650.1, supported by cDNA: gi_16930502, by cDNA: gi_20453244 [Arabidopsis thaliana]
  misc_feature (65)..(448): Homolog of NCBI NO: 2582639 NR Description: hnRNP-like protein [Arabidopsis thaliana]
  misc_feature (1)..(415): Homolog of NCBI NO: 6648193 NR Description: putative RNA-binding protein [Arabidopsis
  misc_feature (1)..(415): Homolog of NCBI NO: 18398061 NR Description: heterogeneous nuclear ribonucleoprotein (hnRNP), protein id: At3g07810.1, supported by cDNA: gi_15292696, by cDNA: gi_16930692 [Arabidopsis thaliana]
  misc_feature (1)..(415): Homolog of NCBI NO: 30680456 NR Description: heterogeneous nuclear ribonucleoprotein (hnRNP),
MESDLGKLFIGGISWDTDEERLRDYFSNYGDVVEAVIMRDRATGRARGFGFIVFADPCVSERVIMDKHIIDGRTVEAKKAVPRDDQQVLKRHASPIHLMSPVHGGGGRTKKIFVGGLPSSITEEEFKNYFDQFGTIADVVVMYDHNTQRPRGFGFITFDSDDAVDRVLHKTFHELNGKLVEVKRAVPKEISPVSNIRSPLASGVNYGGGSNRMPANSYFNNFAPGPGFYNSLGPVGRRFSPVIGSGRNAVSAFGLGLNHDLSLNLNPSCDGTSSTFGYNRIPSNPYFNGASPNRYTSPIGHNRTESPYNSNNRDLWGNRTDTAGPGWNLNVSNGNNRGNWGLPSSSAVSNDNNGFGRNYGTSSGLSSSPFNGFEGSIGELYRGGSVYSDSTWQQQQLPSQSSHELDNLSRAYGYDIDNVGSDPSANDPETYNGSYNVGNRQTNRGIAA

SEQ ID NO: 84833 - protein, 411 aa, Arabidopsis thaliana
  peptide (1)..(411): Ceres Seq. ID no. 12677248
  misc_feature (75)..(145): Pfam Name: RNA recognition motif. (a.k.a. RRM, RBD, or RNP domain) Pfam Description: RNA recognition motif. (a.k.a. RRM, RBD, or RNP
  misc_feature (1)..(407): Homolog of NCBI NO: 9758187 NR Description: RNA-binding protein-like [Arabidopsis thaliana]
  misc_feature (1)..(411): Homolog of NCBI NO: 30696616 NR Description: RNA recognition motif (RRM)-containing protein
  misc_feature (1)..(411): Homolog of NCBI NO: 22531168 NR Description: RNA-binding protein-like [Arabidopsis thaliana]
  misc_feature (1)..(408): Homolog of NCBI NO: 18423760 NR Description: heterogeneous nuclear ribonucleoprotein (hnRNP), protein id: At5g55550.1, supported by cDNA: gi_15292724,
  misc_feature (1)..(411): Homolog of NCBI NO: 7487039 NR Description: hypothetical protein T15N24.100 - Arabidopsis
  misc_feature (1)..(411): Homolog of NCBI NO: 18416794 NR Description: heterogeneous nuclear ribonucleoprotein (hnRNP), protein id: At4g26650.1, supported by cDNA: gi_16930502, by cDNA: gi_20453244 [Arabidopsis thaliana]
  misc_feature (28)..(411): Homolog of NCBI NO: 2582639 NR Description: hnRNP-like protein [Arabidopsis thaliana]
  misc_feature (1)..(378): Homolog of NCBI NO: 6648193 NR Description: putative RNA-binding protein [Arabidopsis
  misc_feature (1)..(378): Homolog of NCBI NO: 18398061 NR Description: heterogeneous nuclear ribonucleoprotein (hnRNP), protein id: At3g07810.1, supported by cDNA: gi_15292696, by cDNA: gi_16930692 [Arabidopsis thaliana]
  misc_feature (1)..(378): Homolog of NCBI NO: 30680456 NR Description: heterogeneous nuclear ribonucleoprotein (hnRNP),
MRDRATGRARGFGFIVFADPCVSERVIMDKHIIDGRTVEAKKAVPRDDQQVLKRHASPIHLMSPVHGGGGRTKKIFVGGLPSSITEEEFKNYFDQFGTIADVVVMYDHNTQRPRGFGFITFDSDDAVDRVLHKTFHELNGKLVEVKRAVPKEISPVSNIRSPLASGVNYGGGSNRMPANSYFNNFAPGPGFYNSLGPVGRRFSPVIGSGRNAVSAFGLGLNHDLSLNLNPSCDGTSSTFGYNRIPSNPYFNGASPNRYTSPIGHNRTESPYNSNNRDLWGNRTDTAGPGWNLNVSNGNNRGNWGLPSSSAVSNDNNGFGRNYGTSSGLSSSPFNGFEGSIGELYRGGSVYSDSTWQQQQLPSQSSHELDNLSRAYGYDIDNVGSDPSANDPETYNGSYNVGNRQTNRGIAA

SEQ ID NO: 84834 - protein, 384 aa, Arabidopsis thaliana
  peptide (1)..(384): Ceres Seq. ID no. 12677249
  misc_feature (48)..(118): Pfam Name: RNA recognition motif. (a.k.a. RRM, RBD, or RNP domain) Pfam Description: RNA recognition motif. (a.k.a. RRM, RBD, or RNP
  misc_feature (1)..(380): Homolog of NCBI NO: 9758187 NR Description: RNA-binding protein-like [Arabidopsis thaliana]
  misc_feature (1)..(384): Homolog of NCBI NO: 30696616 NR Description: RNA recognition motif (RRM)-containing protein
  misc_feature (1)..(384): Homolog of NCBI NO: 22531168 NR Description: RNA-binding protein-like [Arabidopsis thaliana]
  misc_feature (1)..(381): Homolog of NCBI NO: 18423760 NR Description: heterogeneous nuclear ribonucleoprotein (hnRNP), protein id: At5g55550.1, supported by cDNA: gi_15292724,
  misc_feature (1)..(384): Homolog of NCBI NO: 7487039 NR Description: hypothetical protein T15N24.100 - Arabidopsis
  misc_feature (1)..(384): Homolog of NCBI NO: 18416794 NR Description: heterogeneous nuclear ribonucleoprotein (hnRNP), protein id: At4g26650.1, supported by cDNA: gi_16930502, by cDNA: gi_20453244 [Arabidopsis thaliana]
  misc_feature (1)..(384): Homolog of NCBI NO: 2582639 NR Description: hnRNP-like protein [Arabidopsis thaliana]
  misc_feature (1)..(351): Homolog of NCBI NO: 6648193 NR Description: putative RNA-binding protein [Arabidopsis
  misc_feature (1)..(351): Homolog of NCBI NO: 18398061 NR Description: heterogeneous nuclear ribonucleoprotein (hnRNP), protein id: At3g07810.1, supported by cDNA: gi_15292696, by cDNA: gi_16930692 [Arabidopsis thaliana]
  misc_feature (1)..(351): Homolog of NCBI NO: 30680456 NR Description: heterogeneous nuclear ribonucleoprotein (hnRNP),
MDKHIIDGRTVEAKKAVPRDDQQVLKRHASPIHLMSPVHGGGGRTKKIFVGGLPSSITEEEFKNYFDQFGTIADVVVMYDHNTQRPRGFGFITFDSDDAVDRVLHKTFHELNGKLVEVKRAVPKEISPVSNIRSPLASGVNYGGGSNRMPANSYFNNFAPGPGFYNSLGPVGRRFSPVIGSGRNAVSAFGLGLNHDLSLNLNPSCDGTSSTFGYNRIPSNPYFNGASPNRYTSPIGHNRTESPYNSNNRDLWGNRTDTAGPGWNLNVSNGNNRGNWGLPSSSAVSNDNNGFGRNYGTSSGLSSSPFNGFEGSIGELYRGGSVYSDSTWQQQQLPSQSSHELDNLSRAYGYDIDNVGSDPSANDPETYNGSYNVGNRQTNRGIAA

SEQ ID NO: 84835 - DNA, 1651 bp, Arabidopsis thaliana
  misc_feature (1)..(1651): Ceres Seq. ID no. 12677250
  misc_feature: MA Experiment ID: 108461 Result: Up-regulated in Transcription
  misc_feature: MA Experiment 108461 PARAMETER Experiment Name: At_Germinating_Seeds_cDNA_P Parameter: Age (day) Value: 1 vs. 0
  misc_feature: MA Experiment 108461 PARAMETER Experiment Name: At_Germinating_Seeds_cDNA_P Parameter: Tissue Value: Germinating Seeds
  misc_feature: MA Experiment ID: 108463 Result: Up-regulated in Transcription
  misc_feature: MA Experiment 108463 PARAMETER Experiment Name: At_Germinating_Seeds_cDNA_P Parameter: Age (day) Value: 3 vs. 0
  misc_feature: MA Experiment 108463 PARAMETER Experiment Name: At_Germinating_Seeds_cDNA_P Parameter: Tissue Value: Germinating Seeds
  misc_feature: MA Experiment ID: 108464 Result: Up-regulated in Transcription
  misc_feature: MA Experiment 108464 PARAMETER Experiment Name: At_Germinating_Seeds_cDNA_P Parameter: Age (day) Value: 4 vs. 0
  misc_feature: MA Experiment 108464 PARAMETER Experiment Name: At_Germinating_Seeds_cDNA_P Parameter: Tissue Value: Germinating Seeds
  misc_feature: MA Experiment ID: 108573 Result: Up-regulated in Transcription
  misc_feature: MA Experiment 108573 PARAMETER Experiment Name: At_Drought_cDNA_P Parameter: Timepoint (hr) Value: 6
  misc_feature: MA Experiment 108573 PARAMETER Experiment Name: At_Drought_cDNA_P Parameter: Tissue Value: Aerial
  misc_feature: MA Experiment 108573 PARAMETER Experiment Name: At_Drought_cDNA_P Parameter: Treatment Value: Drought vs. No Drought
  misc_feature: MA Experiment ID: 20000113 Result: Down-regulated in Transcription
  misc_feature: MA Experiment 20000113 PARAMETER Experiment Name: At_42deg_Heat_cDNA_P Parameter: Temperature (deg C) Value: 42 vs. 22
  misc_feature: MA Experiment 20000113 PARAMETER Experiment Name: At_42deg_Heat_cDNA_P Parameter: Timepoint (hr) Value: 8
  misc_feature: MA Experiment 20000113 PARAMETER Experiment Name: At_42deg_Heat_cDNA_P Parameter: Tissue Value: Aerial
  misc_feature: MA Experiment ID: 20000224 Result: Up-regulated in Transcription
  misc_feature: MA Experiment ID: 20000306 Result: Up-regulated in Transcription
  misc_feature: MA Experiment 20000306 PARAMETER Experiment Name: At_Germinating_Seeds_Sub_P Parameter: Age (hr) Value: 6 vs. 0
  misc_feature: MA Experiment 20000306 PARAMETER Experiment Name: At_Germinating_Seeds_Sub_P Parameter: Organism Value: A. thaliana
  misc_feature: MA Experiment 20000306 PARAMETER Experiment Name: At_Germinating_Seeds_Sub_P Parameter: Plant Line Value: WS
  misc_feature: MA Experiment 20000306 PARAMETER Experiment Name: At_Germinating_Seeds_Sub_P Parameter: Tissue Value: Germinating Seeds
  misc_feature: MA Experiment ID: 20000307 Result: Up-regulated in Transcription
  misc_feature: MA Experiment 20000307 PARAMETER Experiment Name: At_Germinating_Seeds_Sub_P Parameter: Age (hr) Value: 24 vs. 0
  misc_feature: MA Experiment 20000307 PARAMETER Experiment Name: At_Germinating_Seeds_Sub_P Parameter: Organism Value: A. thaliana
  misc_feature: MA Experiment 20000307 PARAMETER Experiment Name: At_Germinating_Seeds_Sub_P Parameter: Plant Line Value: WS
  misc_feature: MA Experiment 20000307 PARAMETER Experiment Name: At_Germinating_Seeds_Sub_P Parameter: Tissue Value: Germinating Seeds
  misc_feature: MA Experiment ID: 20000314 Result: Up-regulated in Transcription
  misc_feature: MA Experiment 20000314 PARAMETER Experiment Name: At_14day_Shoots-Roots_Sub_P Parameter: Age (day) Value: 14
  misc_feature: MA Experiment 20000314 PARAMETER Experiment Name: At_14day_Shoots-Roots_Sub_P Parameter: Organism Value: A. thaliana
  misc_feature: MA Experiment 20000314 PARAMETER Experiment Name: At_14day_Shoots-Roots_Sub_P Parameter: Plant Line Value: WS
  misc_feature: MA Experiment 20000314 PARAMETER Experiment Name: At_14day_Shoots-Roots_Sub_P Parameter: Tissue Value: Roots vs. Whole Plant
  misc_feature: MA Experiment ID: 20000328 Result: Down-regulated in Transcription
  misc_feature: MA Experiment 20000328 PARAMETER Experiment Name: At_42deg_Heat_Sub_P Parameter: Age (day) Value: 14
  misc_feature: MA Experiment 20000328 PARAMETER Experiment Name: At_42deg_Heat_Sub_P Parameter: Organism Value: A. thaliana
  misc_feature: MA Experiment 20000328 PARAMETER Experiment Name: At_42deg_Heat_Sub_P Parameter: Plant Line Value: WS
  misc_feature: MA Experiment 20000328 PARAMETER Experiment Name: At_42deg_Heat_Sub_P Parameter: Temperature (deg C) Value: 42 vs. 22
  misc_feature: MA Experiment 20000328 PARAMETER Experiment Name: At_42deg_Heat_Sub_P Parameter: Timepoint (hr) Value: 6
  misc_feature: MA Experiment 20000328 PARAMETER Experiment Name: At_42deg_Heat_Sub_P Parameter: Tissue Value: Aerial
  misc_feature: MA Experiment ID: 20000440 Result: Up-regulated in Transcription
  misc_feature: MA Experiment 20000440 PARAMETER Experiment Name: At_Closed-Flower__Sub_P Parameter: Tissue Value: Closed Flower vs. Whole Plant
atatttttctccacatttcctcatctgggtcatctccaaaaatgatttgatgataacccaaattcgcaatttgattaggacaacaacaacaactttatttatctgattccgtctttgattttcagacaagaaaagaaaaaaaaaagatggaatcggatctggggaagctcttcattggtgggatttcgtgggatacagacgaagaaaggttaagagactactttagcaactatggtgatgttgttgaagctgtgatcatgagagatcgtgccacaggtcgtgcacgtggcttcggcttcattgtctttgcagacccctgtgtctcagagagagtgatcatggataaacacatcatcgatggccgcacggttgaggcgaagaaggctgtgcctcgagatgatcagcaggtgctaaagcgacacgctagtcctatccaccttatgtcacctgtccatggtggtggtggaaggacaaagaagatcttcgttggaggtttaccgtctagcattaccgaggaggagttcaagaactactttgatcagtttggtactattgctgatgttgttgtaatgtatgatcataacacgcagaggccaagaggttttggcttcatcacatttgattcagatgatgctgttgatagagttcttcacaagaccttccatgagctcaatgggaaactagttgaggtcaaaagagctgtacctaaggagatttcccctgtttctaatatccgaagcccgcttgctagcggtgttaactatggaggcgggtctaataggatgcctgctaatagctactttaacaactttgctcctggtcctggtttttataacagtctaggtcctgttggtcgtcggtttagtcctgttattggtagtggtagaaatgcggtttctgcttttggcctcggtttgaatcatgacttgagtttgaatttgaatccaagctgcgatgggacaagttctacgtttggttataaccgtattccaagcaacccttacttcaacggtgcttccccgaaccgttacacctctccaatcgggcacaatagaactgagtctccttacaattcgaacaatagagacttatggggaaacagaaccgacactgcaggtcccggttggaacttgaatgtctcgaatggaaacaacagaggaaattggggacttccttcttcttctgctgttagtaatgataacaatggctttggaaggaactatgggacaagttctggactttcctcgtccccatttaatggttttgaaggttctataggggaactgtacagaggcggctcagtctacagcgactcaacgtggcagcaacagcagctaccatctcagtcttctcacgagctagacaatttgtctcgcgcttacggttatgatattgacaatgtaggttcagacccatctgcaaatgacccagaaacttacaatggaagctacaatgttggaaatagacaaactaatagaggtattgctgcataggttatcaaaaaccaagaaaacaaaaaaaaaagttgagagatttgtagattgaaagcaaccaaatttcagttgcagagtttgaacaggttctcatgacaaagaaaccaactttgttgatcacagtgccaaagattatggtttgctttctcttttgttag

SEQ ID NO: 84836 - protein, 448 aa, Arabidopsis thaliana; identical to SEQ ID NO: 84832
  peptide (1)..(448): Ceres Seq. ID no. 12677251
  misc_feature (112)..(182): Pfam Name: RNA recognition motif. (a.k.a. RRM, RBD, or RNP domain) Pfam Description: RNA recognition motif. (a.k.a. RRM, RBD, or RNP
  misc_feature (1)..(444): Homolog of NCBI NO: 9758187 NR Description: RNA-binding protein-like [Arabidopsis thaliana]
  misc_feature (1)..(448): Homolog of NCBI NO: 30696616 NR Description: RNA recognition motif (RRM)-containing protein
  misc_feature (1)..(448): Homolog of NCBI NO: 22531168 NR Description: RNA-binding protein-like [Arabidopsis thaliana]
  misc_feature (1)..(445): Homolog of NCBI NO: 18423760 NR Description: heterogeneous nuclear ribonucleoprotein (hnRNP), protein id: At5g55550.1, supported by cDNA: gi_15292724,
  misc_feature (3)..(448): Homolog of NCBI NO: 7487039 NR Description: hypothetical protein T15N24.100 - Arabidopsis
  misc_feature (1)..(448): Homolog of NCBI NO: 18416794 NR Description: heterogeneous nuclear ribonucleoprotein (hnRNP), protein id: At4g26650.1, supported by cDNA: gi_16930502, by cDNA: gi_20453244 [Arabidopsis thaliana]
  misc_feature (65)..(448): Homolog of NCBI NO: 2582639 NR Description: hnRNP-like protein [Arabidopsis thaliana]
  misc_feature (1)..(415): Homolog of NCBI NO: 6648193 NR Description: putative RNA-binding protein [Arabidopsis
  misc_feature (1)..(415): Homolog of NCBI NO: 18398061 NR Description: heterogeneous nuclear ribonucleoprotein (hnRNP), protein id: At3g07810.1, supported by cDNA: gi_15292696, by cDNA: gi_16930692 [Arabidopsis thaliana]
  misc_feature (1)..(415): Homolog of NCBI NO: 30680456 NR Description: heterogeneous nuclear ribonucleoprotein (hnRNP),

SEQ ID NO: 84837 - protein, 411 aa, Arabidopsis thaliana; identical to SEQ ID NO: 84833
  peptide (1)..(411): Ceres Seq. ID no. 12677252
  misc_feature (75)..(145): Pfam Name: RNA recognition motif. (a.k.a. RRM, RBD, or RNP domain) Pfam Description: RNA recognition motif. (a.k.a. RRM, RBD, or RNP
  misc_feature (1)..(407): Homolog of NCBI NO: 9758187 NR Description: RNA-binding protein-like [Arabidopsis thaliana]
  misc_feature (1)..(411): Homolog of NCBI NO: 30696616 NR Description: RNA recognition motif (RRM)-containing protein
  misc_feature (1)..(411): Homolog of NCBI NO: 22531168 NR Description: RNA-binding protein-like [Arabidopsis thaliana]
  misc_feature (1)..(408): Homolog of NCBI NO: 18423760 NR Description: heterogeneous nuclear ribonucleoprotein (hnRNP), protein id: At5g55550.1, supported by cDNA: gi_15292724,
  misc_feature (1)..(411): Homolog of NCBI NO: 7487039 NR Description: hypothetical protein T15N24.100 - Arabidopsis
  misc_feature (1)..(411): Homolog of NCBI NO: 18416794 NR Description: heterogeneous nuclear ribonucleoprotein (hnRNP), protein id: At4g26650.1, supported by cDNA: gi_16930502, by cDNA: gi_20453244 [Arabidopsis thaliana]
  misc_feature (28)..(411): Homolog of NCBI NO: 2582639 NR Description: hnRNP-like protein [Arabidopsis thaliana]
  misc_feature (1)..(378): Homolog of NCBI NO: 6648193 NR Description: putative RNA-binding protein [Arabidopsis
  misc_feature (1)..(378): Homolog of NCBI NO: 18398061 NR Description: heterogeneous nuclear ribonucleoprotein (hnRNP), protein id: At3g07810.1, supported by cDNA: gi_15292696, by cDNA: gi_16930692 [Arabidopsis thaliana]
  misc_feature (1)..(378): Homolog of NCBI NO: 30680456 NR Description: heterogeneous nuclear ribonucleoprotein (hnRNP),

SEQ ID NO: 84838 - protein, 384 aa, Arabidopsis thaliana; identical to SEQ ID NO: 84834
  peptide (1)..(384): Ceres Seq. ID no. 12677253
  misc_feature (48)..(118): Pfam Name: RNA recognition motif. (a.k.a. RRM, RBD, or RNP domain) Pfam Description: RNA recognition motif. (a.k.a. RRM, RBD, or RNP
  misc_feature (1)..(380): Homolog of NCBI NO: 9758187 NR Description: RNA-binding protein-like [Arabidopsis thaliana]
  misc_feature (1)..(384): Homolog of NCBI NO: 30696616 NR Description: RNA recognition motif (RRM)-containing protein
  misc_feature (1)..(384): Homolog of NCBI NO: 22531168 NR Description: RNA-binding protein-like [Arabidopsis thaliana]
  misc_feature (1)..(381): Homolog of NCBI NO: 18423760 NR Description: heterogeneous nuclear ribonucleoprotein (hnRNP), protein id: At5g55550.1, supported by cDNA: gi_15292724,
  misc_feature (1)..(384): Homolog of NCBI NO: 7487039 NR Description: hypothetical protein T15N24.100 - Arabidopsis
  misc_feature (1)..(384): Homolog of NCBI NO: 18416794 NR Description: heterogeneous nuclear ribonucleoprotein (hnRNP), protein id: At4g26650.1, supported by cDNA: gi_16930502, by cDNA: gi_20453244 [Arabidopsis thaliana]
  misc_feature (1)..(384): Homolog of NCBI NO: 2582639 NR Description: hnRNP-like protein [Arabidopsis thaliana]
  misc_feature (1)..(351): Homolog of NCBI NO: 6648193 NR Description: putative RNA-binding protein [Arabidopsis
  misc_feature (1)..(351): Homolog of NCBI NO: 18398061 NR Description: heterogeneous nuclear ribonucleoprotein (hnRNP), protein id: At3g07810.1, supported by cDNA: gi_15292696, by cDNA: gi_16930692 [Arabidopsis thaliana]
  misc_feature (1)..(351): Homolog of NCBI NO: 30680456 NR Description: heterogeneous nuclear ribonucleoprotein (hnRNP),

SEQ ID NO: 84839 - DNA, 1395 bp, Arabidopsis thaliana
  misc_feature (1)..(1395): Ceres Seq. ID no. 12677258
  misc_feature: MA Experiment ID: 20000180 Result: Up-regulated in Transcription
  misc_feature: MA Experiment 20000180 PARAMETER Experiment Name: At_Germinating_Seeds_P Parameter: Age (hr) Value: 24 vs. 0
  misc_feature: MA Experiment 20000180 PARAMETER Experiment Name: At_Germinating_Seeds_P Parameter: Tissue Value: Germinating Seeds
  misc_feature: MA Experiment ID: 20000234 Result: Down-regulated in Transcription
  misc_feature: MA Experiment 20000234 PARAMETER Experiment Name: At_Siliques_P Parameter: Age (day) Value: 21
  misc_feature: MA Experiment 20000234 PARAMETER Experiment Name: At_Siliques_P Parameter: Organism Value: A. thaliana
  misc_feature: MA Experiment 20000234 PARAMETER Experiment Name: At_Siliques_P Parameter: Plant Line Value: WS
  misc_feature: MA Experiment 20000234 PARAMETER Experiment Name: At_Siliques_P Parameter: Tissue Value: Less Than 5mm Siliques vs. Whole Plant
  misc_feature: MA Experiment ID: 20000264 Result: Down-regulated in Transcription
  misc_feature: MA Experiment 20000264 PARAMETER Experiment Name: At_Open_Flower_P Parameter: Age (day) Value: 21
  misc_feature: MA Experiment 20000264 PARAMETER Experiment Name: At_Open_Flower_P Parameter: Plant Line Value: WS
  misc_feature: MA Experiment 20000264 PARAMETER Experiment Name: At_Open_Flower_P Parameter: Tissue Value: Open Flower vs. Whole Plant
  misc_feature: MA Experiment ID: 20000265 Result: Down-regulated in Transcription
  misc_feature: MA Experiment 20000265 PARAMETER Experiment Name: At_Open_Flower_P Parameter: Age (day) Value: 21
  misc_feature: MA Experiment 20000265 PARAMETER Experiment Name: At_Open_Flower_P Parameter: Plant Line Value: WS
  misc_feature: MA Experiment 20000265 PARAMETER Experiment Name: At_Open_Flower_P Parameter: Tissue Value: Closed Flower vs. Whole Plant
  misc_feature: MA Experiment ID: 20000286 Result: Down-regulated in Transcription
  misc_feature: MA Experiment 20000286 PARAMETER Experiment Name: At_Open_Flower_P Parameter: Age (day) Value: 21
  misc_feature: MA Experiment 20000286 PARAMETER Experiment Name: At_Open_Flower_P Parameter: Plant Line Value: WS
  misc_feature: MA Experiment 20000286 PARAMETER Experiment Name: At_Open_Flower_P Parameter: Tissue Value: Half Open vs. Whole Plant
gttgcgaagaccagactctcagactcagactcgggagatggcagtccactactggacagccctgtttctattgttgccatgccttttctgtatttcaaatgctagtgctggcgatgctgatccagattacagaatgtgagataagcggttgtgttggacaactttgctttcctcagtgcaattcttcatccgatggtggtccatggtacatccaagaacctttgtatttacaatggaaaaaatggggttgtcaaggtgattgccgttatcaatgtatggttaatagagagactgaacgggaaactctcggtcaagccccagtcaagtaccatggtaaatggcccttcaagcgtgtacttgggattcaggagcctgcttctgttgctttctctgtactcaacctagcaatgcatttccatggttggctttcctttttcatcatgatctactataagttgcctctgaaacaagataggacagcgtactatgaatacgttggtttgtggcatatctacggtctcctgtccatgaactcttggttctggagtgctgttttccacagccggtaaatcatctacacattactctattatccacaatctgcatcatatattcatatgtgattttctggtaatccgtctctgtggttctcagggatgttgaccttacagagaggttggactactcatccgcagtagcgattctcggattctcactcatcttagccattttacgaacatttgatattcgggttgaggctgcaagggtcatggtatccgctccaatactagcttttgtaaccacccacatactctacataaacttctacaaactcgactatggctggaacatgattgtgtgtgtggcaatgggagtctcacagcttttcctatgggcaagatgggccgctgtctcaagccacccttctaattggaaactttgggtggttgtgatagctggaggattagccatgcttctagagatatatgattttcctccatatgaaggctacttcgatgctcactcgatctggcacgctgccacaattcccttaaccattctctggtggagcttcattagagacgatgctgagttcagaacttccagcctcctcaagaaaactaagacgaaggcaaagtgagtctctttgctaagttttacaaggatttttatccgaccatacgagtatgcagacacgagggaaaaacaaaagatggaaatggatttaaacatcacgaagaaggcagagtcttttgtttaaagctagctggtttatggattcacaggtttcttcagttttttttattttatattgttacattaactgttgaatttgctttgagcctttcagtgtttttctttggccttacttttggttaagaaagattttgatat

SEQ ID NO: 84840 - protein, 188 aa, Arabidopsis thaliana
  peptide (1)..(188): Ceres Seq. ID no. 12677259
  misc_feature (71)..(188): Pfam Name: Per1-like Pfam Description: Per1-like
  misc_feature (42)..(188): Homolog of NCBI NO: 15219283 NR Description: unknown protein; protein id: At1g16560.1
  misc_feature (42)..(188): Homolog of NCBI NO: 18424554 NR Description: putative protein; protein id: At5g62130.1, by cDNA: gi_15294203, supported by cDNA: gi_20147282 [Arabidopsis >gi|15294204|gb|AAK95279.1|AF410293_1 AT5g62130/mtg10_150
  misc_feature (70)..(188): Homolog of NCBI NO: 10176931 NR Description: gene_id:MTG10.16~unknown protein [Arabidopsis
  misc_feature (42)..(188): Homolog of NCBI NO: 37536224 NR Description: unknown protein [Oryza sativa (japonica
  misc_feature (33)..(188): Homolog of NCBI NO: 20260110 NR Description: unknown protein [Arabidopsis thaliana]
  misc_feature (55)..(188): Homolog of NCBI NO: 32949296 NR Description: CAB2 protein [Homo sapiens]
  misc_feature (53)..(188): Homolog of NCBI NO: 31212833 NR Description: ENSANGP00000021025 [Anopheles gambiae]
  misc_feature (55)..(188): Homolog of NCBI NO: 28372501 NR Description: CAB2 [Homo sapiens] >gi|27808402|dbj|BAC55580.1|
  misc_feature (69)..(188): Homolog of NCBI NO: 19921698 NR Description: CG3271-PB [Drosophila melanogaster]
  misc_feature (69)..(188): Homolog of NCBI NO: 24586036 NR Description: CG3271-PA [Drosophila melanogaster]
CEDQTLRLRLGRWQSTTGQPCFYCCHAFSVFQMLVLAMLIQITECEISGCVGQLCFPQCNSSSDGGPWYIQEPLYLQWKKWGCQGDCRYQCMVNRETERETLGQAPVKYHGKWPFKRVLGIQEPASVAFSVLNLAMHFHGWLSFFIMIYYKLPLKQDRTAYYEYVGLWHIYGLLSMNSWFWSAVFHSR

SEQ ID NO: 84841 - protein, 156 aa, Arabidopsis thaliana
  peptide (1)..(156): Ceres Seq. ID no. 12677260
  misc_feature (39)..(156): Pfam Name: Per1-like Pfam Description: Per1-like
  misc_feature (10)..(156): Homolog of NCBI NO: 15219283 NR Description: unknown protein; protein id: At1g16560.1
  misc_feature (10)..(156): Homolog of NCBI NO: 18424554 NR Description: putative protein; protein id: At5g62130.1, by cDNA: gi_15294203, supported by cDNA: gi_20147282 [Arabidopsis >gi|15294204|gb|AAK95279.1|AF410293_1 AT5g62130/mtg10_150
  misc_feature (38)..(156): Homolog of NCBI NO: 10176931 NR Description: gene_id:MTG10.16~unknown protein [Arabidopsis
  misc_feature (10)..(156): Homolog of NCBI NO: 37536224 NR Description: unknown protein [Oryza sativa (japonica
  misc_feature (1)..(156): Homolog of NCBI NO: 20260110 NR Description: unknown protein [Arabidopsis thaliana]
  misc_feature (23)..(156): Homolog of NCBI NO: 32949296 NR Description: CAB2 protein [Homo sapiens]
  misc_feature (21)..(156): Homolog of NCBI NO: 31212833 NR Description: ENSANGP00000021025 [Anopheles gambiae]
  misc_feature (23)..(156): Homolog of NCBI NO: 28372501 NR Description: CAB2 [Homo sapiens] >gi|27808402|dbj|BAC55580.1|
  misc_feature (37)..(156): Homolog of NCBI NO: 19921698 NR Description: CG3271-PB [Drosophila melanogaster]
  misc_feature (37)..(156): Homolog of NCBI NO: 24586036 NR Description: CG3271-PA [Drosophila melanogaster]
MLVLAMLIQITECEISGCVGQLCFPQCNSSSDGGPWYIQEPLYLQWKKWGCQGDCRYQCMVNRETERETLGQAPVKYHGKWPFKRVLGIQEPASVAFSVLNLAMHFHGWLSFFIMIYYKLPLKQDRTAYYEYVGLWHIYGLLSMNSWFWSAVFHSR

SEQ ID NO: 84842 - protein, 151 aa, Arabidopsis thaliana
  peptide (1)..(151): Ceres Seq. ID no. 12677261
  misc_feature (34)..(151): Pfam Name: Per1-like Pfam Description: Per1-like
  misc_feature (5)..(151): Homolog of NCBI NO: 15219283 NR Description: unknown protein; protein id: At1g16560.1
  misc_feature (5)..(151): Homolog of NCBI NO: 18424554 NR Description: putative protein; protein id: At5g62130.1, by cDNA: gi_15294203, supported by cDNA: gi_20147282 [Arabidopsis >gi|15294204|gb|AAK95279.1|AF410293_1 AT5g62130/mtg10_150
  misc_feature (33)..(151): Homolog of NCBI NO: 10176931 NR Description: gene_id:MTG10.16~unknown protein [Arabidopsis
  misc_feature (5)..(151): Homolog of NCBI NO: 37536224 NR Description: unknown protein [Oryza sativa (japonica
  misc_feature (1)..(151): Homolog of NCBI NO: 20260110 NR Description: unknown protein [Arabidopsis thaliana]
  misc_feature (18)..(151): Homolog of NCBI NO: 32949296 NR Description: CAB2 protein [Homo sapiens]
  misc_feature (16)..(151): Homolog of NCBI NO: 31212833 NR Description: ENSANGP00000021025 [Anopheles gambiae]
  misc_feature (18)..(151): Homolog of NCBI NO: 28372501 NR Description: CAB2 [Homo sapiens] >gi|27808402|dbj|BAC55580.1|
  misc_feature (32)..(151): Homolog of NCBI NO: 19921698 NR Description: CG3271-PB [Drosophila melanogaster]
  misc_feature (32)..(151): Homolog of NCBI NO: 24586036 NR Description: CG3271-PA [Drosophila melanogaster]
MLIQITECEISGCVGQLCFPQCNSSSDGGPWYIQEPLYLQWKKWGCQGDCRYQCMVNRETERETLGQAPVKYHGKWPFKRVLGIQEPASVAFSVLNLAMHFHGWLSFFIMIYYKLPLKQDRTAYYEYVGLWHIYGLLSMNSWFWSAVFHSR

SEQ ID NO: 84843 - DNA, 1278 bp, Arabidopsis thaliana
  misc_feature (1)..(1278): Ceres Seq. ID no. 12677262
  misc_feature: MA Experiment ID: 108668 Result: Down-regulated in Transcription
  misc_feature: MA Experiment 108668 PARAMETER Experiment Name: At_2mM_SA_cDNA_P Parameter: Plant Line Value: WS
  misc_feature: MA Experiment 108668 PARAMETER Experiment Name: At_2mM_SA_cDNA_P Parameter: Timepoint (hr) Value: 6
  misc_feature: MA Experiment 108668 PARAMETER Experiment Name: At_2mM_SA_cDNA_P Parameter: Treatment Value: 2mM SA vs. No Treatment
  misc_feature: MA Experiment ID: 20000224 Result: Down-regulated in Transcription
  misc_feature: MA Experiment ID: 20000286 Result: Down-regulated in Transcription
  misc_feature: MA Experiment 20000286 PARAMETER Experiment Name: At_Open_Flower_P Parameter: Age (day) Value: 21
  misc_feature: MA Experiment 20000286 PARAMETER Experiment Name: At_Open_Flower_P Parameter: Plant Line Value: WS
  misc_feature: MA Experiment 20000286 PARAMETER Experiment Name: At_Open_Flower_P Parameter: Tissue Value: Half Open vs. Whole Plant
  misc_feature: MA Experiment ID: 20000439 Result: Down-regulated in Transcription
  misc_feature: MA Experiment 20000439 PARAMETER Experiment Name: At_Roots__P Parameter: Age (day) Value: 14 vs. 21
  misc_feature: MA Experiment 20000439 PARAMETER Experiment Name: At_Roots__P Parameter: Organism Value: A. thaliana
  misc_feature: MA Experiment 20000439 PARAMETER Experiment Name: At_Roots__P Parameter: Tissue Value: Roots vs. Whole Plant
  misc_feature: MA Experiment ID: 20000451 Result: Down-regulated in Transcription
  misc_feature: MA Experiment 20000451 PARAMETER Experiment Name: At_CS6879_Shoots-Roots_P Parameter: Age (day) Value: 14
  misc_feature: MA Experiment 20000451 PARAMETER Experiment Name: At_CS6879_Shoots-Roots_P Parameter: Organism Value: A. thaliana
  misc_feature: MA Experiment 20000451 PARAMETER Experiment Name: At_CS6879_Shoots-Roots_P Parameter: Plant Line Value: CS6879 vs. WS
  misc_feature: MA Experiment 20000451 PARAMETER Experiment Name: At_CS6879_Shoots-Roots_P Parameter: Tissue Value: Roots
gagaatctggaagtagcaaaatttggcggctttaactcagcaatttgttctgtacatggtattttgagaagagagcattcagctcacagttacgctctgcctatccagcttctaaatctactcactttggtcgagtcatggcttcttctggatctgaggcaaaagctaattacgcacccatatctaccaatgaacctgttgtgtctgttgattggctccactctaatcttggagatgctgatataaaggttttggatgcctcatggtacatggcacatgagcaaagaaatccaatccaagagtatcaagttgctcatattccaggtgctctcttctttgatttgaatggaatagcagatcgaaaaacaaatttacgacacatgctaccatctgaggaagcttttgctgctggttgttctgctcttggaatcgagaacaacgatggagtggttgtgtatgatggaatggggctctttagtgcagctcgtgtatggtggatgtttagagtctttggacatgacaaagtatgggtacttgatggaggcttgccgaaatggcgtgcttcaggctatgacgttgaatccagtgtttcaaatgatgccattttgaaagccagtgcagcaactgaggctatagagaagatctatcaaggacaaacaattagcccaataacttttcagacgaagttccggccacatcttgtattggcacttgatcaggtgaaggaaaacatcgaggataagacttatcagcacatcgatgcgcgttcaaaggctagatttgacggtattgctccagaaccttggaagggtttaccgagtggtcatatacccggtagcaagtgtgtcccttttcccctaatgtttgattcctctcaaacactgttaccagcagaggagctgaagaagcagtttgaacaggaagacatatctctggacagtccgattgcggcctcatgtggaaccggtgtaacagcttgtattttggcattgggactttatcgtctgggaaaaactaatgtggcaatctatgatgggtcttggactgaatgggcaactgcaccaaacttgcccatagtgggttcttcttcataagaaagtccaagaaaaagctacaagatcacaagccagtggatatatatttataagcttagcttggttcaatccatttctgtgttaaactttaacaaattgctgggagggttgtattagtattatacatcagtattcaggattcttgagtttggtctcatctttgtggagattgattaaaagtctt

SEQ ID NO: 84844 - protein, 318 aa, Arabidopsis thaliana; identical to SEQ ID NO: 24974
  peptide (1)..(318): Ceres Seq. ID no. 12677263
  misc_feature (23)..(143): Pfam Name: Rhodanese-like domain Pfam Description: Rhodanese-like domain
  misc_feature (1)..(318): Homolog of NCBI NO: 25456716 NR Description: thiosulfate sulfurtransferase (EC 2.8.1.1)
  misc_feature (1)..(318): Homolog of NCBI NO: 30684873 NR Description: mercaptopyruvate sulfurtransferase (Mst2/Rdh2)
  misc_feature (1)..(318): Homolog of NCBI NO: 18394364 NR Description: mercaptopyruvate sulfurtransferase (Mst2/Rdh2); id: At1g16460.2, supported by cDNA: gi_6009982 [Arabidopsis >gi|25288790|pir||T52663 thiosulfate sulfurtransferase (EC
  misc_feature (1)..(318): Homolog of NCBI NO: 25288797 NR Description: hypothetical protein F3O9.26 [imported] - thaliana >gi|4966366|gb|AAD34697.1|AC006341_25 Similar to thiosulfate sulfurtransferase (TST) from Datisca glomerata and
  misc_feature (1)..(318): Homolog of NCBI NO: 18412307 NR Description: mercaptopyruvate sulfurtransferase (Mst1/Rdh1); id: At1g79230.1, supported by cDNA: 32130., supported by cDNA:
  misc_feature (1)..(318): Homolog of NCBI NO: 25288794 NR Description: thiosulfate sulfurtransferase (EC 2.8.1.1) Mst1
  misc_feature (1)..(313): Homolog of NCBI NO: 4406372 NR Description: thiosulfate sulfurtransferase [Datisca glomerata]
  misc_feature (15)..(317): Homolog of NCBI NO: 14571545 NR Description: thiosulfate transferase [Triticum aestivum]
  misc_feature (17)..(171): Homolog of NCBI NO: 27381801 NR Description: thiosulfate sulfurtransferase [Bradyrhizobium >gi|27354970|dbj|BAC51955.1| thiosulfate sulfurtransferase
  misc_feature (177)..(313): Homolog of NCBI NO: 27381801 NR Description: thiosulfate sulfurtransferase [Bradyrhizobium >gi|27354970|dbj|BAC51955.1| thiosulfate sulfurtransferase

SEQ ID NO: 84845 - protein, 274 aa, Arabidopsis thaliana; identical to SEQ ID NO: 24975
  peptide (1)..(274): Ceres Seq. ID no. 12677264
  misc_feature (1)..(99): Pfam Name: Rhodanese-like domain Pfam Description: Rhodanese-like domain
  misc_feature (1)..(274): Homolog of NCBI NO: 25456716 NR Description: thiosulfate sulfurtransferase (EC 2.8.1.1)
  misc_feature (1)..(274): Homolog of NCBI NO: 30684873 NR Description: mercaptopyruvate sulfurtransferase (Mst2/Rdh2)
  misc_feature (1)..(274): Homolog of NCBI NO: 18394364 NR Description: mercaptopyruvate sulfurtransferase (Mst2/Rdh2); id: At1g16460.2, supported by cDNA: gi_6009982 [Arabidopsis >gi|25288790|pir||T52663 thiosulfate sulfurtransferase (EC
  misc_feature (1)..(274): Homolog of NCBI NO: 25288797 NR Description: hypothetical protein F3O9.26 [imported] - thaliana >gi|4966366|gb|AAD34697.1|AC006341_25 Similar to thiosulfate sulfurtransferase (TST) from Datisca glomerata and
  misc_feature (1)..(274): Homolog of NCBI NO: 18412307 NR Description: mercaptopyruvate sulfurtransferase (Mst1/Rdh1); id: At1g79230.1, supported by cDNA: 32130., supported by cDNA:
  misc_feature (1)..(274): Homolog of NCBI NO: 25288794 NR Description: thiosulfate sulfurtransferase (EC 2.8.1.1) Mst1
  misc_feature (1)..(269): Homolog of NCBI NO: 4406372 NR Description: thiosulfate sulfurtransferase [Datisca glomerata]
  misc_feature (1)..(273): Homolog of NCBI NO: 14571545 NR Description: thiosulfate transferase [Triticum aestivum]
  misc_feature (1)..(127): Homolog of NCBI NO: 27381801 NR Description: thiosulfate sulfurtransferase [Bradyrhizobium >gi|27354970|dbj|BAC51955.1| thiosulfate sulfurtransferase
  misc_feature (133)..(269): Homolog of NCBI NO: 27381801 NR Description: thiosulfate sulfurtransferase [Bradyrhizobium >gi|27354970|dbj|BAC51955.1| thiosulfate sulfurtransferase

SEQ ID NO: 84846 - protein, 237 aa, Arabidopsis thaliana; identical to SEQ ID NO: 24976
  peptide (1)..(237): Ceres Seq. ID no. 12677265
  misc_feature (1)..(62): Pfam Name: Rhodanese-like domain Pfam Description: Rhodanese-like domain
  misc_feature (1)..(237): Homolog of NCBI NO: 25456716 NR Description: thiosulfate sulfurtransferase (EC 2.8.1.1)
  misc_feature (1)..(237): Homolog of NCBI NO: 30684873 NR Description: mercaptopyruvate sulfurtransferase (Mst2/Rdh2)
  misc_feature (1)..(237): Homolog of NCBI NO: 18394364 NR Description: mercaptopyruvate sulfurtransferase (Mst2/Rdh2); id: At1g16460.2, supported by cDNA: gi_6009982 [Arabidopsis >gi|25288790|pir||T52663 thiosulfate sulfurtransferase (EC
  misc_feature (1)..(237): Homolog of NCBI NO: 25288797 NR Description: hypothetical protein F3O9.26 [imported] - thaliana >gi|4966366|gb|AAD34697.1|AC006341_25 Similar to thiosulfate sulfurtransferase (TST) from Datisca glomerata and
  misc_feature (1)..(237): Homolog of NCBI NO: 18412307 NR Description: mercaptopyruvate sulfurtransferase (Mst1/Rdh1); id: At1g79230.1, supported by cDNA: 32130., supported by cDNA:
  misc_feature (1)..(237): Homolog of NCBI NO: 25288794 NR Description: thiosulfate sulfurtransferase (EC 2.8.1.1) Mst1
  misc_feature (1)..(232): Homolog of NCBI NO: 4406372 NR Description: thiosulfate sulfurtransferase [Datisca glomerata]
  misc_feature (1)..(236): Homolog of NCBI NO: 14571545 NR Description: thiosulfate transferase [Triticum aestivum]
  misc_feature (1)..(90): Homolog of NCBI NO: 27381801 NR Description: thiosulfate sulfurtransferase [Bradyrhizobium >gi|27354970|dbj|BAC51955.1| thiosulfate sulfurtransferase
  misc_feature (96)..(232): Homolog of NCBI NO: 27381801 NR Description: thiosulfate sulfurtransferase [Bradyrhizobium >gi|27354970|dbj|BAC51955.1| thiosulfate sulfurtransferase

SEQ ID NO: 84847 - DNA, 1195 bp, Arabidopsis thaliana
  misc_feature (1)..(1195): Ceres Seq. ID no. 12677269
  misc_feature: MA Experiment ID: 20000179 Result: Up-regulated in Transcription
  misc_feature: MA Experiment 20000179 PARAMETER Experiment Name: At_Germinating_Seeds_P Parameter: Age (hr) Value: 6 vs. 0
  misc_feature: MA Experiment 20000179 PARAMETER Experiment Name: At_Germinating_Seeds_P Parameter: Tissue Value: Germinating Seeds
  misc_feature: MA Experiment ID: 20000437 Result: Up-regulated in Transcription
  misc_feature: MA Experiment 20000437 PARAMETER Experiment Name: At_Drought_P Parameter: Age (day) Value: 8
  misc_feature: MA Experiment 20000437 PARAMETER Experiment Name: At_Drought_P Parameter: Organism Value: A. thaliana
  misc_feature: MA Experiment 20000437 PARAMETER Experiment Name: At_Drought_P Parameter: Plant Line Value: WS
  misc_feature: MA Experiment 20000437 PARAMETER Experiment Name: At_Drought_P Parameter: Timepoint (hr) Value: 24
  misc_feature: MA Experiment 20000437 PARAMETER Experiment Name: At_Drought_P Parameter: Tissue Value: Whole Plant
  misc_feature: MA Experiment 20000437 PARAMETER Experiment Name: At_Drought_P Parameter: Treatment Value: Drought vs. No Drought
  misc_feature: MA Experiment ID: 20001558 Result: Down-regulated in Transcription
  misc_feature: MA Experiment 20001558 PARAMETER Experiment Name: At_Drought_Soil_Dry_P Parameter: Age (day) Value: 27
  misc_feature: MA Experiment 20001558 PARAMETER Experiment Name: At_Drought_Soil_Dry_P Parameter: Organism Value: A. thaliana
  misc_feature: MA Experiment 20001558 PARAMETER Experiment Name: At_Drought_Soil_Dry_P Parameter: Plant Line Value: WS
  misc_feature: MA Experiment 20001558 PARAMETER Experiment Name: At_Drought_Soil_Dry_P Parameter: Post Timepoint (hr) Value: 6
  misc_feature: MA Experiment 20001558 PARAMETER Experiment Name: At_Drought_Soil_Dry_P Parameter: Post-Treatment Value: Re-Water vs. No Drought
  misc_feature: MA Experiment 20001558 PARAMETER Experiment Name: At_Drought_Soil_Dry_P Parameter: Timepoint (day) Value: 13
  misc_feature: MA Experiment 20001558 PARAMETER Experiment Name: At_Drought_Soil_Dry_P Parameter: Treatment Value: Drought vs. No Drought
  misc_feature: MA Experiment ID: 20001911 Result: Up-regulated in Transcription
  misc_feature: MA Experiment 20001911 PARAMETER Experiment Name: At_Drought_Reproduction_P Parameter: Age (day) Value: 40
  misc_feature: MA Experiment 20001911 PARAMETER Experiment Name: At_Drought_Reproduction_P Parameter: Organism Value: A. thaliana
  misc_feature: MA Experiment 20001911 PARAMETER Experiment Name: At_Drought_Reproduction_P Parameter: Plant Line Value: WS
  misc_feature: MA Experiment 20001911 PARAMETER Experiment Name: At_Drought_Reproduction_P Parameter: Timepoint (day) Value: 10
  misc_feature: MA Experiment 20001911 PARAMETER Experiment Name: At_Drought_Reproduction_P Parameter: Tissue Value: Flowers
  misc_feature: MA Experiment 20001911 PARAMETER Experiment Name: At_Drought_Reproduction_P Parameter: Treatment Value: Drought vs. No Drought
agcattatccaaaactcaaaattacagcgttgaaacagaaaccgatctcgtcgctgattctcttttcttcggatccttctagataatggctcgatctttctctcgttcactttctctatccaaaggccgtttcgccgccgcgtcatcctctctcctcccttcgtcgcaccttgtttcattccgatctcaatcttccgatcgtcggggagatctgtacgagattgatacctccgcggcttctcaatcgccgtcggatcctttaatacagaagctagaagacgccgttcaccggatttttgtgcgccgagctcagcctgattggctcccttttgttcctggtgcgtcttattgggtccctcctcctggatctggatctcagtctcatggaatcgctcagctcgttgtgaaactcgcgaatccgttaacacacgaagaatctttatctaccaattcttctcatggatggccttcctccgattatttccttaaaggttcttattggtcattctctctctggttttttatggataaagcttggattggaatcttcaatatgttactcatgctttagctaccaactaaattgattttgaaattgatcaaatttttgttgaatgtaagcattcatatgatttaactagtggcaggtttttgatatgttgataatgctatgtcaatcgtaaagttagtcattgctcgatgctgttacaggttctgaatgggagatcattaatatgtgattaacatttttgagaatctttaatcatataggcagtactagcgtctttggtggaacaggttcttaactagttgtggtgtatgagaattgtttgattgttggtcattcgttgacatatggtttttgtttattgggtttaggtgttcaacctcaattgatggagaccaagaccgagacaacttcaaattccgagtctcactctgaggacgaggaagtgtaaaaatgacactgcttgtttggcttgcaggctcttcaggatctcttgtcaagaccaagagctgccgaattcggacaaccaagagcaagtgaaaagacgtgaaatagaacgaccatatttctatacctgataccaaaatgtggaatatcgaataagactagtgttgtaggcttgtgtagcatgtcccgctgtttctcttttaaacagttgttgtatatatatatctctgtttccttgct

SEQ ID NO: 84848 - protein, 161 aa, Arabidopsis thaliana
  peptide (1)..(161): Ceres Seq. ID no. 12677270
  misc_feature (1)..(161): Homolog of NCBI NO: 30685027 NR Description: expressed protein [Arabidopsis thaliana] At1g16840/F17F16.27 [Arabidopsis thaliana]
  misc_feature (1)..(136): Homolog of NCBI NO: 18394407 NR Description: expressed protein; protein id: At1g16840.1, by cDNA: gi_15450362 [Arabidopsis thaliana]
  misc_feature (1)..(136): Homolog of NCBI NO: 18412160 NR Description: expressed protein; protein id: At1g78890.1,
  misc_feature (1)..(136): Homolog of NCBI NO: 21592720 NR Description: unknown [Arabidopsis thaliana]
  misc_feature (1)..(136): Homolog of NCBI NO: 25364101 NR Description: hypothetical protein F9K20.6 [imported] - thaliana >gi|3834306|gb|AAC83022.1| EST gb|R65024 comes from this
  misc_feature (1)..(110): Homolog of NCBI NO: 38175698 NR Description: unknown protein [Oryza sativa (japonica
  misc_feature (112)..(138): Homolog of NCBI NO: 38175698 NR Description: unknown protein [Oryza sativa (japonica
  misc_feature (1)..(134): Homolog of NCBI NO: 18398961 NR Description: expressed protein; protein id: At2g19180.1, by cDNA: 39441. [Arabidopsis thaliana] >gi|7487282|pir||T00539
  misc_feature (45)..(134): Homolog of NCBI NO: 14423398 NR Description: Unknown protein [Arabidopsis thaliana]
  misc_feature (1)..(138): Homolog of NCBI NO: 38346553 NR Description: OSJNBa0035M09.14 [Oryza sativa (japonica
MARSFSRSLSLSKGRFAAASSSLLPSSHLVSFRSQSSDRRGDLYEIDTSAASQSPSDPLIQKLEDAVHRIFVRRAQPDWLPFVPGASYWVPPPGSGSQSHGIAQLVVKLANPLTHEESLSTNSSHGWPSSDYFLKGSYWSFSLWFFMDKAWIGIFNMLLML

SEQ ID NO: 84849 - DNA, 2830 bp, Arabidopsis thaliana
  misc_feature (1)..(2830): Ceres Seq. ID no. 12677305
  misc_feature: MA Experiment ID: 20000184 Result: Down-regulated in Transcription
  misc_feature: MA Experiment 20000184 PARAMETER Experiment Name: At_Shoots__P Parameter: Age (day) Value: 7
  misc_feature: MA Experiment 20000184 PARAMETER Experiment Name: At_Shoots__P Parameter: Tissue Value: Shoots vs. Whole Plant
  misc_feature: MA Experiment ID: 20000794 Result: Up-regulated in Transcription
  misc_feature: MA Experiment 20000794 PARAMETER Experiment Name: At_Petals_P Parameter: Age (day) Value: 23-25 days
  misc_feature: MA Experiment 20000794 PARAMETER Experiment Name: At_Petals_P Parameter: Plant Line Value: WS
  misc_feature: MA Experiment 20000794 PARAMETER Experiment Name: At_Petals_P Parameter: Tissue Value: Petals vs. Whole plant
  misc_feature: MA Experiment ID: 20001911 Result: Up-regulated in Transcription
  misc_feature: MA Experiment 20001911 PARAMETER Experiment Name: At_Drought_Reproduction_P Parameter: Age (day) Value: 40
  misc_feature: MA Experiment 20001911 PARAMETER Experiment Name: At_Drought_Reproduction_P Parameter: Organism Value: A. thaliana
  misc_feature: MA Experiment 20001911 PARAMETER Experiment Name: At_Drought_Reproduction_P Parameter: Plant Line Value: WS
  misc_feature: MA Experiment 20001911 PARAMETER Experiment Name: At_Drought_Reproduction_P Parameter: Timepoint (day) Value: 10
  misc_feature: MA Experiment 20001911 PARAMETER Experiment Name: At_Drought_Reproduction_P Parameter: Tissue Value: Flowers
  misc_feature: MA Experiment 20001911 PARAMETER Experiment Name: At_Drought_Reproduction_P Parameter: Treatment Value: Drought vs. No Drought
aaaaatgttaatcttaggacaaaaaatatttggttggaagttggaattgaggttccagagatgaatgatggctaatcccagagtttctcttcctctcttatttttgacttgtccttgttcttctacactgacatgaacaacttcaacgcctcgaatctttctcctccttttgcttccttctctcaccacatttcctcgccaccagaggacggtttcagagcttccgggagatgttttcgtttgtgggtttcgtggtgttcctctctggatttttcctgggaattctcgccgtcttatccgctgaagctgcgggatttatgtatctcctgaagcgattgaatcgcaagagagatcgtattgagtcaaaacccgtctctgatccatctatcaaggattttaatcctcgcgaatccatcgatttctgtatcaacaaacagggagtggtatggattttggaattggatgaaggtctgaagaactggatgaaggaaaagttaccaaaagagcagaagaggaagagaggcttattggagattcatccacttcgaaagttcgctcgaatcaaagatcacaagcttatcttgtcagatgctgatagcactcagagtgagactaccgtttctttaataggttgcagtattgaggctgtttcaggctctgatctccctacaagaaaatgggccaaaaggtttccaataaaagttgaaagcaagatttctccagccttatacaagggaaaccaggtgttttacatctatctggagacttcttgggaaaaggaatcatggtgtaaagcccttcgtcttgcttcttgtgaaaatcaggaaaggtttatttggtactccaccaaattgaaagaagatttccgtaattatgtgacttctcttaatgttgcatatccttcatttatgaaaccatcacttggctttagttttgagacacttgacaaagggaacagaacggatggttcatcctcaaaggttcgcttgttcttgaagaaattttctagaaagcgatcaaatcgtgaagacaggaaaacctattcacatcatggaagtagctcagggaagtgctttccaggaaagaataatatgacagatgatactgatgtgcctattttttcacgttctgtgagccatagcagtcatatttctggggtcagtcatctttctggggtttcagatggagactctgaagaaaaggttgacatggatgaaggaacattagcgttgaacttgctcatttctaggctatttttcgatctcaaacggaaaacaggagtgaagaattcagtgcaagcacgaattcagcggttgttatctaacatgaggactccgagctacataggcgaactaatctgctccgatgttgacactggaaatctcccacctcatatacatgctacacgggttcttccaatggagatgagtggtgtgtgggcattcgaactagatattgaatactctggtgacgtggtgattgacgttgaaacacgggttgacatccgtgaggtggatctgcaacaaggcataaccgatacaaggttgcagccaaggtcttcaggggtagtcccgtcaaattttgctgaaggtgttgaagattttgaaaagcaattagtcttccctgtggaaactgttaatgcaggagaagtgaaaaatggtggagccaataaagcagatgaatccaagagctcaagaggtacgaaggcagctccaaatggtgtatccaggtggaagtctattcttaaaacaattgctgaacaagtttctcaggtgcctatctctttgtcaatacgggtgtcttctcttcgagggacactgcgggtacacatgaagccgcctccttctgatcaattatggtttggattcacgagcatgccggatatcgaattcgatctcgcatcttctgttggggaacacaaaatcaccaacagccatgttgcaatgttcttgatcaaccggtttaagacggcaatacgagaagcggtggttcttcccaactgtgaaagcctaacgattccttggatgattgctgaaaaagatgattgggttcaacgcaaagccgctccattcatgtggctgaatcaagaaaacgatcacaatacctcccatgcaacagaagcgagatctaaatctgacaagccaccgacttcgttctcatgtcttcaagctgagcaaatgcagagaactgcaaacgccacccagaagattatttctgaaatagggacattggcttcttcctcctgtgctcagtctgagcaagtgcagaaagcggccactgctttccagaaacagaatactgaagcagaagctattatgtctacgccattgtcaaactccacaactgtaacaatagagaatgataaatccttggaagaactgaaaactccactactggtacccagcagcagtaacaagcaggagacgaactcaagagggagtagcagagaggtttctgctgttcagtcaccatctaggtctgtagcttcaagcgaagaagatgattcaagggggaaaaaacagggaagaagagcaagaatgttggatcttgggaagaaaatgggggagaaattggaggagaagaggcgtcacatggaggagaagagtagacagattgttgaaaagatgagaggaccttcttaacatgagaaggaagaagcttttgcaggtttcagatgcaaaaactgatttatagaaacagaggaagttaggcattgttacatatgtacagagatgtgagagaaagccatagatgtccccatatttatccgatcattgaaaatctttattattctgtaagatatacaatacaagaaaacagattttggtgt

SEQ ID NO: 84850 - protein, 803 aa, Arabidopsis thaliana
  peptide (1)..(803): Ceres Seq. ID no. 12677306
  misc_feature (1)..(736): Homolog of NCBI NO: 15219405 NR Description: hypothetical protein; protein id: At1g73200.1
  misc_feature (675)..(802): Homolog of NCBI NO: 15219405 NR Description: hypothetical protein; protein id: At1g73200.1
  misc_feature (170)..(604): Homolog of NCBI NO: 26251776 NR Description: Uncharacterized hypothalamus protein HT008 [Homo
  misc_feature (170)..(604): Homolog of NCBI NO: 38679909 NR Description: uncharacterized hypothalamus protein HT008 [Homo
  misc_feature (170)..(604): Homolog of NCBI NO: 33337924 NR Description: MSTP069 [Homo sapiens]
  misc_feature (170)..(604): Homolog of NCBI NO: 7021045 NR Description: unnamed protein product [Homo sapiens]
  misc_feature (170)..(604): Homolog of NCBI NO: 12698021 NR Description: KIAA1738 protein [Homo sapiens]
  misc_feature (170)..(604): Homolog of NCBI NO: 21739799 NR Description: hypothetical protein [Homo sapiens]
  misc_feature (294)..(604): Homolog of NCBI NO: 34783705 NR Description: Unknown (protein for MGC:62520) [Mus musculus]
  misc_feature (172)..(604): Homolog of NCBI NO: 34873954 NR Description: similar to putative protein of eukaryotic origin
MFSFVGFVVFLSGFFLGILAVLSAEAAGFMYLLKRLNRKRDRIESKPVSDPSIKDFNPRESIDFCINKQGVVWILELDEGLKNWMKEKLPKEQKRKRGLLEIHPLRKFARIKDHKLILSDADSTQSETTVSLIGCSIEAVSGSDLPTRKWAKRFPIKVESKISPALYKGNQVFYIYLETSWEKESWCKALRLASCENQERFIWYSTKLKEDFRNYVTSLNVAYPSFMKPSLGFSFETLDKGNRTDGSSSKVRLFLKKFSRKRSNREDRKTYSHHGSSSGKCFPGKNNMTDDTDVPIFSRSVSHSSHISGVSHLSGVSDGDSEEKVDMDEGTLALNLLISRLFFDLKRKTGVKNSVQARIQRLLSNMRTPSYIGELICSDVDTGNLPPHIHATRVLPMEMSGVWAFELDIEYSGDVVIDVETRVDIREVDLQQGITDTRLQPRSSGVVPSNFAEGVEDFEKQLVFPVETVNAGEVKNGGANKADESKSSRGTKAAPNGVSRWKSILKTIAEQVSQVPISLSIRVSSLRGTLRVHMKPPPSDQLWFGFTSMPDIEFDLASSVGEHKITNSHVAMFLINRFKTAIREAVVLPNCESLTIPWMIAEKDDWVQRKAAPFMWLNQENDHNTSHATEARSKSDKPPTSFSCLQAEQMQRTANATQKIISEIGTLASSSCAQSEQVQKAATAFQKQNTEAEAIMSTPLSNSTTVTIENDKSLEELKTPLLVPSSSNKQETNSRGSSREVSAVQSPSRSVASSEEDDSRGKKQGRRARMLDLGKKMGEKLEEKRRHMEEKSRQIVEKMRGPS

SEQ ID NO: 84851 - protein, 774 aa, Arabidopsis thaliana
  peptide (1)..(774): Ceres Seq. ID no. 12677307
  misc_feature (1)..(707): Homolog of NCBI NO: 15219405 NR Description: hypothetical protein; protein id: At1g73200.1
  misc_feature (646)..(773): Homolog of NCBI NO: 15219405 NR Description: hypothetical protein; protein id: At1g73200.1
  misc_feature (141)..(575): Homolog of NCBI NO: 26251776 NR Description: Uncharacterized hypothalamus protein HT008 [Homo
  misc_feature (141)..(575): Homolog of NCBI NO: 38679909 NR Description: uncharacterized hypothalamus protein HT008 [Homo
  misc_feature (141)..(575): Homolog of NCBI NO: 33337924 NR Description: MSTP069 [Homo sapiens]
  misc_feature (141)..(575): Homolog of NCBI NO: 7021045 NR Description: unnamed protein product [Homo sapiens]
  misc_feature (141)..(575): Homolog of NCBI NO: 12698021 NR Description: KIAA1738 protein [Homo sapiens]
  misc_feature (141)..(575): Homolog of NCBI NO: 21739799 NR Description: hypothetical protein [Homo sapiens]
  misc_feature (265)..(575): Homolog of NCBI NO: 34783705 NR Description: Unknown (protein for MGC:62520) [Mus musculus]
  misc_feature (143)..(575): Homolog of NCBI NO: 34873954 NR Description: similar to putative protein of eukaryotic origin
MYLLKRLNRKRDRIESKPVSDPSIKDFNPRESIDFCINKQGVVWILELDEGLKNWMKEKLPKEQKRKRGLLEIHPLRKFARIKDHKLILSDADSTQSETTVSLIGCSIEAVSGSDLPTRKWAKRFPIKVESKISPALYKGNQVFYIYLETSWEKESWCKALRLASCENQERFIWYSTKLKEDFRNYVTSLNVAYPSFMKPSLGFSFETLDKGNRTDGSSSKVRLFLKKFSRKRSNREDRKTYSHHGSSSGKCFPGKNNMTDDTDVPIFSRSVSHSSHISGVSHLSGVSDGDSEEKVDMDEGTLALNLLISRLFFDLKRKTGVKNSVQARIQRLLSNMRTPSYIGELICSDVDTGNLPPHIHATRVLPMEMSGVWAFELDIEYSGDVVIDVETRVDIREVDLQQGITDTRLQPRSSGVVPSNFAEGVEDFEKQLVFPVETVNAGEVKNGGANKADESKSSRGTKAAPNGVSRWKSILKTIAEQVSQVPISLSIRVSSLRGTLRVHMKPPPSDQLWFGFTSMPDIEFDLASSVGEHKITNSHVAMFLINRFKTAIREAVVLPNCESLTIPWMIAEKDDWVQRKAAPFMWLNQENDHNTSHATEARSKSDKPPTSFSCLQAEQMQRTANATQKIISEIGTLASSSCAQSEQVQKAATAFQKQNTEAEAIMSTPLSNSTTVTIENDKSLEELKTPLLVPSSSNKQETNSRGSSREVSAVQSPSRSVASSEEDDSRGKKQGRRARMLDLGKKMGEKLEEKRRHMEEKSRQIVEKMRGPS

SEQ ID NO: 84852 - protein, 719 aa, Arabidopsis thaliana
  peptide (1)..(719): Ceres Seq. ID no. 12677308
  misc_feature (1)..(652): Homolog of NCBI NO: 15219405 NR Description: hypothetical protein; protein id: At1g73200.1
  misc_feature (591)..(718): Homolog of NCBI NO: 15219405 NR Description: hypothetical protein; protein id: At1g73200.1
  misc_feature (86)..(520): Homolog of NCBI NO: 26251776 NR Description: Uncharacterized hypothalamus protein HT008 [Homo
  misc_feature (86)..(520): Homolog of NCBI NO: 38679909 NR Description: uncharacterized hypothalamus protein HT008 [Homo
  misc_feature (86)..(520): Homolog of NCBI NO: 33337924 NR Description: MSTP069 [Homo sapiens]
  misc_feature (86)..(520): Homolog of NCBI NO: 7021045 NR Description: unnamed protein product [Homo sapiens]
  misc_feature (86)..(520): Homolog of NCBI NO: 12698021 NR Description: KIAA1738 protein [Homo sapiens]
  misc_feature (86)..(520): Homolog of NCBI NO: 21739799 NR Description: hypothetical protein [Homo sapiens]
  misc_feature (210)..(520): Homolog of NCBI NO: 34783705 NR Description: Unknown (protein for MGC:62520) [Mus musculus]
  misc_feature (88)..(520): Homolog of NCBI NO: 34873954 NR Description: similar to putative protein of eukaryotic origin
MKEKLPKEQKRKRGLLEIHPLRKFARIKDHKLILSDADSTQSETTVSLIGCSIEAVSGSDLPTRKWAKRFPIKVESKISPALYKGNQVFYIYLETSWEKESWCKALRLASCENQERFIWYSTKLKEDFRNYVTSLNVAYPSFMKPSLGFSFETLDKGNRTDGSSSKVRLFLKKFSRKRSNREDRKTYSHHGSSSGKCFPGKNNMTDDTDVPIFSRSVSHSSHISGVSHLSGVSDGDSEEKVDMDEGTLALNLLISRLFFDLKRKTGVKNSVQARIQRLLSNMRTPSYIGELICSDVDTGNLPPHIHATRVLPMEMSGVWAFELDIEYSGDVVIDVETRVDIREVDLQQGITDTRLQPRSSGVVPSNFAEGVEDFEKQLVFPVETVNAGEVKNGGANKADESKSSRGTKAAPNGVSRWKSILKTIAEQVSQVPISLSIRVSSLRGTLRVHMKPPPSDQLWFGFTSMPDIEFDLASSVGEHKITNSHVAMFLINRFKTAIREAVVLPNCESLTIPWMIAEKDDWVQRKAAPFMWLNQENDHNTSHATEARSKSDKPPTSFSCLQAEQMQRTANATQKIISEIGTLASSSCAQSEQVQKAATAFQKQNTEAEAIMSTPLSNSTTVTIENDKSLEELKTPLLVPSSSNKQETNSRGSSREVSAVQSPSRSVASSEEDDSRGKKQGRRARMLDLGKKMGEKLEEKRRHMEEKSRQIVEKMRGPS

SEQ ID NO: 84853 - DNA, 1408 bp, Arabidopsis thaliana
  misc_feature (1)..(1408): Ceres Seq. ID no. 12677384
  misc_feature: MA Experiment ID: 20000185 Result: Up-regulated in Transcription
  misc_feature: MA Experiment 20000185 PARAMETER Experiment Name: At_Roots__P Parameter: Age (day) Value: 7 vs. 21
  misc_feature: MA Experiment 20000185 PARAMETER Experiment Name: At_Roots__P Parameter: Organism Value: A. thaliana
  misc_feature: MA Experiment 20000185 PARAMETER Experiment Name: At_Roots__P Parameter: Tissue Value: Roots vs. Whole Plant
  misc_feature: MA Experiment ID: 20000227 Result: Up-regulated in Transcription
  misc_feature: MA Experiment 20000227 PARAMETER Experiment Name: At_Root-Tips-vs-Tops_P Parameter: Tissue Value: Root Tips vs. Root Tops
  misc_feature: MA Experiment ID: 20000286 Result: Up-regulated in Transcription
  misc_feature: MA Experiment 20000286 PARAMETER Experiment Name: At_Open_Flower_P Parameter: Age (day) Value: 21
  misc_feature: MA Experiment 20000286 PARAMETER Experiment Name: At_Open_Flower_P Parameter: Plant Line Value: WS
  misc_feature: MA Experiment 20000286 PARAMETER Experiment Name: At_Open_Flower_P Parameter: Tissue Value: Half Open vs. Whole Plant
  misc_feature: MA Experiment ID: 20000439 Result: Up-regulated in Transcription
  misc_feature: MA Experiment 20000439 PARAMETER Experiment Name: At_Roots__P Parameter: Age (day) Value: 14 vs. 21
  misc_feature: MA Experiment 20000439 PARAMETER Experiment Name: At_Roots__P Parameter: Organism Value: A. thaliana
  misc_feature: MA Experiment 20000439 PARAMETER Experiment Name: At_Roots__P Parameter: Tissue Value: Roots vs. Whole Plant
  misc_feature: MA Experiment ID: 20000794 Result: Up-regulated in Transcription
  misc_feature: MA Experiment 20000794 PARAMETER Experiment Name: At_Petals_P Parameter: Age (day) Value: 23-25 days
  misc_feature: MA Experiment 20000794 PARAMETER Experiment Name: At_Petals_P Parameter: Plant Line Value: WS
  misc_feature: MA Experiment 20000794 PARAMETER Experiment Name: At_Petals_P Parameter: Tissue Value: Petals vs. Whole plant
aagcgaacaagtctttgcctctttggtttactttcctctgttttcgatccatttagaaaatgttattcacgaggagtgttgctcggatttcttctaagtttctgagaaaccgtagcttctatggctcctctcaatctctcgcctctcatcggttcgcaatcattcccgatcagggtcactcttgttctgactctccacacaagtagggttacgtttgcagaacaacttattcattgaaatctccggtttttggtggatttagtcatcaactctatcaccagagtagctccttggttgaggaggagcttgacccattttcgcttgttgccgatgagctgtcacttcttagtaataagttgagagagatggtacttgccgaggttccaaagcttgcctctgctgctgagtacttcttcaaaaggggtgtgcaaggaaaacagtttcgttcaactattttgctgctgatggcgacagctctgaatgtacgagttccagaagcattgattggggaatcaacagatatagtcacatcagaattacgcgtaaggcaacggggtattgctgaaatcactgaaatgatacacgtcgcaagtctactgcacgatgatgtcttggatgatgccgatacaaggcgtggtgttggttccttaaatgttgtaatgggtaacaagatgtcggtattagcaggagacttcttgctctcccgggcttgtggggctctcgctgctttaaagaacacagaggttgtagcattacttgcaactgctgtagaacatcttgttaccggtgaaaccatggagataactagttcaaccgagcagcgttatagtatggactactacatgcagaagacatattataagacagcatcgctaatctctaacagctgcaaagctgttgccgttctcactggacaaacagcagaagttgccgtgttagcttttgagtatgggaggaatctgggtttagcattccaattaatagacgacattcttgatttcacgggcacatctgcctctctcggaaagggatcgttgtcagatattcgccatggagtcataacagccccaatcctctttgccatggaagagtttcctcaactacgcgaagttgttgatcaagttgaaaaagatcctaggaatgttgacattgctttagagtatcttgggaagagcaagggaatacagagggcaagagaattagccatggaacatgcgaatctagcagcagctgcaatcgggtctctacctgaaacagacaatgaagatgtcaaaagatcgaggcgggcacttattgacttgacccatagagtcatcaccagaaacaagtgagattaagtaatgtttctctctatacaccaaaacattcctcatttcatttgtaggattttgttggtccaattcgtttc

SEQ ID NO: 84854 - protein, 321 aa, Arabidopsis thaliana; identical to SEQ ID NO: 40928
  peptide (1)..(321): Ceres Seq. ID no. 12677385
  misc_feature (8)..(272): Pfam Name: Polyprenyl synthetase Pfam Description: Polyprenyl synthetase
  misc_feature (1)..(321): Homolog of NCBI NO: 20260214 NR Description: putative trans-prenyltransferase [Arabidopsis
  misc_feature (1)..(321): Homolog of NCBI NO: 11322965 NR Description: geranyl diphosphate synthase [Arabidopsis
  misc_feature (1)..(321): Homolog of NCBI NO: 30686146 NR Description: geranyl diphosphate synthase
  misc_feature (1)..(321): Homolog of NCBI NO: 27261729 NR Description: geranylgeranyl diphosphate synthase [Citrus
  misc_feature (1)..(321): Homolog of NCBI NO: 12055493 NR Description: geranyl diphosphat synthase [Quercus robur]
  misc_feature (1)..(321): Homolog of NCBI NO: 11322972 NR Description: geranyl diphosphate synthase [Citrus sinensis]
  misc_feature (89)..(321): Homolog of NCBI NO: 25314274 NR Description: probable trans-prenyltransferase [imported] -
  misc_feature (1)..(321): Homolog of NCBI NO: 9507201 NR Description: trans-prenyltransferase [Mus musculus]
  misc_feature (1)..(321): Homolog of NCBI NO: 7657653 NR Description: trans-prenyltransferase; polyprenyl pyrophosphate
  misc_feature (1)..(321): Homolog of NCBI NO: 29165656 NR Description: Similar to trans-prenyltransferase [Homo sapiens]

SEQ ID NO: 84855 - protein, 288 aa, Arabidopsis thaliana; identical to SEQ ID NO: 40929
  peptide (1)..(288): Ceres Seq. ID no. 12677386
  misc_feature (1)..(239): Pfam Name: Polyprenyl synthetase Pfam Description: Polyprenyl synthetase
  misc_feature (1)..(288): Homolog of NCBI NO: 20260214 NR Description: putative trans-prenyltransferase [Arabidopsis
  misc_feature (1)..(288): Homolog of NCBI NO: 11322965 NR Description: geranyl diphosphate synthase [Arabidopsis
  misc_feature (1)..(288): Homolog of NCBI NO: 30686146 NR Description: geranyl diphosphate synthase
  misc_feature (1)..(288): Homolog of NCBI NO: 27261729 NR Description: geranylgeranyl diphosphate synthase [Citrus
  misc_feature (1)..(288): Homolog of NCBI NO: 12055493 NR Description: geranyl diphosphat synthase [Quercus robur]
  misc_feature (1)..(288): Homolog of NCBI NO: 11322972 NR Description: geranyl diphosphate synthase [Citrus sinensis]
  misc_feature (56)..(288): Homolog of NCBI NO: 25314274 NR Description: probable trans-prenyltransferase [imported] -
  misc_feature (1)..(288): Homolog of NCBI NO: 9507201 NR Description: trans-prenyltransferase [Mus musculus]
  misc_feature (1)..(288): Homolog of NCBI NO: 7657653 NR Description: trans-prenyltransferase; polyprenyl pyrophosphate
  misc_feature (1)..(288): Homolog of NCBI NO: 29165656 NR Description: Similar to trans-prenyltransferase [Homo sapiens]

SEQ ID NO: 84856 - protein, 251 aa, Arabidopsis thaliana
  peptide (1)..(251): Ceres Seq. ID no. 12677387
  misc_feature (1)..(202): Pfam Name: Polyprenyl synthetase Pfam Description: Polyprenyl synthetase
  misc_feature (1)..(251): Homolog of NCBI NO: 20260214 NR Description: putative trans-prenyltransferase [Arabidopsis
  misc_feature (1)..(251): Homolog of NCBI NO: 11322965 NR Description: geranyl diphosphate synthase [Arabidopsis
  misc_feature (1)..(251): Homolog of NCBI NO: 30686146 NR Description: geranyl diphosphate synthase
  misc_feature (1)..(251): Homolog of NCBI NO: 27261729 NR Description: geranylgeranyl diphosphate synthase [Citrus
  misc_feature (1)..(251): Homolog of NCBI NO: 12055493 NR Description: geranyl diphosphat synthase [Quercus robur]
  misc_feature (1)..(251): Homolog of NCBI NO: 11322972 NR Description: geranyl diphosphate synthase [Citrus sinensis]
  misc_feature (19)..(251): Homolog of NCBI NO: 25314274 NR Description: probable trans-prenyltransferase [imported] -
  misc_feature (1)..(251): Homolog of NCBI NO: 9507201 NR Description: trans-prenyltransferase [Mus musculus]
  misc_feature (1)..(251): Homolog of NCBI NO: 7657653 NR Description: trans-prenyltransferase; polyprenyl pyrophosphate
  misc_feature (1)..(251): Homolog of NCBI NO: 29165656 NR Description: Similar to trans-prenyltransferase [Homo sapiens]
MIHVASLLHDDVLDDADTRRGVGSLNVVMGNKMSVLAGDFLLSRACGALAALKNTEVVALLATAVEHLVTGETMEITSSTEQRYSMDYYMQKTYYKTASLISNSCKAVAVLTGQTAEVAVLAFEYGRNLGLAFQLIDDILDFTGTSASLGKGSLSDIRHGVITAPILFAMEEFPQLREVVDQVEKDPRNVDIALEYLGKSKGIQRARELAMEHANLAAAAIGSLPETDNEDVKRSRRALIDLTHRVITRNK

SEQ ID NO: 84857 - DNA, 922 bp, Arabidopsis thaliana
  misc_feature (1)..(922): Ceres Seq. ID no. 12677396
  misc_feature: MA Experiment ID: 108433 Result: Up-regulated in Transcription
  misc_feature: MA Experiment 108433 PARAMETER Experiment Name: At_rhl_Mutant2_cDNA_P Parameter: Age (day) Value: 7
  misc_feature: MA Experiment 108433 PARAMETER Experiment Name: At_rhl_Mutant2_cDNA_P Parameter: Organism Value: A. thaliana
  misc_feature: MA Experiment 108433 PARAMETER Experiment Name: At_rhl_Mutant2_cDNA_P Parameter: Plant Line Value: rhl Mutant vs. wt landsburg
  misc_feature: MA Experiment 108433 PARAMETER Experiment Name: At_rhl_Mutant2_cDNA_P Parameter: Tissue Value: Roots
  misc_feature: MA Experiment ID: 108462 Result: Down-regulated in Transcription
  misc_feature: MA Experiment 108462 PARAMETER Experiment Name: At_Germinating_Seeds_cDNA_P Parameter: Age (day) Value: 2 vs. 0
  misc_feature: MA Experiment 108462 PARAMETER Experiment Name: At_Germinating_Seeds_cDNA_P Parameter: Tissue Value: Germinating Seeds
  misc_feature: MA Experiment ID: 108463 Result: Down-regulated in Transcription
  misc_feature: MA Experiment 108463 PARAMETER Experiment Name: At_Germinating_Seeds_cDNA_P Parameter: Age (day) Value: 3 vs. 0
  misc_feature: MA Experiment 108463 PARAMETER Experiment Name: At_Germinating_Seeds_cDNA_P Parameter: Tissue Value: Germinating Seeds
  misc_feature: MA Experiment ID: 108595 Result: Down-regulated in Transcription
  misc_feature: MA Experiment 108595 PARAMETER Experiment Name: At_Ler-pi_Ovule_cDNA_P Parameter: Plant Line Value: null
  misc_feature: MA Experiment ID: 20000184 Result: Up-regulated in Transcription
  misc_feature: MA Experiment 20000184 PARAMETER Experiment Name: At_Shoots__P Parameter: Age (day) Value: 7
  misc_feature: MA Experiment 20000184 PARAMETER Experiment Name: At_Shoots__P Parameter: Tissue Value: Shoots vs. Whole Plant
  misc_feature: Pfam Name: Thioredoxin Pfam Description: Thioredoxin
aaacattagttacagtcggaatttcgaaaaaccctaattcagctaaagtttgatcgttgatctaaaagctcgagtgatgaagggaaattggtcgatcgtacgaaaggttcttcatcgccagttctccactctccgttcctcgacaccatcgtcgcgattatctacttccatccgaccgcttgttctggccccaaactcgatatcgtcgctaatcgctagaaattcgttgttcactgcctccaacattggtccatccatcgattttaacttctccaacacttcgcttcctcatcggagaagcctctgttcggaagctggaggtgaaaatggtgttgttctagtgaaatcagaggaagagttcatcaatgcaatgagcaaagctcaagatggatctttaccatcggtcttctatttcactgccgcctggtgtggaccatgcaggtttatctctcctgtaatcgtggagcttagtaaacaatatcccgatgtaactacgtataaagtcgacattgatgagggcgggatttcgaacactatcagcaagttgaatatcacggctgtgccaacactgcatttcttcaaaggaggctcgaagaaaggggaggttgtgggtgcagatgtcacgaagctgaagaatctcatggaacagctctacaagtgaagacctaatccgttctagtaaagaacgtgttgaatagctgctagttagctttatactcacaatttgagatcaatctagaaataatgaatgcgctgaatcagtttcgtctttgttcccccttgttgttcaggattgtaattgcccttttgttttgtttgttttctccatttcctttgggcttagtttccggaaatttgtttgtgtccgtcggtgacaacttcaaaaaatatcgacaagtcataactttttatcaaaattttg

SEQ ID NO: 84858 - protein, 194 aa, Arabidopsis thaliana
  peptide (1)..(194): Ceres Seq. ID no. 12677397
  misc_feature: Pfam Name: Thioredoxin Pfam Description: Thioredoxin
  misc_feature (1)..(194): Homolog of NCBI NO: 15226875 NR Description: thioredoxin, putative; protein id: At2g35010.1
  misc_feature (46)..(194): Homolog of NCBI NO: 18397764 NR Description: expressed protein; protein id: At1g31020.1, by cDNA: gi_15081458, supported by cDNA: gi_15215811, supported cDNA: gi_20147404 [Arabidopsis thaliana]
  misc_feature (46)..(194): Homolog of NCBI NO: 9755396 NR Description: F17F8.6 [Arabidopsis thaliana]
  misc_feature (99)..(194): Homolog of NCBI NO: 26453152 NR Description: putative thioredoxin [Arabidopsis thaliana]
  misc_feature (80)..(191): Homolog of NCBI NO: 27763683 NR Description: thioredoxin o [Chlamydomonas reinhardtii]
  misc_feature (83)..(187): Homolog of NCBI NO: 3915131 NR Description: Thioredoxin H-type (TRX-H) (Phloem sap 13 kDa
MKGNWSIVRKVLHRQFSTLRSSTPSSRLSTSIRPLVLAPNSISSLIARNSLFTASNIGPSIDFNFSNTSLPHRRSLCSEAGGENGVVLVKSEEEFINAMSKAQDGSLPSVFYFTAAWCGPCRFISPVIVELSKQYPDVTTYKVDIDEGGISNTISKLNITAVPTLHFFKGGSKKGEVVGADVTKLKNLMEQLYK

SEQ ID NO: 84859 - DNA, 1306 bp, Arabidopsis thaliana
  misc_feature (1)..(1306): Ceres Seq. ID no. 12677468
  misc_feature: MA Experiment ID: 20000090 Result: Up-regulated in Transcription
  misc_feature: MA Experiment ID: 20000111 Result: Down-regulated in Transcription
  misc_feature: MA Experiment 20000111 PARAMETER Experiment Name: At_42deg_Heat_cDNA_P Parameter: Temperature (deg C) Value: 42 vs. 22
  misc_feature: MA Experiment 20000111 PARAMETER Experiment Name: At_42deg_Heat_cDNA_P Parameter: Timepoint (hr) Value: 6
  misc_feature: MA Experiment 20000111 PARAMETER Experiment Name: At_42deg_Heat_cDNA_P Parameter: Tissue Value: Aerial
  misc_feature: MA Experiment ID: 20000113 Result: Down-regulated in Transcription
  misc_feature: MA Experiment 20000113 PARAMETER Experiment Name: At_42deg_Heat_cDNA_P Parameter: Temperature (deg C) Value: 42 vs. 22
  misc_feature: MA Experiment 20000113 PARAMETER Experiment Name: At_42deg_Heat_cDNA_P Parameter: Timepoint (hr) Value: 8
  misc_feature: MA Experiment 20000113 PARAMETER Experiment Name: At_42deg_Heat_cDNA_P Parameter: Tissue Value: Aerial
  misc_feature: MA Experiment ID: 20000184 Result: Down-regulated in Transcription
  misc_feature: MA Experiment 20000184 PARAMETER Experiment Name: At_Shoots__P Parameter: Age (day) Value: 7
  misc_feature: MA Experiment 20000184 PARAMETER Experiment Name: At_Shoots__P Parameter: Tissue Value: Shoots vs. Whole Plant
  misc_feature: MA Experiment ID: 20000227 Result: Down-regulated in Transcription
  misc_feature: MA Experiment 20000227 PARAMETER Experiment Name: At_Root-Tips-vs-Tops_P Parameter: Tissue Value: Root Tips vs. Root Tops
  misc_feature: MA Experiment ID: 20001248 Result: Up-regulated in Transcription
  misc_feature: MA Experiment 20001248 PARAMETER Experiment Name: At_Far-red-induction_P Parameter: Age (day) Value: 7
  misc_feature: MA Experiment 20001248 PARAMETER Experiment Name: At_Far-red-induction_P Parameter: Light Value: Far-red vs. White
  misc_feature: MA Experiment 20001248 PARAMETER Experiment Name: At_Far-red-induction_P Parameter: Organism Value: A. thaliana
  misc_feature: MA Experiment 20001248 PARAMETER Experiment Name: At_Far-red-induction_P Parameter: Plant Line Value: Columbia
  misc_feature: MA Experiment 20001248 PARAMETER Experiment Name: At_Far-red-induction_P Parameter: Timepoint (hr) Value: 4
  misc_feature: MA Experiment 20001248 PARAMETER Experiment Name: At_Far-red-induction_P Parameter: Tissue Value: Whole Plant
  misc_feature: MA Experiment ID: 20001554 Result: Down-regulated in Transcription
  misc_feature: MA Experiment 20001554 PARAMETER Experiment Name: At_Drought_Soil_Dry_P Parameter: Age (day) Value: 21
  misc_feature: MA Experiment 20001554 PARAMETER Experiment Name: At_Drought_Soil_Dry_P Parameter: Organism Value: A. thaliana
  misc_feature: MA Experiment 20001554 PARAMETER Experiment Name: At_Drought_Soil_Dry_P Parameter: Plant Line Value: WS
  misc_feature: MA Experiment 20001554 PARAMETER Experiment Name: At_Drought_Soil_Dry_P Parameter: Post Timepoint (hr) Value: None
  misc_feature: MA Experiment 20001554 PARAMETER Experiment Name: At_Drought_Soil_Dry_P Parameter: Post-Treatment Value: None
  misc_feature: MA Experiment 20001554 PARAMETER Experiment Name: At_Drought_Soil_Dry_P Parameter: Timepoint (day) Value: 7
  misc_feature: MA Experiment 20001554 PARAMETER Experiment Name: At_Drought_Soil_Dry_P Parameter: Treatment Value: Drought vs. No Drought
  misc_feature: MA Experiment ID: 20001556 Result: Down-regulated in Transcription
  misc_feature: MA Experiment 20001556 PARAMETER Experiment Name: At_Drought_Soil_Dry_P Parameter: Age (day) Value: 26
  misc_feature: MA Experiment 20001556 PARAMETER Experiment Name: At_Drought_Soil_Dry_P Parameter: Organism Value: A. thaliana
  misc_feature: MA Experiment 20001556 PARAMETER Experiment Name: At_Drought_Soil_Dry_P Parameter: Plant Line Value: WS
  misc_feature: MA Experiment 20001556 PARAMETER Experiment Name: At_Drought_Soil_Dry_P Parameter: Post Timepoint (hr) Value: None
  misc_feature: MA Experiment 20001556 PARAMETER Experiment Name: At_Drought_Soil_Dry_P Parameter: Post-Treatment Value: None
  misc_feature: MA Experiment 20001556 PARAMETER Experiment Name: At_Drought_Soil_Dry_P Parameter: Timepoint (day) Value: 12
  misc_feature: MA Experiment 20001556 PARAMETER Experiment Name: At_Drought_Soil_Dry_P Parameter: Treatment Value: Drought vs. No Drought
  misc_feature: MA Experiment ID: 20001559 Result: Down-regulated in Transcription
  misc_feature: MA Experiment 20001559 PARAMETER Experiment Name: At_Drought_Soil_Dry_P Parameter: Age (day) Value: 28
  misc_feature: MA Experiment 20001559 PARAMETER Experiment Name: At_Drought_Soil_Dry_P Parameter: Organism Value: A. thaliana
  misc_feature: MA Experiment 20001559 PARAMETER Experiment Name: At_Drought_Soil_Dry_P Parameter: Plant Line Value: WS
  misc_feature: MA Experiment 20001559 PARAMETER Experiment Name: At_Drought_Soil_Dry_P Parameter: Post Timepoint (hr) Value: 29
  misc_feature: MA Experiment 20001559 PARAMETER Experiment Name: At_Drought_Soil_Dry_P Parameter: Post-Treatment Value: Re-Water vs. No Drought
  misc_feature: MA Experiment 20001559 PARAMETER Experiment Name: At_Drought_Soil_Dry_P Parameter: Timepoint (day) Value: 14
  misc_feature: MA Experiment 20001559 PARAMETER Experiment Name: At_Drought_Soil_Dry_P Parameter: Treatment Value: Drought vs. No Drought
  misc_feature: MA Experiment ID: 20001560 Result: Down-regulated in Transcription
  misc_feature: MA Experiment 20001560 PARAMETER Experiment Name: At_Drought_Soil_Dry_P Parameter: Age (day) Value: 28
  misc_feature: MA Experiment 20001560 PARAMETER Experiment Name: At_Drought_Soil_Dry_P Parameter: Organism Value: A. thaliana
  misc_feature: MA Experiment 20001560 PARAMETER Experiment Name: At_Drought_Soil_Dry_P Parameter: Plant Line Value: WS
  misc_feature: MA Experiment 20001560 PARAMETER Experiment Name: At_Drought_Soil_Dry_P Parameter: Post Timepoint (hr) Value: None
  misc_feature: MA Experiment 20001560 PARAMETER Experiment Name: At_Drought_Soil_Dry_P Parameter: Post-Treatment Value: None
  misc_feature: MA Experiment 20001560 PARAMETER Experiment Name: At_Drought_Soil_Dry_P Parameter: Timepoint (day) Value: 14
  misc_feature: MA Experiment 20001560 PARAMETER Experiment Name: At_Drought_Soil_Dry_P Parameter: Treatment Value: Drought vs. No Drought
  misc_feature: MA Experiment ID: 20001904 Result: Down-regulated in Transcription
  misc_feature: MA Experiment 20001904 PARAMETER Experiment Name: At_Drought_Reproduction_P Parameter: Age (day) Value: 37
  misc_feature: MA Experiment 20001904 PARAMETER Experiment Name: At_Drought_Reproduction_P Parameter: Organism Value: A. thaliana
  misc_feature: MA Experiment 20001904 PARAMETER Experiment Name: At_Drought_Reproduction_P Parameter: Plant Line Value: WS
  misc_feature: MA Experiment 20001904 PARAMETER Experiment Name: At_Drought_Reproduction_P Parameter: Timepoint (day) Value: 7
  misc_feature: MA Experiment 20001904 PARAMETER Experiment Name: At_Drought_Reproduction_P Parameter: Tissue Value: Rosettes
  misc_feature: MA Experiment 20001904 PARAMETER Experiment Name: At_Drought_Reproduction_P Parameter: Treatment Value: Drought vs. No Drought
aagtttctttatcttttagtttcccggtaaaaaatctctctgtcatgtcttatgttcttccacgtcgttcctaatctcccaagacagaatctctaaacttcattttgctccttttccacacaaaactttctctccctccaaagaccacaaaaaatgttcttccttccttcaacttcaagtatctctctttattcacacgtatagcatccaaaaccaaaaatctataaccttttcctctgtaaagtttcttcctttctaaccttcccgagaaaaaaacaaaccctttctgttagaaaaccatgagaggtctcgcggcttgttacagtgaacacgccattaaagtatcagatacatattgttcaggtccatcgaatcattcctatatatctccgacattacctccttcaatccccgacacagtaaccaccacttatagatccaatctcccatcttccgacaaacccgtctctgtttcactcacctggtcggataatctcaccgtcgtcatctcaacgccgccgaaatcatactctgtttcactcagaaaacctaaaggatcaagaaagttgacttcttcctccggttcactcaacgccgagatcctctgggatctatcggaagcagagtacgaaaacaacggacctgaaccaataagaagattcttcgtcgtcgtcgttgtaaattccgagattaccctcggagtcggcgacgttgaccacgagcgagacacgtcatcatcgtcgtcgtggcgagtctcaaaaacggagagattctctggaacttgttggctcacgacgaaagctcaattctccgacgtcggaaggaaacacgagatacagattcaatgcggcggaggaggaggaggaggaggagaggaagggtatttatggaaagtgaaaagtcctgaaacgatgtcggtttatgttgataagaggaaagtgttttcggtgaagaagcttaagtggaactttagagggaatcaaaccatgtttttcgatggaatgcttatagacatgatgtgggatttacacgactggttctacaaagaaacgttgtcgtctgtttcgactagttcatcgtctaaaacggcgtcgtcgtcatcgtcttcttcaacttcatcgtctactcctccgtgtgctgtgtttatgtttaggaggaggagtggtttggatagtagattatggattgatgaagatgaacaagagagtgagatgaagaagaatattggttctagagatgagaaacattcgttttcacttatcatttgtgcctctaaaaagtgaccaaataaacaaataaacatttt

SEQ ID NO: 84860 - protein, 327 aa, Arabidopsis thaliana; identical to SEQ ID NO: 78632
  peptide (1)..(327): Ceres Seq. ID no. 12677469
  misc_feature (34)..(327): Pfam Name: Plant protein of unknown function (DUF868) Pfam Description: Plant protein of unknown function (DUF868)
  misc_feature (1)..(327): Homolog of NCBI NO: 18404143 NR Description: expressed protein; protein id: At2g36470.1, by cDNA: 109103. [Arabidopsis thaliana] >gi|25408477|pir||B84781
  misc_feature (1)..(327): Homolog of NCBI NO: 21536715 NR Description: unknown [Arabidopsis thaliana]
  misc_feature (12)..(248): Homolog of NCBI NO: 15226242 NR Description: hypothetical protein; protein id: At2g27770.1
  misc_feature (12)..(248): Homolog of NCBI NO: 21805715 NR Description: hypothetical protein [Arabidopsis thaliana]
  misc_feature (1)..(248): Homolog of NCBI NO: 34394221 NR Description: unknown protein [Oryza sativa (japonica
  misc_feature (1)..(254): Homolog of NCBI NO: 30102999 NR Description: hypothetical protein [Oryza sativa (japonica
  misc_feature (1)..(275): Homolog of NCBI NO: 15241702 NR Description: putative protein; protein id: At5g28150.1, by cDNA: gi_19699076 [Arabidopsis thaliana] AT5g28150/T24G3_80 [Arabidopsis thaliana]
  misc_feature (1)..(248): Homolog of NCBI NO: 21593854 NR Description: unknown [Arabidopsis thaliana]
  misc_feature (1)..(248): Homolog of NCBI NO: 18397034 NR Description: expressed protein; protein id: At3g04860.1, by cDNA: 5170., supported by cDNA: gi_16612260 [Arabidopsis
  misc_feature (86)..(248): Homolog of NCBI NO: 14719318 NR Description: hypothetical protein [Oryza sativa]

SEQ ID NO: 84861 - DNA, 1534 bp, Arabidopsis thaliana
  misc_feature (1)..(1534): Ceres Seq. ID no. 12677489
  misc_feature: MA Experiment ID: 20000173 Result: Down-regulated in Transcription
  misc_feature: MA Experiment 20000173 PARAMETER Experiment Name: At_42deg_Heat_P Parameter: Age (day) Value: 14
  misc_feature: MA Experiment 20000173 PARAMETER Experiment Name: At_42deg_Heat_P Parameter: Organism Value: A. thaliana
  misc_feature: MA Experiment 20000173 PARAMETER Experiment Name: At_42deg_Heat_P Parameter: Plant Line Value: WS
  misc_feature: MA Experiment 20000173 PARAMETER Experiment Name: At_42deg_Heat_P Parameter: Temperature (deg C) Value: 42 vs. 22
  misc_feature: MA Experiment 20000173 PARAMETER Experiment Name: At_42deg_Heat_P Parameter: Timepoint (hr) Value: 6
  misc_feature: MA Experiment 20000173 PARAMETER Experiment Name: At_42deg_Heat_P Parameter: Tissue Value: Aerial
  misc_feature: MA Experiment ID: 20001451 Result: Down-regulated in Transcription
  misc_feature: MA Experiment 20001451 PARAMETER Experiment Name: At_Far-red-induction_P Parameter: Age (day) Value: 7
  misc_feature: MA Experiment 20001451 PARAMETER Experiment Name: At_Far-red-induction_P Parameter: Light Value: Far-red vs. White
  misc_feature: MA Experiment 20001451 PARAMETER Experiment Name: At_Far-red-induction_P Parameter: Organism Value: A. thaliana
  misc_feature: MA Experiment 20001451 PARAMETER Experiment Name: At_Far-red-induction_P Parameter: Plant Line Value: Columbia
  misc_feature: MA Experiment 20001451 PARAMETER Experiment Name: At_Far-red-induction_P Parameter: Timepoint (hr) Value: 24
  misc_feature: MA Experiment 20001451 PARAMETER Experiment Name: At_Far-red-induction_P Parameter: Tissue Value: Whole Plant
  misc_feature: MA Experiment ID: 20001560 Result: Down-regulated in Transcription
  misc_feature: MA Experiment 20001560 PARAMETER Experiment Name: At_Drought_Soil_Dry_P Parameter: Age (day) Value: 28
  misc_feature: MA Experiment 20001560 PARAMETER Experiment Name: At_Drought_Soil_Dry_P Parameter: Organism Value: A. thaliana
  misc_feature: MA Experiment 20001560 PARAMETER Experiment Name: At_Drought_Soil_Dry_P Parameter: Plant Line Value: WS
  misc_feature: MA Experiment 20001560 PARAMETER Experiment Name: At_Drought_Soil_Dry_P Parameter: Post Timepoint (hr) Value: None
  misc_feature: MA Experiment 20001560 PARAMETER Experiment Name: At_Drought_Soil_Dry_P Parameter: Post-Treatment Value: None
  misc_feature: MA Experiment 20001560 PARAMETER Experiment Name: At_Drought_Soil_Dry_P Parameter: Timepoint (day) Value: 14
  misc_feature: MA Experiment 20001560 PARAMETER Experiment Name: At_Drought_Soil_Dry_P Parameter: Treatment Value: Drought vs. No Drought
aatttctcatatcgcgccatcggaactgtgctaaattacacgttccgacacataattaatgtaggattctttcttctgctttcctcagtttcgtccgaaagaggcaaaattcaaatcgaattctcgaagaagctcatctgcattaagtttgaaagatctcttcggaagaagtaataatgtctctgacatgcgtaaatatgtcggaggatgtctggttgacttgcctcactcacgcattatccaccgagaccgaagaaatcatgggtctccttctcggcgacatcgagtactcaaagaacggcgaaagtgccacagctatgatctggggagcatcgcctcagccacgatctgatcggcagaaggatcgagttgaaaccaatcctgaacaattggctgctgcttctgctcaggctgatataatgacgatatcaacgggcagaactacacgggtcattggatggtaccactcccatcctcatattaccgttcttccttcccatgtcgatgttcggacacaagctatgtatcagcttttagattctggttttattggcctcatattttcctgttttagtgaagatgctaacaaggttggtagaatccaagttatcgctttccagtcttctgatggaaagccgaatagtattcctaaatcaatgagcctggttcttgctaataaagattctgtcatcgatatagaatcttcatctagttcttcggactcgatataccagcgatcctcttcttctaagcccgagctagacacaattgatactgctacaacttccggatctaagggtggaggacgggtttcagattttgggcctttctttacaaacaatattgaggccaatatcaccggcagagatgaaactcacaaatcaggcaatctcagcagcacaactataggaattgactcgatggacatgtctgaaagtatgcaagaggcaatgctccgttcaaatttagataccagtggtgcggggtatgttagaaaagaagtcccacttcatgttttgccaacttcatcccttcttccagtcaattcacctttagcatcttttaaaagcctgcaacgagtactgtacgaggaggaacgagcagcgtactaccaatcagtgcagcaaaacatgagagatgggcgagttcatcctcttgctttcattcacaacacatcaacatatcaagcctccatgtgcaagttgatcgaatactgcttgagtcctgccattaacgcacttcaagataggcagaaggagaacaagatccggttagcaatgctgatggatgaagctgaggttttggaggcacaaaaacttaaaggagcagagacaagccggagaccatctcatctggttcacggttctggcagccgaagcagaagaggatcgtagaaagacctgcaactaaagacacatgcccgtcttctttgtgtatatttctatttggacatttgttttcttacattgtattattttgaccagactccatcgctttgttgttgtttagaatctgatccacttttggaagaacc

SEQ ID NO: 84862 - protein, 405 aa, Arabidopsis thaliana
  peptide (1)..(405): Ceres Seq. ID no. 12677490
  misc_feature (1)..(123): Pfam Name: Mov34/MPN/PAD-1 family Pfam Description: Mov34/MPN/PAD-1 family
  misc_feature (1)..(405): Homolog of NCBI NO: 19715647 NR Description: AT3g06820/F3E22_4 [Arabidopsis thaliana]
  misc_feature (8)..(405): Homolog of NCBI NO: 30680023 NR Description: expressed protein [Arabidopsis thaliana]
  misc_feature (8)..(319): Homolog of NCBI NO: 7549631 NR Description: unknown protein [Arabidopsis thaliana]
  misc_feature (348)..(405): Homolog of NCBI NO: 7549631 NR Description: unknown protein [Arabidopsis thaliana]
  misc_feature (1)..(405): Homolog of NCBI NO: 20147355 NR Description: At1g80210/F18B13_28 [Arabidopsis thaliana]
  misc_feature (111)..(318): Homolog of NCBI NO: 15220090 NR Description: hypothetical protein; protein id: At1g80210.1
  misc_feature (348)..(405): Homolog of NCBI NO: 15220090 NR Description: hypothetical protein; protein id: At1g80210.1
  misc_feature (8)..(64): Homolog of NCBI NO: 15220090 NR Description: hypothetical protein; protein id: At1g80210.1
  misc_feature (111)..(318): Homolog of NCBI NO: 25406643 NR Description: hypothetical protein F18B13.28 [imported] - thaliana >gi|5902374|gb|AAD55476.1|AC009322_16 Hypothetical
  misc_feature (348)..(405): Homolog of NCBI NO: 25406643 NR Description: hypothetical protein F18B13.28 [imported] - thaliana >gi|5902374|gb|AAD55476.1|AC009322_16 Hypothetical
MSLTCVNMSEDVWLTCLTHALSTETEEIMGLLLGDIEYSKNGESATAMIWGASPQPRSDRQKDRVETNPEQLAAASAQADIMTISTGRTTRVIGWYHSHPHITVLPSHVDVRTQAMYQLLDSGFIGLIFSCFSEDANKVGRIQVIAFQSSDGKPNSIPKSMSLVLANKDSVIDIESSSSSSDSIYQRSSSSKPELDTIDTATTSGSKGGGRVSDFGPFFTNNIEANITGRDETHKSGNLSSTTIGIDSMDMSESMQEAMLRSNLDTSGAGYVRKEVPLHVLPTSSLLPVNSPLASFKSLQRVLYEEERAAYYQSVQQNMRDGRVHPLAFIHNTSTYQASMCKLIEYCLSPAINALQDRQKENKIRLAMLMDEAEVLEAQKLKGAETSRRPSHLVHGSGSRSRRGS

SEQ ID NO: 84863 - protein, 398 aa, Arabidopsis thaliana
  peptide (1)..(398): Ceres Seq. ID no. 12677491
  misc_feature (1)..(116): Pfam Name: Mov34/MPN/PAD-1 family Pfam Description: Mov34/MPN/PAD-1 family
  misc_feature (1)..(398): Homolog of NCBI NO: 19715647 NR Description: AT3g06820/F3E22_4 [Arabidopsis thaliana]
  misc_feature (1)..(398): Homolog of NCBI NO: 30680023 NR Description: expressed protein [Arabidopsis thaliana]
  misc_feature (1)..(312): Homolog of NCBI NO: 7549631 NR Description: unknown protein [Arabidopsis thaliana]
  misc_feature (341)..(398): Homolog of NCBI NO: 7549631 NR Description: unknown protein [Arabidopsis thaliana]
  misc_feature (1)..(398): Homolog of NCBI NO: 20147355 NR Description: At1g80210/F18B13_28 [Arabidopsis thaliana]
  misc_feature (104)..(311): Homolog of NCBI NO: 15220090 NR Description: hypothetical protein; protein id: At1g80210.1
  misc_feature (341)..(398): Homolog of NCBI NO: 15220090 NR Description: hypothetical protein; protein id: At1g80210.1
  misc_feature (1)..(57): Homolog of NCBI NO: 15220090 NR Description: hypothetical protein; protein id: At1g80210.1
  misc_feature (104)..(311): Homolog of NCBI NO: 25406643 NR Description: hypothetical protein F18B13.28 [imported] - thaliana >gi|5902374|gb|AAD55476.1|AC009322_16 Hypothetical
  misc_feature (341)..(398): Homolog of NCBI NO: 25406643 NR Description: hypothetical protein F18B13.28 [imported] - thaliana >gi|5902374|gb|AAD55476.1|AC009322_16 Hypothetical
MSEDVWLTCLTHALSTETEEIMGLLLGDIEYSKNGESATAMIWGASPQPRSDRQKDRVETNPEQLAAASAQADIMTISTGRTTRVIGWYHSHPHITVLPSHVDVRTQAMYQLLDSGFIGLIFSCFSEDANKVGRIQVIAFQSSDGKPNSIPKSMSLVLANKDSVIDIESSSSSSDSIYQRSSSSKPELDTIDTATTSGSKGGGRVSDFGPFFTNNIEANITGRDETHKSGNLSSTTIGIDSMDMSESMQEAMLRSNLDTSGAGYVRKEVPLHVLPTSSLLPVNSPLASFKSLQRVLYEEERAAYYQSVQQNMRDGRVHPLAFIHNTSTYQASMCKLIEYCLSPAINALQDRQKENKIRLAMLMDEAEVLEAQKLKGAETSRRPSHLVHGSGSRSRRGS

SEQ ID NO: 84864 - protein, 377 aa, Arabidopsis thaliana
  peptide (1)..(377): Ceres Seq. ID no. 12677492
  misc_feature (1)..(95): Pfam Name: Mov34/MPN/PAD-1 family Pfam Description: Mov34/MPN/PAD-1 family
  misc_feature (1)..(377): Homolog of NCBI NO: 19715647 NR Description: AT3g06820/F3E22_4 [Arabidopsis thaliana]
  misc_feature (1)..(377): Homolog of NCBI NO: 30680023 NR Description: expressed protein [Arabidopsis thaliana]
  misc_feature (1)..(291): Homolog of NCBI NO: 7549631 NR Description: unknown protein [Arabidopsis thaliana]
  misc_feature (320)..(377): Homolog of NCBI NO: 7549631 NR Description: unknown protein [Arabidopsis thaliana]
  misc_feature (1)..(377): Homolog of NCBI NO: 20147355 NR Description: At1g80210/F18B13_28 [Arabidopsis thaliana]
  misc_feature (83)..(290): Homolog of NCBI NO: 15220090 NR Description: hypothetical protein; protein id: At1g80210.1
  misc_feature (320)..(377): Homolog of NCBI NO: 15220090 NR Description: hypothetical protein; protein id: At1g80210.1
  misc_feature (1)..(36): Homolog of NCBI NO: 15220090 NR Description: hypothetical protein; protein id: At1g80210.1
  misc_feature (83)..(290): Homolog of NCBI NO: 25406643 NR Description: hypothetical protein F18B13.28 [imported] - thaliana >gi|5902374|gb|AAD55476.1|AC009322_16 Hypothetical
  misc_feature (320)..(377): Homolog of NCBI NO: 25406643 NR Description: hypothetical protein F18B13.28 [imported] - thaliana >gi|5902374|gb|AAD55476.1|AC009322_16 Hypothetical
MGLLLGDIEYSKNGESATAMIWGASPQPRSDRQKDRVETNPEQLAAASAQADIMTISTGRTTRVIGWYHSHPHITVLPSHVDVRTQAMYQLLDSGFIGLIFSCFSEDANKVGRIQVIAFQSSDGKPNSIPKSMSLVLANKDSVIDIESSSSSSDSIYQRSSSSKPELDTIDTATTSGSKGGGRVSDFGPFFTNNIEANITGRDETHKSGNLSSTTIGIDSMDMSESMQEAMLRSNLDTSGAGYVRKEVPLHVLPTSSLLPVNSPLASFKSLQRVLYEEERAAYYQSVQQNMRDGRVHPLAFIHNTSTYQASMCKLIEYCLSPAINALQDRQKENKIRLAMLMDEAEVLEAQKLKGAETSRRPSHLVHGSGSRSRRGS

SEQ ID NO: 84865 - DNA, 1071 bp, Arabidopsis thaliana
  misc_feature (1)..(1071): Ceres Seq. ID no. 12677517
  misc_feature: MA Experiment ID: 108463 Result: Down-regulated in Transcription
  misc_feature: MA Experiment 108463 PARAMETER Experiment Name: At_Germinating_Seeds_cDNA_P Parameter: Age (day) Value: 3 vs. 0
  misc_feature: MA Experiment 108463 PARAMETER Experiment Name: At_Germinating_Seeds_cDNA_P Parameter: Tissue Value: Germinating Seeds
  misc_feature: MA Experiment ID: 108488 Result: Down-regulated in Transcription
  misc_feature: MA Experiment ID: 108576 Result: Up-regulated in Transcription
  misc_feature: MA Experiment 108576 PARAMETER Experiment Name: At_42deg_Heat_cDNA_P Parameter: Temperature (deg C) Value: 42 vs. 22
  misc_feature: MA Experiment 108576 PARAMETER Experiment Name: At_42deg_Heat_cDNA_P Parameter: Timepoint (hr) Value: 1
  misc_feature: MA Experiment 108576 PARAMETER Experiment Name: At_42deg_Heat_cDNA_P Parameter: Tissue Value: Aerial
  misc_feature: MA Experiment ID: 20000093 Result: Up-regulated in Transcription
  misc_feature: MA Experiment 20000093 PARAMETER Experiment Name: At_42deg_Heat_cDNA_P Parameter: Temperature (deg C) Value: 42 vs. 22
  misc_feature: MA Experiment 20000093 PARAMETER Experiment Name: At_42deg_Heat_cDNA_P Parameter: Timepoint (hr) Value: 0.5
  misc_feature: MA Experiment 20000093 PARAMETER Experiment Name: At_42deg_Heat_cDNA_P Parameter: Tissue Value: Aerial
  misc_feature: MA Experiment ID: 20000113 Result: Up-regulated in Transcription
  misc_feature: MA Experiment 20000113 PARAMETER Experiment Name: At_42deg_Heat_cDNA_P Parameter: Temperature (deg C) Value: 42 vs. 22
  misc_feature: MA Experiment 20000113 PARAMETER Experiment Name: At_42deg_Heat_cDNA_P Parameter: Timepoint (hr) Value: 8
  misc_feature: MA Experiment 20000113 PARAMETER Experiment Name: At_42deg_Heat_cDNA_P Parameter: Tissue Value: Aerial
  misc_feature: MA Experiment ID: 20000144 Result: Up-regulated in Transcription
  misc_feature: MA Experiment 20000144 PARAMETER Experiment Name: At_42deg_Heat_cDNA_P Parameter: Temperature (deg C) Value: 42 vs. 22
  misc_feature: MA Experiment 20000144 PARAMETER Experiment Name: At_42deg_Heat_cDNA_P Parameter: Timepoint (hr) Value: 1
  misc_feature: MA Experiment 20000144 PARAMETER Experiment Name: At_42deg_Heat_cDNA_P Parameter: Tissue Value: Aerial
  misc_feature: MA Experiment ID: 20000171 Result: Up-regulated in Transcription
  misc_feature: MA Experiment 20000171 PARAMETER Experiment Name: At_42deg_Heat_P Parameter: Age (day) Value: 14
  misc_feature: MA Experiment 20000171 PARAMETER Experiment Name: At_42deg_Heat_P Parameter: Organism Value: A. thaliana
  misc_feature: MA Experiment 20000171 PARAMETER Experiment Name: At_42deg_Heat_P Parameter: Plant Line Value: WS
  misc_feature: MA Experiment 20000171 PARAMETER Experiment Name: At_42deg_Heat_P Parameter: Temperature (deg C) Value: 42 vs. 22
  misc_feature: MA Experiment 20000171 PARAMETER Experiment Name: At_42deg_Heat_P Parameter: Timepoint (hr) Value: 1
  misc_feature: MA Experiment 20000171 PARAMETER Experiment Name: At_42deg_Heat_P Parameter: Tissue Value: Aerial
  misc_feature: MA Experiment ID: 20000173 Result: Up-regulated in Transcription
  misc_feature: MA Experiment 20000173 PARAMETER Experiment Name: At_42deg_Heat_P Parameter: Age (day) Value: 14
  misc_feature: MA Experiment 20000173 PARAMETER Experiment Name: At_42deg_Heat_P Parameter: Organism Value: A. thaliana
  misc_feature: MA Experiment 20000173 PARAMETER Experiment Name: At_42deg_Heat_P Parameter: Plant Line Value: WS
  misc_feature: MA Experiment 20000173 PARAMETER Experiment Name: At_42deg_Heat_P Parameter: Temperature (deg C) Value: 42 vs. 22
  misc_feature: MA Experiment 20000173 PARAMETER Experiment Name: At_42deg_Heat_P Parameter: Timepoint (hr) Value: 6
  misc_feature: MA Experiment 20000173 PARAMETER Experiment Name: At_42deg_Heat_P Parameter: Tissue Value: Aerial
  misc_feature: MA Experiment ID: 20000180 Result: Down-regulated in Transcription
  misc_feature: MA Experiment 20000180 PARAMETER Experiment Name: At_Germinating_Seeds_P Parameter: Age (hr) Value: 24 vs. 0
  misc_feature: MA Experiment 20000180 PARAMETER Experiment Name: At_Germinating_Seeds_P Parameter: Tissue Value: Germinating Seeds
  misc_feature: MA Experiment ID: 20000182 Result: Up-regulated in Transcription
  misc_feature: MA Experiment 20000182 PARAMETER Experiment Name: At_2mM_SA_P Parameter: Age (day) Value: 14
  misc_feature: MA Experiment 20000182 PARAMETER Experiment Name: At_2mM_SA_P Parameter: Organism Value: A. thaliana
  misc_feature: MA Experiment 20000182 PARAMETER Experiment Name: At_2mM_SA_P Parameter: Plant Line Value: WS
  misc_feature: MA Experiment 20000182 PARAMETER Experiment Name: At_2mM_SA_P Parameter: Timepoint (hr) Value: 6
  misc_feature: MA Experiment 20000182 PARAMETER Experiment Name: At_2mM_SA_P Parameter: Tissue Value: Aerial
  misc_feature: MA Experiment 20000182 PARAMETER Experiment Name: At_2mM_SA_P Parameter: Treatment Value: 2mM SA vs. No Treatment
  misc_feature: MA Experiment ID: 20000185 Result: Up-regulated in Transcription
  misc_feature: MA Experiment 20000185 PARAMETER Experiment Name: At_Roots__P Parameter: Age (day) Value: 7 vs. 21
  misc_feature: MA Experiment 20000185 PARAMETER Experiment Name: At_Roots__P Parameter: Organism Value: A. thaliana
  misc_feature: MA Experiment 20000185 PARAMETER Experiment Name: At_Roots__P Parameter: Tissue Value: Roots vs. Whole Plant
  misc_feature: MA Experiment ID: 20000437 Result: Up-regulated in Transcription
  misc_feature: MA Experiment 20000437 PARAMETER Experiment Name: At_Drought_P Parameter: Age (day) Value: 8
  misc_feature: MA Experiment 20000437 PARAMETER Experiment Name: At_Drought_P Parameter: Organism Value: A. thaliana
  misc_feature: MA Experiment 20000437 PARAMETER Experiment Name: At_Drought_P Parameter: Plant Line Value: WS
  misc_feature: MA Experiment 20000437 PARAMETER Experiment Name: At_Drought_P Parameter: Timepoint (hr) Value: 24
  misc_feature: MA Experiment 20000437 PARAMETER Experiment Name: At_Drought_P Parameter: Tissue Value: Whole Plant
  misc_feature: MA Experiment 20000437 PARAMETER Experiment Name: At_Drought_P Parameter: Treatment Value: Drought vs. No Drought
  misc_feature: MA Experiment ID: 20000495 Result: Down-regulated in Transcription
  misc_feature: MA Experiment 20000495 PARAMETER Experiment Name: At_Guard_Cells_P Parameter: Harvest Date Value: 8/2/2002
  misc_feature: MA Experiment 20000495 PARAMETER Experiment Name: At_Guard_Cells_P Parameter: Organism Value: A. thaliana
  misc_feature: MA Experiment 20000495 PARAMETER Experiment Name: At_Guard_Cells_P Parameter: Tissue Value: Guard Cells vs. Leaves
  misc_feature: MA Experiment ID: 20000794 Result: Up-regulated in Transcription
  misc_feature: MA Experiment 20000794 PARAMETER Experiment Name: At_Petals_P Parameter: Age (day) Value: 23-25 days
  misc_feature: MA Experiment 20000794 PARAMETER Experiment Name: At_Petals_P Parameter: Plant Line Value: WS
  misc_feature: MA Experiment 20000794 PARAMETER Experiment Name: At_Petals_P Parameter: Tissue Value: Petals vs. Whole plant
  misc_feature: MA Experiment ID: 20001247 Result: Down-regulated in Transcription
  misc_feature: MA Experiment 20001247 PARAMETER Experiment Name: At_Far-red-induction_P Parameter: Age (day) Value: 7
  misc_feature: MA Experiment 20001247 PARAMETER Experiment Name: At_Far-red-induction_P Parameter: Light Value: Far-red vs. White
  misc_feature: MA Experiment 20001247 PARAMETER Experiment Name: At_Far-red-induction_P Parameter: Organism Value: A. thaliana
  misc_feature: MA Experiment 20001247 PARAMETER Experiment Name: At_Far-red-induction_P Parameter: Plant Line Value: Columbia
  misc_feature: MA Experiment 20001247 PARAMETER Experiment Name: At_Far-red-induction_P Parameter: Timepoint (hr) Value: 1
  misc_feature: MA Experiment 20001247 PARAMETER Experiment Name: At_Far-red-induction_P Parameter: Tissue Value: Whole Plant
  misc_feature: MA Experiment ID: 20001248 Result: Down-regulated in Transcription
  misc_feature: MA Experiment 20001248 PARAMETER Experiment Name: At_Far-red-induction_P Parameter: Age (day) Value: 7
  misc_feature: MA Experiment 20001248 PARAMETER Experiment Name: At_Far-red-induction_P Parameter: Light Value: Far-red vs. White
  misc_feature: MA Experiment 20001248 PARAMETER Experiment Name: At_Far-red-induction_P Parameter: Organism Value: A. thaliana
  misc_feature: MA Experiment 20001248 PARAMETER Experiment Name: At_Far-red-induction_P Parameter: Plant Line Value: Columbia
  misc_feature: MA Experiment 20001248 PARAMETER Experiment Name: At_Far-red-induction_P Parameter: Timepoint (hr) Value: 4
  misc_feature: MA Experiment 20001248 PARAMETER Experiment Name: At_Far-red-induction_P Parameter: Tissue Value: Whole Plant
  misc_feature: MA Experiment ID: 20001450 Result: Down-regulated in Transcription
  misc_feature: MA Experiment 20001450 PARAMETER Experiment Name: At_Far-red-induction_P Parameter: Age (day) Value: 7
  misc_feature: MA Experiment 20001450 PARAMETER Experiment Name: At_Far-red-induction_P Parameter: Light Value: Far-red vs. White
  misc_feature: MA Experiment 20001450 PARAMETER Experiment Name: At_Far-red-induction_P Parameter: Organism Value: A. thaliana
  misc_feature: MA Experiment 20001450 PARAMETER Experiment Name: At_Far-red-induction_P Parameter: Plant Line Value: Columbia
  misc_feature: MA Experiment 20001450 PARAMETER Experiment Name: At_Far-red-induction_P Parameter: Timepoint (hr) Value: 8
  misc_feature: MA Experiment 20001450 PARAMETER Experiment Name: At_Far-red-induction_P Parameter: Tissue Value: Whole Plant
  misc_feature: MA Experiment ID: 20001451 Result: Down-regulated in Transcription
  misc_feature: MA Experiment 20001451 PARAMETER Experiment Name: At_Far-red-induction_P Parameter: Age (day) Value: 7
  misc_feature: MA Experiment 20001451 PARAMETER Experiment Name: At_Far-red-induction_P Parameter: Light Value: Far-red vs. White
  misc_feature: MA Experiment 20001451 PARAMETER Experiment Name: At_Far-red-induction_P Parameter: Organism Value: A. thaliana
  misc_feature: MA Experiment 20001451 PARAMETER Experiment Name: At_Far-red-induction_P Parameter: Plant Line Value: Columbia
  misc_feature: MA Experiment 20001451 PARAMETER Experiment Name: At_Far-red-induction_P Parameter: Timepoint (hr) Value: 24
  misc_feature: MA Experiment 20001451 PARAMETER Experiment Name: At_Far-red-induction_P Parameter: Tissue Value: Whole Plant
  misc_feature: MA Experiment ID: 20001904 Result: Up-regulated in Transcription
  misc_feature: MA Experiment 20001904 PARAMETER Experiment Name: At_Drought_Reproduction_P Parameter: Age (day) Value: 37
  misc_feature: MA Experiment 20001904 PARAMETER Experiment Name: At_Drought_Reproduction_P Parameter: Organism Value: A. thaliana
  misc_feature: MA Experiment 20001904 PARAMETER Experiment Name: At_Drought_Reproduction_P Parameter: Plant Line Value: WS
  misc_feature: MA Experiment 20001904 PARAMETER Experiment Name: At_Drought_Reproduction_P Parameter: Timepoint (day) Value: 7
  misc_feature: MA Experiment 20001904 PARAMETER Experiment Name: At_Drought_Reproduction_P Parameter: Tissue Value: Rosettes
  misc_feature: MA Experiment 20001904 PARAMETER Experiment Name: At_Drought_Reproduction_P Parameter: Treatment Value: Drought vs. No Drought
  misc_feature: MA Experiment ID: 20001905 Result: Up-regulated in Transcription
  misc_feature: MA Experiment 20001905 PARAMETER Experiment Name: At_Drought_Reproduction_P Parameter: Age (day) Value: 40
  misc_feature: MA Experiment 20001905 PARAMETER Experiment Name: At_Drought_Reproduction_P Parameter: Organism Value: A. thaliana
  misc_feature: MA Experiment 20001905 PARAMETER Experiment Name: At_Drought_Reproduction_P Parameter: Plant Line Value: WS
  misc_feature: MA Experiment 20001905 PARAMETER Experiment Name: At_Drought_Reproduction_P Parameter: Timepoint (day) Value: 10
  misc_feature: MA Experiment 20001905 PARAMETER Experiment Name: At_Drought_Reproduction_P Parameter: Tissue Value: Rosettes
  misc_feature: MA Experiment 20001905 PARAMETER Experiment Name: At_Drought_Reproduction_P Parameter: Treatment Value: Drought vs. No Drought
aagaaatctttcagatttgcgcatatcgacaattttccgagcggccagtttacgtattttgtttgtagttaacgtgtttcaaggactttgacaatggctgaggaagcgcataaggtaacattgaatgtctatgatttaagccaaggcttggcacgccagctctcacaatcactcctgggaaaggttattgaaggtgtatggcatacaggaatagttgtctatgggaatgagtacttttttggaggagggatacaacatttaccagttggaagaactccatatggaacaccaattcgaacgatagagttgggtctatcacatgtgcctaaagatgtattcgagatgtacttggaagaaatcagtcctcgttacactgctgaatcctacaatttacttactcacaactgcaacaacttcagcaacgaggtcgctcagtttttggtgggtaaagggattcctgactacattctccagcttcctaatgatgttctaaacagtcccatgggtggtcttataatgcctatgttgcaaggcctcgaaacaactctaaaggctggtgctgttcctcaagttccacagtttaggccacagccacaaccttttggagcttttagtaaagatgatggcccacaaattgtgatagctcctaagctcgaggcagcagaaacctcaactgcaactgagaaagtgccacctgttattcaaccatcagctagtaaagagaaggtcaaggacgacccgttgggtgatgctagggccaagattcaggaagagattacaagcgaatttgcagctctaatggcacaaggcacattacgagcaagtgaagcagctgctatggcgacaaaaagagtcatgcaaaagtacggacatctcaatgtaaacgcttagtgcaataacagagagatgaaacattttatttttactgtcttgaaactaagtccagaatcttgaacgatttcattacactattgccttcagctgtatttcgtgtattatgttcaacgatctacaaattaattatcataaaagaggaaaagagcagtaaacaagagaaaaaaaaaagatttt

SEQ ID NO: 84866 - protein, 265 aa, Arabidopsis thaliana; identical to SEQ ID NO: 38015
  peptide (1)..(265): Ceres Seq. ID no. 12677518
  misc_feature (6)..(129): Pfam Name: Eukaryotic protein of unknown function (DUF862) Pfam Description: Eukaryotic protein of unknown function (DUF862)
  misc_feature (1)..(265): Homolog of NCBI NO: 15231383 NR Description: unknown protein; protein id: At3g07090.1, by cDNA: gi_17529195 [Arabidopsis thaliana] unknown protein [Arabidopsis thaliana]
  misc_feature (1)..(254): Homolog of NCBI NO: 37535296 NR Description: unknown protein [Oryza sativa (japonica
  misc_feature (5)..(151): Homolog of NCBI NO: 28277916 NR Description: Similar to DNA segment, Chr 15, Wayne State
  misc_feature (7)..(169): Homolog of NCBI NO: 29246854 NR Description: GLP_191_9337_10773 [Giardia lamblia ATCC 50803]
  misc_feature (8)..(157): Homolog of NCBI NO: 37589651 NR Description: Unknown (protein for MGC:73066) [Danio rerio]
  misc_feature (6)..(156): Homolog of NCBI NO: 14779199 NR Description: similar to LD11371p [Drosophila melanogaster] sapiens] >gi|21618960|gb|AAH32147.1| DNA segment, Chr 15, Wayne
  misc_feature (1)..(149): Homolog of NCBI NO: 34867307 NR Description: similar to D15Wsu75e protein [Rattus norvegicus]
  misc_feature (6)..(149): Homolog of NCBI NO: 20162548 NR Description: D15Wsu75e protein [Mus musculus] unnamed protein product [Mus musculus]
  misc_feature (8)..(175): Homolog of NCBI NO: 40738408 NR Description: hypothetical protein AN6915.2 [Aspergillus
  misc_feature (8)..(155): Homolog of NCBI NO: 23508869 NR Description: hypothetical protein [Plasmodium falciparum 3D7]

SEQ ID NO: 84867 - protein, 182 aa, Arabidopsis thaliana; identical to SEQ ID NO: 38016
  peptide (1)..(182): Ceres Seq. ID no. 12677519
  misc_feature (1)..(182): Homolog of NCBI NO: 15231383 NR Description: unknown protein; protein id: At3g07090.1, by cDNA: gi_17529195 [Arabidopsis thaliana] unknown protein [Arabidopsis thaliana]
  misc_feature (1)..(171): Homolog of NCBI NO: 37535296 NR Description: unknown protein [Oryza sativa (japonica
  misc_feature (1)..(68): Homolog of NCBI NO: 28277916 NR Description: Similar to DNA segment, Chr 15, Wayne State
  misc_feature (1)..(86): Homolog of NCBI NO: 29246854 NR Description: GLP_191_9337_10773 [Giardia lamblia ATCC 50803]
  misc_feature (1)..(74): Homolog of NCBI NO: 37589651 NR Description: Unknown (protein for MGC:73066) [Danio rerio]
  misc_feature (1)..(73): Homolog of NCBI NO: 14779199 NR Description: similar to LD11371p [Drosophila melanogaster] sapiens] >gi|21618960|gb|AAH32147.1| DNA segment, Chr 15, Wayne
  misc_feature (1)..(66): Homolog of NCBI NO: 34867307 NR Description: similar to D15Wsu75e protein [Rattus norvegicus]
  misc_feature (1)..(66): Homolog of NCBI NO: 20162548 NR Description: D15Wsu75e protein [Mus musculus] unnamed protein product [Mus musculus]
  misc_feature (1)..(92): Homolog of NCBI NO: 40738408 NR Description: hypothetical protein AN6915.2 [Aspergillus
  misc_feature (1)..(72): Homolog of NCBI NO: 23508869 NR Description: hypothetical protein [Plasmodium falciparum 3D7]

SEQ ID NO: 84868 - DNA, 1915 bp, Arabidopsis thaliana
  misc_feature (1)..(1915): Ceres Seq. ID no. 12677550
  misc_feature: MA Experiment ID: 108434 Result: Down-regulated in Transcription
  misc_feature: MA Experiment 108434 PARAMETER Experiment Name: At_Root_Tips_cDNA_P Parameter: Tissue Value: Root Tips
  misc_feature: MA Experiment ID: 108577 Result: Down-regulated in Transcription
  misc_feature: MA Experiment 108577 PARAMETER Experiment Name: At_42deg_Heat_cDNA_P Parameter: Temperature (deg C) Value: 42 vs. 22
  misc_feature: MA Experiment 108577 PARAMETER Experiment Name: At_42deg_Heat_cDNA_P Parameter: Timepoint (hr) Value: 6
  misc_feature: MA Experiment 108577 PARAMETER Experiment Name: At_42deg_Heat_cDNA_P Parameter: Tissue Value: Aerial
  misc_feature: MA Experiment ID: 20000070 Result: Up-regulated in Transcription
  misc_feature: MA Experiment 20000070 PARAMETER Experiment Name: At_100uM_ABA_Mutants_cDNA_P Parameter: Plant Line Value: CS24
  misc_feature: MA Experiment 20000070 PARAMETER Experiment Name: At_100uM_ABA_Mutants_cDNA_P Parameter: Timepoint (hr) Value: 6
  misc_feature: MA Experiment 20000070 PARAMETER Experiment Name: At_100uM_ABA_Mutants_cDNA_P Parameter: Tissue Value: Aerial
  misc_feature: MA Experiment 20000070 PARAMETER Experiment Name: At_100uM_ABA_Mutants_cDNA_P Parameter: Treatment Value: 100uM ABA vs. No Treatment
  misc_feature: MA Experiment ID: 20000086 Result: Up-regulated in Transcription
  misc_feature: MA Experiment 20000086 PARAMETER Experiment Name: At_100uM_ABA_Mutants_cDNA_P Parameter: Plant Line Value: CS22
  misc_feature: MA Experiment 20000086 PARAMETER Experiment Name: At_100uM_ABA_Mutants_cDNA_P Parameter: Timepoint (hr) Value: 6
  misc_feature: MA Experiment 20000086 PARAMETER Experiment Name: At_100uM_ABA_Mutants_cDNA_P Parameter: Tissue Value: Aerial
  misc_feature: MA Experiment 20000086 PARAMETER Experiment Name: At_100uM_ABA_Mutants_cDNA_P Parameter: Treatment Value: 100uM ABA vs. No Treatment
  misc_feature: MA Experiment ID: 20000089 Result: Up-regulated in Transcription
  misc_feature: MA Experiment ID: 20000117 Result: Up-regulated in Transcription
  misc_feature: MA Experiment 20000117 PARAMETER Experiment Name: At_100uM_ABA_Mutants_cDNA_P Parameter: Plant Line Value: Columbia
  misc_feature: MA Experiment 20000117 PARAMETER Experiment Name: At_100uM_ABA_Mutants_cDNA_P Parameter: Timepoint (hr) Value: 6
  misc_feature: MA Experiment 20000117 PARAMETER Experiment Name: At_100uM_ABA_Mutants_cDNA_P Parameter: Tissue Value: Aerial
  misc_feature: MA Experiment 20000117 PARAMETER Experiment Name: At_100uM_ABA_Mutants_cDNA_P Parameter: Treatment Value: 100uM ABA vs. No Treatment
  misc_feature: MA Experiment ID: 20001247 Result: Down-regulated in Transcription
  misc_feature: MA Experiment 20001247 PARAMETER Experiment Name: At_Far-red-induction_P Parameter: Age (day) Value: 7
  misc_feature: MA Experiment 20001247 PARAMETER Experiment Name: At_Far-red-induction_P Parameter: Light Value: Far-red vs. White
  misc_feature: MA Experiment 20001247 PARAMETER Experiment Name: At_Far-red-induction_P Parameter: Organism Value: A. thaliana
  misc_feature: MA Experiment 20001247 PARAMETER Experiment Name: At_Far-red-induction_P Parameter: Plant Line Value: Columbia
  misc_feature: MA Experiment 20001247 PARAMETER Experiment Name: At_Far-red-induction_P Parameter: Timepoint (hr) Value: 1
  misc_feature: MA Experiment 20001247 PARAMETER Experiment Name: At_Far-red-induction_P Parameter: Tissue Value: Whole Plant
ataaaaattcgaactatcaaactccaccccataacaaaattctccaaactagtgaaaattttgtcgccaccgtcgcagagtgttaaaaaactattggaagatgggttctggtcaatggcatatggagaagaggtctactttaaagaatgattcgtttgtaaaagaatacaatccagtcacggaaactgggagtctctctatcattgttcttggtgcttctggtgatcttgctaagaagaagacttttcctgcacttttcaatctatttcatcagggatttcttaatccagatgaagttcatatatttggatatgcaaggagtaagattactgatgaggagcttagagataaaatccgcggatatcttgttgatgagaagaatgcatctaagaaaacagaagctttgtccaagtttctaaagctgattaagtatgtgagtggaccttatgattctgaggaagggtttaagagattagacaaggcgattttggagcacgagatatctaaaaagactgctgaaggatcttcgaggagattgttttatcttgcacttcctccgtctgtataccctcctgtaagcaagatgatcaaggcatggtgcactaacaaatctgatcttggtggatggactaggattgttgttgagaaaccatttggaaaggatttggaatctgcagagcagctgagttctcagattggagccttgtttgaagaaccacagatttatcgtattgatcactatctgggaaaagagttagttcaaaacatgttggttcttcggtttgccaatcgcttgtttttgccactatggaaccgcgacaatattgcaaacgtacagatcgttttcagagaagattttggaactgaaggtcgcggtggatattttgatgaatacggaatcattcgtgatattattcaaaaccacttgctccaggttctttgccttgtcgccatggagaaaccaatctctcttaaacccgagcacatccgggatgagaaagtgaaggttcttcaatctgtgattcccataaaagatgaagaggtggttcttggacaatatgaaggatatagagatgatccaactgttccaaatgactcaaacactccaacgtttgccacaacaattcttcgcattaacaatgaaagatgggaaggtgttccttttatactgaaggccggaaaggcaatgagttcaaagaaggcagatattcgcattcagtttaaagatgttcctggcgacatattcaaatgtcaaaaccaagggaggaacgagtttgttatacgcttgcagccttcagaggccatgtacatgaagctaactgtgaagcaaccgggtctggagatgcaaaccgtgcagagtgaactagacctatcgtacaagcagcgttaccaagatgtctcaattccagaggcttacgaacgccttattcttgacacaatcagaggcgaccaacaacactttgttcgcagagacgaattaaaggcagcttgggaaatcttcactccactgcttcacaggatcgacaagggagaagtgaaatcggtcccatacaaacaaggtagccgtggcccagcggaagcagatcagctacttaagaaagctggttatatgcagactcatggctacatttggatccctcctacattgtaaatggtataatcatagagatgatgatgatgagtacacacaaaataagagggttttttttcttttttttccttgcttgctgaataaaaactcttcaccagtttggagtttgtttaagtgaatcttatgtatactagtgatcttcactaggacattgtttgtttatgccttgtagtttttgttgtactagtcccttgttttctttttttacataatgcaaaacagctttgtggaaaagctaattaaattaagagatcttattctgct

SEQ ID NO: 84869 - protein, 516 aa, Arabidopsis thaliana; identical to SEQ ID NO: 77428
  peptide (1)..(516): Ceres Seq. ID no. 12677551
  misc_feature (224)..(508): Pfam Name: Glucose-6-phosphate dehydrogenase, C-terminal domain Pfam Description: Glucose-6-phosphate dehydrogenase, C-terminal
  misc_feature (1)..(516): Homolog of NCBI NO: 15232132 NR Description: glucose-6-phosphate 1-dehydrogenase, putative; id: At3g27300.1, supported by cDNA: gi_18086469 [Arabidopsis
  misc_feature (1)..(516): Homolog of NCBI NO: 25283728 NR Description: glucose-6-phosphate 1-dehydrogenase (EC 1.1.1.49)
  misc_feature (1)..(516): Homolog of NCBI NO: 18086470 NR Description: AT3g27300/K17E12_12 [Arabidopsis thaliana]
  misc_feature (1)..(516): Homolog of NCBI NO: 15237485 NR Description: glucose-6-phosphate dehydrogenase; protein id:
  misc_feature (1)..(516): Homolog of NCBI NO: 25283727 NR Description: glucose-6-phosphate 1-dehydrogenase (EC 1.1.1.49)
  misc_feature (3)..(516): Homolog of NCBI NO: 585165 NR Description: Glucose-6-phosphate 1-dehydrogenase, cytoplasmic
  misc_feature (1)..(516): Homolog of NCBI NO: 3023815 NR Description: Glucose-6-phosphate 1-dehydrogenase, cytoplasmic
  misc_feature (1)..(516): Homolog of NCBI NO: 7431269 NR Description: glucose-6-phosphate 1-dehydrogenase (EC 1.1.1.49)
  misc_feature (3)..(516): Homolog of NCBI NO: 3021508 NR Description: glucose-6-phosphate dehydrogenase [Nicotiana
  misc_feature (3)..(516): Homolog of NCBI NO: 3021510 NR Description: glucose-6-phosphate dehydrogenase [Nicotiana

SEQ ID NO: 84870 - protein, 509 aa, Arabidopsis thaliana; identical to SEQ ID NO: 77429
  peptide (1)..(509): Ceres Seq. ID no. 12677552
  misc_feature (217)..(501): Pfam Name: Glucose-6-phosphate dehydrogenase, C-terminal domain Pfam Description: Glucose-6-phosphate dehydrogenase, C-terminal
  misc_feature (1)..(509): Homolog of NCBI NO: 15232132 NR Description: glucose-6-phosphate 1-dehydrogenase, putative; id: At3g27300.1, supported by cDNA: gi_18086469 [Arabidopsis
  misc_feature (1)..(509): Homolog of NCBI NO: 25283728 NR Description: glucose-6-phosphate 1-dehydrogenase (EC 1.1.1.49)
  misc_feature (1)..(509): Homolog of NCBI NO: 18086470 NR Description: AT3g27300/K17E12_12 [Arabidopsis thaliana]
  misc_feature (1)..(509): Homolog of NCBI NO: 15237485 NR Description: glucose-6-phosphate dehydrogenase; protein id:
  misc_feature (1)..(509): Homolog of NCBI NO: 25283727 NR Description: glucose-6-phosphate 1-dehydrogenase (EC 1.1.1.49)
  misc_feature (1)..(509): Homolog of NCBI NO: 585165 NR Description: Glucose-6-phosphate 1-dehydrogenase, cytoplasmic
  misc_feature (1)..(509): Homolog of NCBI NO: 3023815 NR Description: Glucose-6-phosphate 1-dehydrogenase, cytoplasmic
  misc_feature (1)..(509): Homolog of NCBI NO: 7431269 NR Description: glucose-6-phosphate 1-dehydrogenase (EC 1.1.1.49)
  misc_feature (1)..(509): Homolog of NCBI NO: 3021508 NR Description: glucose-6-phosphate dehydrogenase [Nicotiana
  misc_feature (1)..(509): Homolog of NCBI NO: 3021510 NR Description: glucose-6-phosphate dehydrogenase [Nicotiana

SEQ ID NO: 84871 - protein, 355 aa, Arabidopsis thaliana
  peptide (1)..(355): Ceres Seq. ID no. 12677553
  misc_feature (63)..(347): Pfam Name: Glucose-6-phosphate dehydrogenase, C-terminal domain Pfam Description: Glucose-6-phosphate dehydrogenase, C-terminal
  misc_feature (1)..(355): Homolog of NCBI NO: 15232132 NR Description: glucose-6-phosphate 1-dehydrogenase, putative; id: At3g27300.1, supported by cDNA: gi_18086469 [Arabidopsis
  misc_feature (1)..(355): Homolog of NCBI NO: 25283728 NR Description: glucose-6-phosphate 1-dehydrogenase (EC 1.1.1.49)
  misc_feature (1)..(355): Homolog of NCBI NO: 18086470 NR Description: AT3g27300/K17E12_12 [Arabidopsis thaliana]
  misc_feature (1)..(355): Homolog of NCBI NO: 15237485 NR Description: glucose-6-phosphate dehydrogenase; protein id:
  misc_feature (1)..(355): Homolog of NCBI NO: 25283727 NR Description: glucose-6-phosphate 1-dehydrogenase (EC 1.1.1.49)
  misc_feature (1)..(355): Homolog of NCBI NO: 585165 NR Description: Glucose-6-phosphate 1-dehydrogenase, cytoplasmic
  misc_feature (1)..(355): Homolog of NCBI NO: 3023815 NR Description: Glucose-6-phosphate 1-dehydrogenase, cytoplasmic
  misc_feature (1)..(355): Homolog of NCBI NO: 7431269 NR Description: glucose-6-phosphate 1-dehydrogenase (EC 1.1.1.49)
  misc_feature (1)..(355): Homolog of NCBI NO: 3021508 NR Description: glucose-6-phosphate dehydrogenase [Nicotiana
  misc_feature (1)..(355): Homolog of NCBI NO: 3021510 NR Description: glucose-6-phosphate dehydrogenase [Nicotiana
MIKAWCTNKSDLGGWTRIVVEKPFGKDLESAEQLSSQIGALFEEPQIYRIDHYLGKELVQNMLVLRFANRLFLPLWNRDNIANVQIVFREDFGTEGRGGYFDEYGIIRDIIQNHLLQVLCLVAMEKPISLKPEHIRDEKVKVLQSVIPIKDEEVVLGQYEGYRDDPTVPNDSNTPTFATTILRINNERWEGVPFILKAGKAMSSKKADIRIQFKDVPGDIFKCQNQGRNEFVIRLQPSEAMYMKLTVKQPGLEMQTVQSELDLSYKQRYQDVSIPEAYERLILDTIRGDQQHFVRRDELKAAWEIFTPLLHRIDKGEVKSVPYKQGSRGPAEADQLLKKAGYMQTHGYIWIPPTL

SEQ ID NO: 84872 - DNA, 943 bp, Arabidopsis thaliana
  misc_feature (1)..(943): Ceres Seq. ID no. 12677570
  misc_feature: MA Experiment ID: 108434 Result: Up-regulated in Transcription
  misc_feature: MA Experiment 108434 PARAMETER Experiment Name: At_Root_Tips_cDNA_P Parameter: Tissue Value: Root Tips
  misc_feature: MA Experiment ID: 108463 Result: Down-regulated in Transcription
  misc_feature: MA Experiment 108463 PARAMETER Experiment Name: At_Germinating_Seeds_cDNA_P Parameter: Age (day) Value: 3 vs. 0
  misc_feature: MA Experiment 108463 PARAMETER Experiment Name: At_Germinating_Seeds_cDNA_P Parameter: Tissue Value: Germinating Seeds
  misc_feature: MA Experiment ID: 108464 Result: Down-regulated in Transcription
  misc_feature: MA Experiment 108464 PARAMETER Experiment Name: At_Germinating_Seeds_cDNA_P Parameter: Age (day) Value: 4 vs. 0
  misc_feature: MA Experiment 108464 PARAMETER Experiment Name: At_Germinating_Seeds_cDNA_P Parameter: Tissue Value: Germinating Seeds
  misc_feature: MA Experiment ID: 20000068 Result: Up-regulated in Transcription
  misc_feature: MA Experiment ID: 20000113 Result: Down-regulated in Transcription
  misc_feature: MA Experiment 20000113 PARAMETER Experiment Name: At_42deg_Heat_cDNA_P Parameter: Temperature (deg C) Value: 42 vs. 22
  misc_feature: MA Experiment 20000113 PARAMETER Experiment Name: At_42deg_Heat_cDNA_P Parameter: Timepoint (hr) Value: 8
  misc_feature: MA Experiment 20000113 PARAMETER Experiment Name: At_42deg_Heat_cDNA_P Parameter: Tissue Value: Aerial
gtgacttaaaaagctcctaggcaccgaaatcgagacactctcgacaaccatgctctctgacgccgggggtggttccgattgccggcgtcgggacttatcaactcccatcaaccttcatgtgttctatataagctttatcttcattgaatcttcctccgttatctcaaatctctcaaaatatctaaatctccttttttatgtgagcttcttcactgaaagttttctttgtgacggaagagtatatcgatgctctattggctccgatctgactcagatcttggatgcatctctgtcttcgaacccaaaacaagaaaattcacaacagtccaacagctcctcttctcaaacatcagagcaagacttcatcaacttatcaaaaagctctagatctggactagcaccaacaccacctttggtttcttctcaccggttttcgttgatggcaggagtatctcttggaccatcagatgtgcttcttccgctgggaacgtcgacggcacacgacgagctcaaacgctggcaatggtcaccctatatgattcacagtcgcccatcattccaattcttcagaatgacggaggcgctttccttatcccgacaacatcaaccctagggtttgattggatgagcctcatctttcattaaagcccaatatctcccatgtggcccatatccaggtctgatttccctatcaatttgcatagtctctctttgctttgtttctcgacaaaggatggtcgtcgactccattcagctttaggaacaatgcatctagaggggatttgcttattcaattatcgaaaccttatgattaaccaattggttcttaaccttgcatcttcacaattgtttaaattaaaattttgaaacatgacatgtaagaagcaaatcttagtttttaattcataaaaacttcttagatatgaagcaaatcttagttttt

SEQ ID NO: 84873 - protein, 187 aa, Arabidopsis thaliana
  peptide (1)..(187): Ceres Seq. ID no. 12677571
  misc_feature (59)..(158): Homolog of NCBI NO: 15234188 NR Description: hypothetical protein; protein id: At4g19240.1
MLSDAGGGSDCRRRDLSTPINLHVFYISFIFIESSSVISNLSKYLNLLFYVSFFTESFLCDGRVYRCSIGSDLTQILDASLSSNPKQENSQQSNSSSSQTSEQDFINLSKSSRSGLAPTPPLVSSHRFSLMAGVSLGPSDVLLPLGTSTAHDELKRWQWSPYMIHSRPSFQFFRMTEALSLSRQHQP

SEQ ID NO: 84874 - DNA, 1276 bp, Arabidopsis thaliana
  misc_feature (1)..(1276): Ceres Seq. ID no. 12677581
  misc_feature: MA Experiment ID: 20000307 Result: Up-regulated in Transcription
  misc_feature: MA Experiment 20000307 PARAMETER Experiment Name: At_Germinating_Seeds_Sub_P Parameter: Age (hr) Value: 24 vs. 0
  misc_feature: MA Experiment 20000307 PARAMETER Experiment Name: At_Germinating_Seeds_Sub_P Parameter: Organism Value: A. thaliana
  misc_feature: MA Experiment 20000307 PARAMETER Experiment Name: At_Germinating_Seeds_Sub_P Parameter: Plant Line Value: WS
  misc_feature: MA Experiment 20000307 PARAMETER Experiment Name: At_Germinating_Seeds_Sub_P Parameter: Tissue Value: Germinating Seeds
  misc_feature: MA Experiment ID: 20000327 Result: Down-regulated in Transcription
  misc_feature: MA Experiment 20000327 PARAMETER Experiment Name: At_42deg_Heat_Sub_P Parameter: Age (day) Value: 14
  misc_feature: MA Experiment 20000327 PARAMETER Experiment Name: At_42deg_Heat_Sub_P Parameter: Organism Value: A. thaliana
  misc_feature: MA Experiment 20000327 PARAMETER Experiment Name: At_42deg_Heat_Sub_P Parameter: Plant Line Value: WS
  misc_feature: MA Experiment 20000327 PARAMETER Experiment Name: At_42deg_Heat_Sub_P Parameter: Temperature (deg C) Value: 42 vs. 22
  misc_feature: MA Experiment 20000327 PARAMETER Experiment Name: At_42deg_Heat_Sub_P Parameter: Timepoint (hr) Value: 1
  misc_feature: MA Experiment 20000327 PARAMETER Experiment Name: At_42deg_Heat_Sub_P Parameter: Tissue Value: Aerial
  misc_feature: MA Experiment ID: 20000328 Result: Down-regulated in Transcription
  misc_feature: MA Experiment 20000328 PARAMETER Experiment Name: At_42deg_Heat_Sub_P Parameter: Age (day) Value: 14
  misc_feature: MA Experiment 20000328 PARAMETER Experiment Name: At_42deg_Heat_Sub_P Parameter: Organism Value: A. thaliana
  misc_feature: MA Experiment 20000328 PARAMETER Experiment Name: At_42deg_Heat_Sub_P Parameter: Plant Line Value: WS
  misc_feature: MA Experiment 20000328 PARAMETER Experiment Name: At_42deg_Heat_Sub_P Parameter: Temperature (deg C) Value: 42 vs. 22
  misc_feature: MA Experiment 20000328 PARAMETER Experiment Name: At_42deg_Heat_Sub_P Parameter: Timepoint (hr) Value: 6
  misc_feature: MA Experiment 20000328 PARAMETER Experiment Name: At_42deg_Heat_Sub_P Parameter: Tissue Value: Aerial
  misc_feature: MA Experiment ID: 20000347 Result: Down-regulated in Transcription
  misc_feature: MA Experiment 20000347 PARAMETER Experiment Name: At_2mM_SA_Sub_P Parameter: Age (day) Value: 14
  misc_feature: MA Experiment 20000347 PARAMETER Experiment Name: At_2mM_SA_Sub_P Parameter: Organism Value: A. thaliana
  misc_feature: MA Experiment 20000347 PARAMETER Experiment Name: At_2mM_SA_Sub_P Parameter: Plant Line Value: WS
  misc_feature: MA Experiment 20000347 PARAMETER Experiment Name: At_2mM_SA_Sub_P Parameter: Timepoint (hr) Value: 6
  misc_feature: MA Experiment 20000347 PARAMETER Experiment Name: At_2mM_SA_Sub_P Parameter: Tissue Value: Aerial
  misc_feature: MA Experiment 20000347 PARAMETER Experiment Name: At_2mM_SA_Sub_P Parameter: Treatment Value: 2mM SA vs. No Treatment
  misc_feature: MA Experiment ID: 20000355 Result: Up-regulated in Transcription
  misc_feature: MA Experiment 20000355 PARAMETER Experiment Name: At_Siliques_Sub_P Parameter: Age (day) Value: 21
  misc_feature: MA Experiment 20000355 PARAMETER Experiment Name: At_Siliques_Sub_P Parameter: Organism Value: A. thaliana
  misc_feature: MA Experiment 20000355 PARAMETER Experiment Name: At_Siliques_Sub_P Parameter: Plant Line Value: WS
  misc_feature: MA Experiment 20000355 PARAMETER Experiment Name: At_Siliques_Sub_P Parameter: Tissue Value: Less Than 5mm Siliques vs. Whole Plant
  misc_feature: MA Experiment ID: 20000440 Result: Up-regulated in Transcription
  misc_feature: MA Experiment 20000440 PARAMETER Experiment Name: At_Closed-Flower__Sub_P Parameter: Tissue Value: Closed Flower vs. Whole Plant
accaatgccaataatggccggaaccgcaagtccttggcggagagaggccgtgttcttgacggcaatgctggtggtcgaaaccagcgtcgtcggaataagtactttgtttaaatttgcaacttcaaagggactcaacatttatcctttcctcggctattcttatcttcttgcttctcttcttcttcttccttctcttttcttcactaacaggtcaagttcacttcctccactaagtgtctcaatactttcaaaaattggacttcttggatttctaggatcaatgtatgtgatcacaggatacataggcatcgaatacagcagcccaaccttagcctccgccataaacaatatcactcctgctcttaccttcatcctcgccattatcttcagaatggaaaaagtatctttcaaagagaggagtagtctagccaaattgatggggacgatattgtcactgataggtgcacttgtggtgattttctaccacggtccacgtgtcttcctcgcatcttctccgccctatgtaaacttccgtcagttttctccaccgttgtcatcttcaaactccgattggctcatcggtggagctcttctaaccatgcaaggcatattcgtttctgtttctttcattcttcaggcacatataatgagtgtatatccagcagcattcagagtctcctttctttacactgtatgtgtttcaatcgtgacctcgacgattggactagtagttgaaaagaacaacccaagcgtttggatcattcatttcgatattactttgattacaattgttaccatggcaatagtaacttcagtatactatgtgattcattcatggacagtacgacataaaggacctctgtacttagccatatttaaacctttgtccattttaatagcagtggttatgggggccatttttctcaatgattctctctatctcggatgtttgatcggaggaattttgataacattaggcttttacgctgtgatgtggggcaaagcaaacgaagagaaggatcagttatcattttcagaaaaagagaaaacgcctcttctattaaaccgcaaaaacgaccaagtttaaaaagaaaaagaatatagacaataaaactactaatagttaacaaatactgttattaataccatatttataaaattgtcttatgtctctatgaacctaggagttggaaaaaaatgtgtgtatttagatttttttttcaaaatactccaacatttataaatacgagttaacatttttccttgactcctttgg

SEQ ID NO: 84875 - protein, 361 aa, Arabidopsis thaliana
  peptide (1)..(361): Ceres Seq. ID no. 12677582
  misc_feature (27)..(160): Pfam Name: Integral membrane protein DUF6 Pfam Description: Integral membrane protein DUF6
  misc_feature (2)..(361): Homolog of NCBI NO: 22331380 NR Description: unknown protein; protein id: At3g28070.1, by cDNA: gi_17529267 [Arabidopsis thaliana] unknown protein [Arabidopsis thaliana]
  misc_feature (5)..(361): Homolog of NCBI NO: 21618226 NR Description: contains similarity to integral membrane protein
  misc_feature (5)..(355): Homolog of NCBI NO: 11994130 NR Description: contains similarity to integral membrane protein
  misc_feature (5)..(361): Homolog of NCBI NO: 18405642 NR Description: expressed protein; protein id: At3g28080.1,
  misc_feature (5)..(266): Homolog of NCBI NO: 11994127 NR Description: contains similarity to nodulin~gene_id:MMG15.11
  misc_feature (5)..(361): Homolog of NCBI NO: 30689045 NR Description: nodulin MtN21 family protein [Arabidopsis >gi|17381140|gb|AAL36382.1| unknown protein [Arabidopsis >gi|21436253|gb|AAM51265.1| unknown protein [Arabidopsis
  misc_feature (94)..(361): Homolog of NCBI NO: 11994129 NR Description: contains similarity to nodulin~gene_id:MMG15.13
  misc_feature (131)..(355): Homolog of NCBI NO: 15232901 NR Description: unknown protein; protein id: At3g28100.1
  misc_feature (131)..(361): Homolog of NCBI NO: 11994131 NR Description: nodulin-like protein [Arabidopsis thaliana]
  misc_feature (13)..(92): Homolog of NCBI NO: 11994131 NR Description: nodulin-like protein [Arabidopsis thaliana]
PMPIMAGTASPWRREAVFLTAMLVVETSVVGISTLFKFATSKGLNIYPFLGYSYLLASLLLLPSLFFTNRSSSLPPLSVSILSKIGLLGFLGSMYVITGYIGIEYSSPTLASAINNITPALTFILAIIFRMEKVSFKERSSLAKLMGTILSLIGALVVIFYHGPRVFLASSPPYVNFRQFSPPLSSSNSDWLIGGALLTMQGIFVSVSFILQAHIMSVYPAAFRVSFLYTVCVSIVTSTIGLVVEKNNPSVWIIHFDITLITIVTMAIVTSVYYVIHSWTVRHKGPLYLAIFKPLSILIAVVMGAIFLNDSLYLGCLIGGILITLGFYAVMWGKANEEKDQLSFSEKEKTPLLLNRKNDQV

SEQ ID NO: 84876 - protein, 360 aa, Arabidopsis thaliana
  peptide (1)..(360): Ceres Seq. ID no. 12677583
  misc_feature (26)..(159): Pfam Name: Integral membrane protein DUF6 Pfam Description: Integral membrane protein DUF6
  misc_feature (1)..(360): Homolog of NCBI NO: 22331380 NR Description: unknown protein; protein id: At3g28070.1, by cDNA: gi_17529267 [Arabidopsis thaliana] unknown protein [Arabidopsis thaliana]
  misc_feature (4)..(360): Homolog of NCBI NO: 21618226 NR Description: contains similarity to integral membrane protein
  misc_feature (4)..(354): Homolog of NCBI NO: 11994130 NR Description: contains similarity to integral membrane protein
  misc_feature (4)..(360): Homolog of NCBI NO: 18405642 NR Description: expressed protein; protein id: At3g28080.1,
  misc_feature (4)..(265): Homolog of NCBI NO: 11994127 NR Description: contains similarity to nodulin~gene_id:MMG15.11
  misc_feature (4)..(360): Homolog of NCBI NO: 30689045 NR Description: nodulin MtN21 family protein [Arabidopsis >gi|17381140|gb|AAL36382.1| unknown protein [Arabidopsis >gi|21436253|gb|AAM51265.1| unknown protein [Arabidopsis
  misc_feature (93)..(360): Homolog of NCBI NO: 11994129 NR Description: contains similarity to nodulin~gene_id:MMG15.13
  misc_feature (130)..(354): Homolog of NCBI NO: 15232901 NR Description: unknown protein; protein id: At3g28100.1
  misc_feature (130)..(360): Homolog of NCBI NO: 11994131 NR Description: nodulin-like protein [Arabidopsis thaliana]
  misc_feature (12)..(91): Homolog of NCBI NO: 11994131 NR Description: nodulin-like protein [Arabidopsis thaliana]
MPIMAGTASPWRREAVFLTAMLVVETSVVGISTLFKFATSKGLNIYPFLGYSYLLASLLLLPSLFFTNRSSSLPPLSVSILSKIGLLGFLGSMYVITGYIGIEYSSPTLASAINNITPALTFILAIIFRMEKVSFKERSSLAKLMGTILSLIGALVVIFYHGPRVFLASSPPYVNFRQFSPPLSSSNSDWLIGGALLTMQGIFVSVSFILQAHIMSVYPAAFRVSFLYTVCVSIVTSTIGLVVEKNNPSVWIIHFDITLITIVTMAIVTSVYYVIHSWTVRHKGPLYLAIFKPLSILIAVVMGAIFLNDSLYLGCLIGGILITLGFYAVMWGKANEEKDQLSFSEKEKTPLLLNRKNDQV

SEQ ID NO: 84877 - protein, 357 aa, Arabidopsis thaliana; identical to SEQ ID NO: 74239
  peptide (1)..(357): Ceres Seq. ID no. 12677584
  misc_feature (23)..(156): Pfam Name: Integral membrane protein DUF6 Pfam Description: Integral membrane protein DUF6
  misc_feature (1)..(357): Homolog of NCBI NO: 22331380 NR Description: unknown protein; protein id: At3g28070.1, by cDNA: gi_17529267 [Arabidopsis thaliana] unknown protein [Arabidopsis thaliana]
  misc_feature (1)..(357): Homolog of NCBI NO: 21618226 NR Description: contains similarity to integral membrane protein
  misc_feature (1)..(351): Homolog of NCBI NO: 11994130 NR Description: contains similarity to integral membrane protein
  misc_feature (1)..(357): Homolog of NCBI NO: 18405642 NR Description: expressed protein; protein id: At3g28080.1,
  misc_feature (1)..(262): Homolog of NCBI NO: 11994127 NR Description: contains similarity to nodulin~gene_id:MMG15.11
  misc_feature (1)..(357): Homolog of NCBI NO: 30689045 NR Description: nodulin MtN21 family protein [Arabidopsis >gi|17381140|gb|AAL36382.1| unknown protein [Arabidopsis >gi|21436253|gb|AAM51265.1| unknown protein [Arabidopsis
  misc_feature (90)..(357): Homolog of NCBI NO: 11994129 NR Description: contains similarity to nodulin~gene_id:MMG15.13
  misc_feature (127)..(351): Homolog of NCBI NO: 15232901 NR Description: unknown protein; protein id: At3g28100.1
  misc_feature (127)..(357): Homolog of NCBI NO: 11994131 NR Description: nodulin-like protein [Arabidopsis thaliana]
  misc_feature (9)..(88): Homolog of NCBI NO: 11994131 NR Description: nodulin-like protein [Arabidopsis thaliana]

SEQ ID NO: 84878 - DNA, 1237 bp, Arabidopsis thaliana
  misc_feature (1)..(1237): Ceres Seq. ID no. 12677585
  misc_feature: MA Experiment ID: 20000307 Result: Up-regulated in Transcription
  misc_feature: MA Experiment 20000307 PARAMETER Experiment Name: At_Germinating_Seeds_Sub_P Parameter: Age (hr) Value: 24 vs. 0
  misc_feature: MA Experiment 20000307 PARAMETER Experiment Name: At_Germinating_Seeds_Sub_P Parameter: Organism Value: A. thaliana
  misc_feature: MA Experiment 20000307 PARAMETER Experiment Name: At_Germinating_Seeds_Sub_P Parameter: Plant Line Value: WS
  misc_feature: MA Experiment 20000307 PARAMETER Experiment Name: At_Germinating_Seeds_Sub_P Parameter: Tissue Value: Germinating Seeds
  misc_feature: MA Experiment ID: 20000315 Result: Down-regulated in Transcription
  misc_feature: MA Experiment 20000315 PARAMETER Experiment Name: At_14day_Shoots-Roots_Sub_P Parameter: Age (day) Value: 14
  misc_feature: MA Experiment 20000315 PARAMETER Experiment Name: At_14day_Shoots-Roots_Sub_P Parameter: Organism Value: A. thaliana
  misc_feature: MA Experiment 20000315 PARAMETER Experiment Name: At_14day_Shoots-Roots_Sub_P Parameter: Plant Line Value: WS
  misc_feature: MA Experiment 20000315 PARAMETER Experiment Name: At_14day_Shoots-Roots_Sub_P Parameter: Tissue Value: Shoots vs. Whole Plant
  misc_feature: MA Experiment ID: 20000328 Result: Down-regulated in Transcription
  misc_feature: MA Experiment 20000328 PARAMETER Experiment Name: At_42deg_Heat_Sub_P Parameter: Age (day) Value: 14
  misc_feature: MA Experiment 20000328 PARAMETER Experiment Name: At_42deg_Heat_Sub_P Parameter: Organism Value: A. thaliana
  misc_feature: MA Experiment 20000328 PARAMETER Experiment Name: At_42deg_Heat_Sub_P Parameter: Plant Line Value: WS
  misc_feature: MA Experiment 20000328 PARAMETER Experiment Name: At_42deg_Heat_Sub_P Parameter: Temperature (deg C) Value: 42 vs. 22
  misc_feature: MA Experiment 20000328 PARAMETER Experiment Name: At_42deg_Heat_Sub_P Parameter: Timepoint (hr) Value: 6
  misc_feature: MA Experiment 20000328 PARAMETER Experiment Name: At_42deg_Heat_Sub_P Parameter: Tissue Value: Aerial
  misc_feature: MA Experiment ID: 20000349 Result: Up-regulated in Transcription
  misc_feature: MA Experiment 20000349 PARAMETER Experiment Name: At_100uM_ABA_Sub_P Parameter: Age (day) Value: 14
  misc_feature: MA Experiment 20000349 PARAMETER Experiment Name: At_100uM_ABA_Sub_P Parameter: Organism Value: A. thaliana
  misc_feature: MA Experiment 20000349 PARAMETER Experiment Name: At_100uM_ABA_Sub_P Parameter: Plant Line Value: WS
  misc_feature: MA Experiment 20000349 PARAMETER Experiment Name: At_100uM_ABA_Sub_P Parameter: Timepoint (hr) Value: 6
  misc_feature: MA Experiment 20000349 PARAMETER Experiment Name: At_100uM_ABA_Sub_P Parameter: Tissue Value: Aerial
  misc_feature: MA Experiment 20000349 PARAMETER Experiment Name: At_100uM_ABA_Sub_P Parameter: Treatment Value: 100uM ABA vs. No Treatment
  misc_feature: MA Experiment ID: 20000355 Result: Down-regulated in Transcription
  misc_feature: MA Experiment 20000355 PARAMETER Experiment Name: At_Siliques_Sub_P Parameter: Age (day) Value: 21
  misc_feature: MA Experiment 20000355 PARAMETER Experiment Name: At_Siliques_Sub_P Parameter: Organism Value: A. thaliana
  misc_feature: MA Experiment 20000355 PARAMETER Experiment Name: At_Siliques_Sub_P Parameter: Plant Line Value: WS
  misc_feature: MA Experiment 20000355 PARAMETER Experiment Name: At_Siliques_Sub_P Parameter: Tissue Value: Less Than 5mm Siliques vs. Whole Plant
  misc_feature: MA Experiment ID: 20000440 Result: Down-regulated in Transcription
  misc_feature: MA Experiment 20000440 PARAMETER Experiment Name: At_Closed-Flower__Sub_P Parameter: Tissue Value: Closed Flower vs. Whole Plant
  misc_feature: MA Experiment ID: 20001807 Result: Down-regulated in Transcription
  misc_feature: MA Experiment 20001807 PARAMETER Experiment Name: At_50mM_NH4NO3_L-to-H_Sub_P Parameter: Timepoint (hr) Value: 6
  misc_feature: MA Experiment 20001807 PARAMETER Experiment Name: At_50mM_NH4NO3_L-to-H_Sub_P Parameter: Tissue Value: Leaf
  misc_feature: MA Experiment 20001807 PARAMETER Experiment Name: At_50mM_NH4NO3_L-to-H_Sub_P Parameter: Treatment Value: 50mM NH4NO3 vs 100mM Mannitol
aacaccaaacctttctaccatttccaatggccggagcagtaagcctttggcggagagaggccgtgttcttgacggcgatgctggcaggcgaaaccagcatcgtcggactaagtactctgtttaaggtagcaacttcaaagggactcaacatttaccctttcctcagctattcttatcttcttgcttctcttctccttcttccttctctgttcttcaccaacagtgcctcaatactctctaagattggacttcttggctttctaggatcaatgtatgttattacaggaggcataggcatcgaatacagcaacccaaccttagcctccgccataggcaatattgttcctgctcttaccttcatcctcgctgttatcttcaggatggagaaagtatcattcaaagaaaggagcagtgtagccaaagtgatggggacgatactgtcactaataggcgcatttgtggtgattttctaccacggtccacgtgtctttgtcgcatcttctccaccatatctaaacttccgtcagctttctccaccgttgtcatcgtcaaagtctgattggctcatcggaggagctattcttaccatacaaggcatcttcgtttctgtttcttttattctccagacacatataatgagagaatatcctgaagcattcacagtctccattctctacattctatgtatttcaatcgtgacctcaatgattggactagtagtcgaaaagaacaacccaagcatttggatcattcatttcgatattacattgtttacaattgttactacgggaataataacttcagtatactatgtgattcattcatgggcaatacgtcacaaaagacctctatacttagcgatatttaagcctctgtctattttgatagcagtggttatggggaccatttttctcaacgattctctctatctcggatgtttgattggaggaattttgataacattaggcttttatgttgtgatgtggggcaaagcaaacgaagagaagaacaagttgttatcattttcaggaaaagagaaaacccctcttctattgagcggcaaaaacgaccaaatttaaatgaaaaaaaatttataatcaaaggagttacaaactctgaaatagtctcttatatacatagcgtgcaaactattagtgtatactgtgtattgctttgtatataacttagaaaatgactatctaattgttttttaagttacgggtacgtaacgactatc

SEQ ID NO: 84879 - protein, 358 aa, Arabidopsis thaliana
  peptide (1)..(358): Ceres Seq. ID no. 12677586
  misc_feature (31)..(156): Pfam Name: Integral membrane protein DUF6 Pfam Description: Integral membrane protein DUF6
  misc_feature (9)..(358): Homolog of NCBI NO: 30689045 NR Description: nodulin MtN21 family protein [Arabidopsis >gi|17381140|gb|AAL36382.1| unknown protein [Arabidopsis >gi|21436253|gb|AAM51265.1| unknown protein [Arabidopsis
  misc_feature (9)..(358): Homolog of NCBI NO: 18405642 NR Description: expressed protein; protein id: At3g28080.1,
  misc_feature (9)..(358): Homolog of NCBI NO: 21618226 NR Description: contains similarity to integral membrane protein
  misc_feature (9)..(358): Homolog of NCBI NO: 22331380 NR Description: unknown protein; protein id: At3g28070.1, by cDNA: gi_17529267 [Arabidopsis thaliana] unknown protein [Arabidopsis thaliana]
  misc_feature (9)..(353): Homolog of NCBI NO: 11994130 NR Description: contains similarity to integral membrane protein
  misc_feature (90)..(358): Homolog of NCBI NO: 11994129 NR Description: contains similarity to nodulin~gene_id:MMG15.13
  misc_feature (9)..(261): Homolog of NCBI NO: 11994127 NR Description: contains similarity to nodulin~gene_id:MMG15.11
  misc_feature (127)..(353): Homolog of NCBI NO: 15232901 NR Description: unknown protein; protein id: At3g28100.1
  misc_feature (89)..(358): Homolog of NCBI NO: 18405657 NR Description: expressed protein; protein id: At3g28130.1, by cDNA: gi_15146273 [Arabidopsis thaliana] AT3g28130/MMG15_14 [Arabidopsis thaliana]
  misc_feature (178)..(350): Homolog of NCBI NO: 10177508 NR Description: nodulin-like protein [Arabidopsis thaliana]
HQTFLPFPMAGAVSLWRREAVFLTAMLAGETSIVGLSTLFKVATSKGLNIYPFLSYSYLLASLLLLPSLFFTNSASILSKIGLLGFLGSMYVITGGIGIEYSNPTLASAIGNIVPALTFILAVIFRMEKVSFKERSSVAKVMGTILSLIGAFVVIFYHGPRVFVASSPPYLNFRQLSPPLSSSKSDWLIGGAILTIQGIFVSVSFILQTHIMREYPEAFTVSILYILCISIVTSMIGLVVEKNNPSIWIIHFDITLFTIVTTGIITSVYYVIHSWAIRHKRPLYLAIFKPLSILIAVVMGTIFLNDSLYLGCLIGGILITLGFYVVMWGKANEEKNKLLSFSGKEKTPLLLSGKNDQI

SEQ ID NO: 84880 - protein, 350 aa, Arabidopsis thaliana
  peptide (1)..(350): Ceres Seq. ID no. 12677587
  misc_feature (23)..(148): Pfam Name: Integral membrane protein DUF6 Pfam Description: Integral membrane protein DUF6
  misc_feature (1)..(350): Homolog of NCBI NO: 30689045 NR Description: nodulin MtN21 family protein [Arabidopsis >gi|17381140|gb|AAL36382.1| unknown protein [Arabidopsis >gi|21436253|gb|AAM51265.1| unknown protein [Arabidopsis
  misc_feature (1)..(350): Homolog of NCBI NO: 18405642 NR Description: expressed protein; protein id: At3g28080.1,
  misc_feature (1)..(350): Homolog of NCBI NO: 21618226 NR Description: contains similarity to integral membrane protein
  misc_feature (1)..(350): Homolog of NCBI NO: 22331380 NR Description: unknown protein; protein id: At3g28070.1, by cDNA: gi_17529267 [Arabidopsis thaliana] unknown protein [Arabidopsis thaliana]
  misc_feature (1)..(345): Homolog of NCBI NO: 11994130 NR Description: contains similarity to integral membrane protein
  misc_feature (82)..(350): Homolog of NCBI NO: 11994129 NR Description: contains similarity to nodulin~gene_id:MMG15.13
  misc_feature (1)..(253): Homolog of NCBI NO: 11994127 NR Description: contains similarity to nodulin~gene_id:MMG15.11
  misc_feature (119)..(345): Homolog of NCBI NO: 15232901 NR Description: unknown protein; protein id: At3g28100.1
  misc_feature (81)..(350): Homolog of NCBI NO: 18405657 NR Description: expressed protein; protein id: At3g28130.1, by cDNA: gi_15146273 [Arabidopsis thaliana] AT3g28130/MMG15_14 [Arabidopsis thaliana]
  misc_feature (170)..(342): Homolog of NCBI NO: 10177508 NR Description: nodulin-like protein [Arabidopsis thaliana]
MAGAVSLWRREAVFLTAMLAGETSIVGLSTLFKVATSKGLNIYPFLSYSYLLASLLLLPSLFFTNSASILSKIGLLGFLGSMYVITGGIGIEYSNPTLASAIGNIVPALTFILAVIFRMEKVSFKERSSVAKVMGTILSLIGAFVVIFYHGPRVFVASSPPYLNFRQLSPPLSSSKSDWLIGGAILTIQGIFVSVSFILQTHIMREYPEAFTVSILYILCISIVTSMIGLVVEKNNPSIWIIHFDITLFTIVTTGIITSVYYVIHSWAIRHKRPLYLAIFKPLSILIAVVMGTIFLNDSLYLGCLIGGILITLGFYVVMWGKANEEKNKLLSFSGKEKTPLLLSGKNDQI

SEQ ID NO: 84881 - protein, 333 aa, Arabidopsis thaliana
  peptide (1)..(333): Ceres Seq. ID no. 12677588
  misc_feature (6)..(131): Pfam Name: Integral membrane protein DUF6 Pfam Description: Integral membrane protein DUF6
  misc_feature (1)..(333): Homolog of NCBI NO: 30689045 NR Description: nodulin MtN21 family protein [Arabidopsis >gi|17381140|gb|AAL36382.1| unknown protein [Arabidopsis >gi|21436253|gb|AAM51265.1| unknown protein [Arabidopsis
  misc_feature (1)..(333): Homolog of NCBI NO: 18405642 NR Description: expressed protein; protein id: At3g28080.1,
  misc_feature (1)..(333): Homolog of NCBI NO: 21618226 NR Description: contains similarity to integral membrane protein
  misc_feature (1)..(333): Homolog of NCBI NO: 22331380 NR Description: unknown protein; protein id: At3g28070.1, by cDNA: gi_17529267 [Arabidopsis thaliana] unknown protein [Arabidopsis thaliana]
  misc_feature (1)..(328): Homolog of NCBI NO: 11994130 NR Description: contains similarity to integral membrane protein
  misc_feature (65)..(333): Homolog of NCBI NO: 11994129 NR Description: contains similarity to nodulin~gene_id:MMG15.13
  misc_feature (1)..(236): Homolog of NCBI NO: 11994127 NR Description: contains similarity to nodulin~gene_id:MMG15.11
  misc_feature (102)..(328): Homolog of NCBI NO: 15232901 NR Description: unknown protein; protein id: At3g28100.1
  misc_feature (64)..(333): Homolog of NCBI NO: 18405657 NR Description: expressed protein; protein id: At3g28130.1, by cDNA: gi_15146273 [Arabidopsis thaliana] AT3g28130/MMG15_14 [Arabidopsis thaliana]
  misc_feature (153)..(325): Homolog of NCBI NO: 10177508 NR Description: nodulin-like protein [Arabidopsis thaliana]
MLAGETSIVGLSTLFKVATSKGLNIYPFLSYSYLLASLLLLPSLFFTNSASILSKIGLLGFLGSMYVITGGIGIEYSNPTLASAIGNIVPALTFILAVIFRMEKVSFKERSSVAKVMGTILSLIGAFVVIFYHGPRVFVASSPPYLNFRQLSPPLSSSKSDWLIGGAILTIQGIFVSVSFILQTHIMREYPEAFTVSILYILCISIVTSMIGLVVEKNNPSIWIIHFDITLFTIVTTGIITSVYYVIHSWAIRHKRPLYLAIFKPLSILIAVVMGTIFLNDSLYLGCLIGGILITLGFYVVMWGKANEEKNKLLSFSGKEKTPLLLSGKNDQI

SEQ ID NO: 84882 - DNA, 703 bp, Arabidopsis thaliana
  misc_feature (1)..(703): Ceres Seq. ID no. 12677589
  misc_feature: MA Experiment ID: 108434 Result: Down-regulated in Transcription
  misc_feature: MA Experiment 108434 PARAMETER Experiment Name: At_Root_Tips_cDNA_P Parameter: Tissue Value: Root Tips
  misc_feature: MA Experiment ID: 108461 Result: Down-regulated in Transcription
  misc_feature: MA Experiment 108461 PARAMETER Experiment Name: At_Germinating_Seeds_cDNA_P Parameter: Age (day) Value: 1 vs. 0
  misc_feature: MA Experiment 108461 PARAMETER Experiment Name: At_Germinating_Seeds_cDNA_P Parameter: Tissue Value: Germinating Seeds
  misc_feature: MA Experiment ID: 108462 Result: Down-regulated in Transcription
  misc_feature: MA Experiment 108462 PARAMETER Experiment Name: At_Germinating_Seeds_cDNA_P Parameter: Age (day) Value: 2 vs. 0
  misc_feature: MA Experiment 108462 PARAMETER Experiment Name: At_Germinating_Seeds_cDNA_P Parameter: Tissue Value: Germinating Seeds
  misc_feature: MA Experiment ID: 108463 Result: Down-regulated in Transcription
  misc_feature: MA Experiment 108463 PARAMETER Experiment Name: At_Germinating_Seeds_cDNA_P Parameter: Age (day) Value: 3 vs. 0
  misc_feature: MA Experiment 108463 PARAMETER Experiment Name: At_Germinating_Seeds_cDNA_P Parameter: Tissue Value: Germinating Seeds
  misc_feature: MA Experiment ID: 108464 Result: Down-regulated in Transcription
  misc_feature: MA Experiment 108464 PARAMETER Experiment Name: At_Germinating_Seeds_cDNA_P Parameter: Age (day) Value: 4 vs. 0
  misc_feature: MA Experiment 108464 PARAMETER Experiment Name: At_Germinating_Seeds_cDNA_P Parameter: Tissue Value: Germinating Seeds
  misc_feature: MA Experiment ID: 108469 Result: Up-regulated in Transcription
  misc_feature: MA Experiment ID: 108488 Result: Down-regulated in Transcription
  misc_feature: MA Experiment ID: 108489 Result: Up-regulated in Transcription
  misc_feature: MA Experiment ID: 108561 Result: Up-regulated in Transcription
  misc_feature: MA Experiment 108561 PARAMETER Experiment Name: At_100uM_ABA_cDNA_P Parameter: Timepoint (hr) Value: 6
  misc_feature: MA Experiment 108561 PARAMETER Experiment Name: At_100uM_ABA_cDNA_P Parameter: Tissue Value: Aerial
  misc_feature: MA Experiment 108561 PARAMETER Experiment Name: At_100uM_ABA_cDNA_P Parameter: Treatment Value: 100uM ABA vs. No Treatment
  misc_feature: MA Experiment ID: 108573 Result: Up-regulated in Transcription
  misc_feature: MA Experiment 108573 PARAMETER Experiment Name: At_Drought_cDNA_P Parameter: Timepoint (hr) Value: 6
  misc_feature: MA Experiment 108573 PARAMETER Experiment Name: At_Drought_cDNA_P Parameter: Tissue Value: Aerial
  misc_feature: MA Experiment 108573 PARAMETER Experiment Name: At_Drought_cDNA_P Parameter: Treatment Value: Drought vs. No Drought
  misc_feature: MA Experiment ID: 108574 Result: Up-regulated in Transcription
  misc_feature: MA Experiment 108574 PARAMETER Experiment Name: At_Wounding__cDNA_P Parameter: Timepoint (hr) Value: 1
  misc_feature: MA Experiment 108574 PARAMETER Experiment Name: At_Wounding__cDNA_P Parameter: Tissue Value: Aerial
  misc_feature: MA Experiment 108574 PARAMETER Experiment Name: At_Wounding__cDNA_P Parameter: Treatment Value: Wounding vs. No Wounding
  misc_feature: MA Experiment ID: 108576 Result: Up-regulated in Transcription
  misc_feature: MA Experiment 108576 PARAMETER Experiment Name: At_42deg_Heat_cDNA_P Parameter: Temperature (deg C) Value: 42 vs. 22
  misc_feature: MA Experiment 108576 PARAMETER Experiment Name: At_42deg_Heat_cDNA_P Parameter: Timepoint (hr) Value: 1
  misc_feature: MA Experiment 108576 PARAMETER Experiment Name: At_42deg_Heat_cDNA_P Parameter: Tissue Value: Aerial
  misc_feature: MA Experiment ID: 108577 Result: Up-regulated in Transcription
  misc_feature: MA Experiment 108577 PARAMETER Experiment Name: At_42deg_Heat_cDNA_P Parameter: Temperature (deg C) Value: 42 vs. 22
  misc_feature: MA Experiment 108577 PARAMETER Experiment Name: At_42deg_Heat_cDNA_P Parameter: Timepoint (hr) Value: 6
  misc_feature: MA Experiment 108577 PARAMETER Experiment Name: At_42deg_Heat_cDNA_P Parameter: Tissue Value: Aerial
  misc_feature: MA Experiment ID: 108585 Result: Up-regulated in Transcription
  misc_feature: MA Experiment 108585 PARAMETER Experiment Name: At_5mM_NaNP_cDNA_P Parameter: Timepoint (hr) Value: 6
  misc_feature: MA Experiment 108585 PARAMETER Experiment Name: At_5mM_NaNP_cDNA_P Parameter: Tissue Value: Aerial
  misc_feature: MA Experiment 108585 PARAMETER Experiment Name: At_5mM_NaNP_cDNA_P Parameter: Treatment Value: null
  misc_feature: MA Experiment ID: 108595 Result: Up-regulated in Transcription
  misc_feature: MA Experiment 108595 PARAMETER Experiment Name: At_Ler-pi_Ovule_cDNA_P Parameter: Plant Line Value: null
  misc_feature: MA Experiment ID: 108607 Result: Up-regulated in Transcription
  misc_feature: MA Experiment 108607 PARAMETER Experiment Name: At_100uM_ABA_cDNA_P Parameter: Timepoint (hr) Value: 4
  misc_feature: MA Experiment 108607 PARAMETER Experiment Name: At_100uM_ABA_cDNA_P Parameter: Tissue Value: Aerial
  misc_feature: MA Experiment 108607 PARAMETER Experiment Name: At_100uM_ABA_cDNA_P Parameter: Treatment Value: 100uM ABA vs. No Treatment
  misc_feature: MA Experiment ID: 108608 Result: Up-regulated in Transcription
  misc_feature: MA Experiment 108608 PARAMETER Experiment Name: At_100uM_ABA_cDNA_P Parameter: Timepoint (hr) Value: 1
  misc_feature: MA Experiment 108608 PARAMETER Experiment Name: At_100uM_ABA_cDNA_P Parameter: Tissue Value: Aerial
  misc_feature: MA Experiment 108608 PARAMETER Experiment Name: At_100uM_ABA_cDNA_P Parameter: Treatment Value: 100uM ABA vs. No Treatment
  misc_feature: MA Experiment ID: 108667 Result: Up-regulated in Transcription
  misc_feature: MA Experiment 108667 PARAMETER Experiment Name: At_2mM_SA_cDNA_P Parameter: Plant Line Value: WS
  misc_feature: MA Experiment 108667 PARAMETER Experiment Name: At_2mM_SA_cDNA_P Parameter: Timepoint (hr) Value: 1
  misc_feature: MA Experiment 108667 PARAMETER Experiment Name: At_2mM_SA_cDNA_P Parameter: Treatment Value: 2mM SA vs. No Treatment
  misc_feature: MA Experiment ID: 108668 Result: Up-regulated in Transcription
  misc_feature: MA Experiment 108668 PARAMETER Experiment Name: At_2mM_SA_cDNA_P Parameter: Plant Line Value: WS
  misc_feature: MA Experiment 108668 PARAMETER Experiment Name: At_2mM_SA_cDNA_P Parameter: Timepoint (hr) Value: 6
  misc_feature: MA Experiment 108668 PARAMETER Experiment Name: At_2mM_SA_cDNA_P Parameter: Treatment Value: 2mM SA vs. No Treatment
  misc_feature: MA Experiment ID: 20000069 Result: Up-regulated in Transcription
  misc_feature: MA Experiment 20000069 PARAMETER Experiment Name: At_100uM_ABA_Mutants_cDNA_P Parameter: Plant Line Value: CS23
  misc_feature: MA Experiment 20000069 PARAMETER Experiment Name: At_100uM_ABA_Mutants_cDNA_P Parameter: Timepoint (hr) Value: 6
  misc_feature: MA Experiment 20000069 PARAMETER Experiment Name: At_100uM_ABA_Mutants_cDNA_P Parameter: Tissue Value: Aerial
  misc_feature: MA Experiment 20000069 PARAMETER Experiment Name: At_100uM_ABA_Mutants_cDNA_P Parameter: Treatment Value: 100uM ABA vs. No Treatment
  misc_feature: MA Experiment ID: 20000070 Result: Up-regulated in Transcription
  misc_feature: MA Experiment 20000070 PARAMETER Experiment Name: At_100uM_ABA_Mutants_cDNA_P Parameter: Plant Line Value: CS24
  misc_feature: MA Experiment 20000070 PARAMETER Experiment Name: At_100uM_ABA_Mutants_cDNA_P Parameter: Timepoint (hr) Value: 6
  misc_feature: MA Experiment 20000070 PARAMETER Experiment Name: At_100uM_ABA_Mutants_cDNA_P Parameter: Tissue Value: Aerial
  misc_feature: MA Experiment 20000070 PARAMETER Experiment Name: At_100uM_ABA_Mutants_cDNA_P Parameter: Treatment Value: 100uM ABA vs. No Treatment
  misc_feature: MA Experiment ID: 20000071 Result: Up-regulated in Transcription
  misc_feature: MA Experiment 20000071 PARAMETER Experiment Name: At_100uM_ABA_Mutants_cDNA_P Parameter: Plant Line Value: CS8104
  misc_feature: MA Experiment 20000071 PARAMETER Experiment Name: At_100uM_ABA_Mutants_cDNA_P Parameter: Timepoint (hr) Value: 6
  misc_feature: MA Experiment 20000071 PARAMETER Experiment Name: At_100uM_ABA_Mutants_cDNA_P Parameter: Tissue Value: Aerial
  misc_feature: MA Experiment 20000071 PARAMETER Experiment Name: At_100uM_ABA_Mutants_cDNA_P Parameter: Treatment Value: 100uM ABA vs. No Treatment
  misc_feature: MA Experiment ID: 20000072 Result: Up-regulated in Transcription
  misc_feature: MA Experiment 20000072 PARAMETER Experiment Name: At_100uM_ABA_Mutants_cDNA_P Parameter: Plant Line Value: CS8105
  misc_feature: MA Experiment 20000072 PARAMETER Experiment Name: At_100uM_ABA_Mutants_cDNA_P Parameter: Timepoint (hr) Value: 6
  misc_feature: MA Experiment 20000072 PARAMETER Experiment Name: At_100uM_ABA_Mutants_cDNA_P Parameter: Tissue Value: Aerial
  misc_feature: MA Experiment 20000072 PARAMETER Experiment Name: At_100uM_ABA_Mutants_cDNA_P Parameter: Treatment Value: 100uM ABA vs. No Treatment
  misc_feature: MA Experiment ID: 20000086 Result: Up-regulated in Transcription
  misc_feature: MA Experiment 20000086 PARAMETER Experiment Name: At_100uM_ABA_Mutants_cDNA_P Parameter: Plant Line Value: CS22
  misc_feature: MA Experiment 20000086 PARAMETER Experiment Name: At_100uM_ABA_Mutants_cDNA_P Parameter: Timepoint (hr) Value: 6
  misc_feature: MA Experiment 20000086 PARAMETER Experiment Name: At_100uM_ABA_Mutants_cDNA_P Parameter: Tissue Value: Aerial
  misc_feature: MA Experiment 20000086 PARAMETER Experiment Name: At_100uM_ABA_Mutants_cDNA_P Parameter: Treatment Value: 100uM ABA vs. No Treatment
  misc_feature: MA Experiment ID: 20000087 Result: Up-regulated in Transcription
  misc_feature: MA Experiment 20000087 PARAMETER Experiment Name: At_100uM_ABA_Mutants_cDNA_P Parameter: Plant Line Value: WS
  misc_feature: MA Experiment 20000087 PARAMETER Experiment Name: At_100uM_ABA_Mutants_cDNA_P Parameter: Timepoint (hr) Value: 6
  misc_feature: MA Experiment 20000087 PARAMETER Experiment Name: At_100uM_ABA_Mutants_cDNA_P Parameter: Tissue Value: Aerial
  misc_feature: MA Experiment 20000087 PARAMETER Experiment Name: At_100uM_ABA_Mutants_cDNA_P Parameter: Treatment Value: 100uM ABA vs. No Treatment
  misc_feature: MA Experiment ID: 20000112 Result: Up-regulated in Transcription
  misc_feature: MA Experiment 20000112 PARAMETER Experiment Name: At_42deg_Heat_cDNA_P Parameter: Temperature (deg C) Value: 42 vs. 22
  misc_feature: MA Experiment 20000112 PARAMETER Experiment Name: At_42deg_Heat_cDNA_P Parameter: Timepoint (hr) Value: 2
  misc_feature: MA Experiment 20000112 PARAMETER Experiment Name: At_42deg_Heat_cDNA_P Parameter: Tissue Value: Aerial
  misc_feature: MA Experiment ID: 20000113 Result: Up-regulated in Transcription
  misc_feature: MA Experiment 20000113 PARAMETER Experiment Name: At_42deg_Heat_cDNA_P Parameter: Temperature (deg C) Value: 42 vs. 22
  misc_feature: MA Experiment 20000113 PARAMETER Experiment Name: At_42deg_Heat_cDNA_P Parameter: Timepoint (hr) Value: 8
  misc_feature: MA Experiment 20000113 PARAMETER Experiment Name: At_42deg_Heat_cDNA_P Parameter: Tissue Value: Aerial
  misc_feature: MA Experiment ID: 20000117 Result: Up-regulated in Transcription
  misc_feature: MA Experiment 20000117 PARAMETER Experiment Name: At_100uM_ABA_Mutants_cDNA_P Parameter: Plant Line Value: Columbia
  misc_feature: MA Experiment 20000117 PARAMETER Experiment Name: At_100uM_ABA_Mutants_cDNA_P Parameter: Timepoint (hr) Value: 6
  misc_feature: MA Experiment 20000117 PARAMETER Experiment Name: At_100uM_ABA_Mutants_cDNA_P Parameter: Tissue Value: Aerial
  misc_feature: MA Experiment 20000117 PARAMETER Experiment Name: At_100uM_ABA_Mutants_cDNA_P Parameter: Treatment Value: 100uM ABA vs. No Treatment
  misc_feature: MA Experiment ID: 20000144 Result: Up-regulated in Transcription
  misc_feature: MA Experiment 20000144 PARAMETER Experiment Name: At_42deg_Heat_cDNA_P Parameter: Temperature (deg C) Value: 42 vs. 22
  misc_feature: MA Experiment 20000144 PARAMETER Experiment Name: At_42deg_Heat_cDNA_P Parameter: Timepoint (hr) Value: 1
  misc_feature: MA Experiment 20000144 PARAMETER Experiment Name: At_42deg_Heat_cDNA_P Parameter: Tissue Value: Aerial
  misc_feature: MA Experiment ID: 20000166 Result: Up-regulated in Transcription
  misc_feature: MA Experiment 20000166 PARAMETER Experiment Name: At_100uM_ABA_P Parameter: Age (day) Value: 14
  misc_feature: MA Experiment 20000166 PARAMETER Experiment Name: At_100uM_ABA_P Parameter: Organism Value: A. thaliana
  misc_feature: MA Experiment 20000166 PARAMETER Experiment Name: At_100uM_ABA_P Parameter: Plant Line Value: WS
  misc_feature: MA Experiment 20000166 PARAMETER Experiment Name: At_100uM_ABA_P Parameter: Timepoint (hr) Value: 1
  misc_feature: MA Experiment 20000166 PARAMETER Experiment Name: At_100uM_ABA_P Parameter: Tissue Value: Aerial
  misc_feature: MA Experiment 20000166 PARAMETER Experiment Name: At_100uM_ABA_P Parameter: Treatment Value: 100uM ABA vs. No Treatment
  misc_feature: MA Experiment ID: 20000171 Result: Up-regulated in Transcription
  misc_feature: MA Experiment 20000171 PARAMETER Experiment Name: At_42deg_Heat_P Parameter: Age (day) Value: 14
  misc_feature: MA Experiment 20000171 PARAMETER Experiment Name: At_42deg_Heat_P Parameter: Organism Value: A. thaliana
  misc_feature: MA Experiment 20000171 PARAMETER Experiment Name: At_42deg_Heat_P Parameter: Plant Line Value: WS
  misc_feature: MA Experiment 20000171 PARAMETER Experiment Name: At_42deg_Heat_P Parameter: Temperature (deg C) Value: 42 vs. 22
  misc_feature: MA Experiment 20000171 PARAMETER Experiment Name: At_42deg_Heat_P Parameter: Timepoint (hr) Value: 1
  misc_feature: MA Experiment 20000171 PARAMETER Experiment Name: At_42deg_Heat_P Parameter: Tissue Value: Aerial
  misc_feature: MA Experiment ID: 20000173 Result: Up-regulated in Transcription
  misc_feature: MA Experiment 20000173 PARAMETER Experiment Name: At_42deg_Heat_P Parameter: Age (day) Value: 14
  misc_feature: MA Experiment 20000173 PARAMETER Experiment Name: At_42deg_Heat_P Parameter: Organism Value: A. thaliana
  misc_feature: MA Experiment 20000173 PARAMETER Experiment Name: At_42deg_Heat_P Parameter: Plant Line Value: WS
  misc_feature: MA Experiment 20000173 PARAMETER Experiment Name: At_42deg_Heat_P Parameter: Temperature (deg C) Value: 42 vs. 22
  misc_feature: MA Experiment 20000173 PARAMETER Experiment Name: At_42deg_Heat_P Parameter: Timepoint (hr) Value: 6
  misc_feature: MA Experiment 20000173 PARAMETER Experiment Name: At_42deg_Heat_P Parameter: Tissue Value: Aerial
  misc_feature: MA Experiment ID: 20000179 Result: Down-regulated in Transcription
  misc_feature: MA Experiment 20000179 PARAMETER Experiment Name: At_Germinating_Seeds_P Parameter: Age (hr) Value: 6 vs. 0
  misc_feature: MA Experiment 20000179 PARAMETER Experiment Name: At_Germinating_Seeds_P Parameter: Tissue Value: Germinating Seeds
  misc_feature: MA Experiment ID: 20000180 Result: Down-regulated in Transcription
  misc_feature: MA Experiment 20000180 PARAMETER Experiment Name: At_Germinating_Seeds_P Parameter: Age (hr) Value: 24 vs. 0
  misc_feature: MA Experiment 20000180 PARAMETER Experiment Name: At_Germinating_Seeds_P Parameter: Tissue Value: Germinating Seeds
  misc_feature: MA Experiment ID: 20000182 Result: Up-regulated in Transcription
  misc_feature: MA Experiment 20000182 PARAMETER Experiment Name: At_2mM_SA_P Parameter: Age (day) Value: 14
  misc_feature: MA Experiment 20000182 PARAMETER Experiment Name: At_2mM_SA_P Parameter: Organism Value: A. thaliana
  misc_feature: MA Experiment 20000182 PARAMETER Experiment Name: At_2mM_SA_P Parameter: Plant Line Value: WS
  misc_feature: MA Experiment 20000182 PARAMETER Experiment Name: At_2mM_SA_P Parameter: Timepoint (hr) Value: 6
  misc_feature: MA Experiment 20000182 PARAMETER Experiment Name: At_2mM_SA_P Parameter: Tissue Value: Aerial
  misc_feature: MA Experiment 20000182 PARAMETER Experiment Name: At_2mM_SA_P Parameter: Treatment Value: 2mM SA vs. No Treatment
  misc_feature: MA Experiment ID: 20000184 Result: Down-regulated in Transcription
  misc_feature: MA Experiment 20000184 PARAMETER Experiment Name: At_Shoots__P Parameter: Age (day) Value: 7
  misc_feature: MA Experiment 20000184 PARAMETER Experiment Name: At_Shoots__P Parameter: Tissue Value: Shoots vs. Whole Plant
  misc_feature: MA Experiment ID: 20000234 Result: Down-regulated in Transcription
  misc_feature: MA Experiment 20000234 PARAMETER Experiment Name: At_Siliques_P Parameter: Age (day) Value: 21
  misc_feature: MA Experiment 20000234 PARAMETER Experiment Name: At_Siliques_P Parameter: Organism Value: A. thaliana
  misc_feature: MA Experiment 20000234 PARAMETER Experiment Name: At_Siliques_P Parameter: Plant Line Value: WS
  misc_feature: MA Experiment 20000234 PARAMETER Experiment Name: At_Siliques_P Parameter: Tissue Value: Less Than 5mm Siliques vs. Whole Plant
  misc_feature: MA Experiment ID: 20000235 Result: Down-regulated in Transcription
  misc_feature: MA Experiment 20000235 PARAMETER Experiment Name: At_Siliques_P Parameter: Age (day) Value: 21
  misc_feature: MA Experiment 20000235 PARAMETER Experiment Name: At_Siliques_P Parameter: Organism Value: A. thaliana
  misc_feature: MA Experiment 20000235 PARAMETER Experiment Name: At_Siliques_P Parameter: Plant Line Value: WS
  misc_feature: MA Experiment 20000235 PARAMETER Experiment Name: At_Siliques_P Parameter: Tissue Value: 5-10mm Siliques vs. Whole Plant
  misc_feature: MA Experiment ID: 20000264 Result: Down-regulated in Transcription
  misc_feature: MA Experiment 20000264 PARAMETER Experiment Name: At_Open_Flower_P Parameter: Age (day) Value: 21
  misc_feature: MA Experiment 20000264 PARAMETER Experiment Name: At_Open_Flower_P Parameter: Plant Line Value: WS
  misc_feature: MA Experiment 20000264 PARAMETER Experiment Name: At_Open_Flower_P Parameter: Tissue Value: Open Flower vs. Whole Plant
  misc_feature: MA Experiment ID: 20000265 Result: Down-regulated in Transcription
  misc_feature: MA Experiment 20000265 PARAMETER Experiment Name: At_Open_Flower_P Parameter: Age (day) Value: 21
  misc_feature: MA Experiment 20000265 PARAMETER Experiment Name: At_Open_Flower_P Parameter: Plant Line Value: WS
  misc_feature: MA Experiment 20000265 PARAMETER Experiment Name: At_Open_Flower_P Parameter: Tissue Value: Closed Flower vs. Whole Plant
  misc_feature: MA Experiment ID: 20000286 Result: Down-regulated in Transcription
  misc_feature: MA Experiment 20000286 PARAMETER Experiment Name: At_Open_Flower_P Parameter: Age (day) Value: 21
  misc_feature: MA Experiment 20000286 PARAMETER Experiment Name: At_Open_Flower_P Parameter: Plant Line Value: WS
  misc_feature: MA Experiment 20000286 PARAMETER Experiment Name: At_Open_Flower_P Parameter: Tissue Value: Half Open vs. Whole Plant
  misc_feature: MA Experiment ID: 20000437 Result: Up-regulated in Transcription
  misc_feature: MA Experiment 20000437 PARAMETER Experiment Name: At_Drought_P Parameter: Age (day) Value: 8
  misc_feature: MA Experiment 20000437 PARAMETER Experiment Name: At_Drought_P Parameter: Organism Value: A. thaliana
  misc_feature: MA Experiment 20000437 PARAMETER Experiment Name: At_Drought_P Parameter: Plant Line Value: WS
  misc_feature: MA Experiment 20000437 PARAMETER Experiment Name: At_Drought_P Parameter: Timepoint (hr) Value: 24
  misc_feature: MA Experiment 20000437 PARAMETER Experiment Name: At_Drought_P Parameter: Tissue Value: Whole Plant
  misc_feature: MA Experiment 20000437 PARAMETER Experiment Name: At_Drought_P Parameter: Treatment Value: Drought vs. No Drought
  misc_feature: MA Experiment ID: 20000438 Result: Down-regulated in Transcription
  misc_feature: MA Experiment 20000438 PARAMETER Experiment Name: At_Shoots__P Parameter: Age (day) Value: 14
  misc_feature: MA Experiment 20000438 PARAMETER Experiment Name: At_Shoots__P Parameter: Tissue Value: Shoots vs. Whole Plant
  misc_feature: MA Experiment ID: 20000453 Result: Up-regulated in Transcription
  misc_feature: MA Experiment 20000453 PARAMETER Experiment Name: At_100uM_ABA_P Parameter: Age (day) Value: 15
  misc_feature: MA Experiment 20000453 PARAMETER Experiment Name: At_100uM_ABA_P Parameter: Organism Value: A. thaliana
  misc_feature: MA Experiment 20000453 PARAMETER Experiment Name: At_100uM_ABA_P Parameter: Plant Line Value: WS
  misc_feature: MA Experiment 20000453 PARAMETER Experiment Name: At_100uM_ABA_P Parameter: Timepoint (hr) Value: 24
  misc_feature: MA Experiment 20000453 PARAMETER Experiment Name: At_100uM_ABA_P Parameter: Tissue Value: Aerial
  misc_feature: MA Experiment 20000453 PARAMETER Experiment Name: At_100uM_ABA_P Parameter: Treatment Value: 100uM ABA vs. No Treatment
  misc_feature: MA Experiment ID: 20000456 Result: Up-regulated in Transcription
  misc_feature: MA Experiment 20000456 PARAMETER Experiment Name: At_100uM_BA_P Parameter: Age (day) Value: 14
  misc_feature: MA Experiment 20000456 PARAMETER Experiment Name: At_100uM_BA_P Parameter: Organism Value: A. thaliana
  misc_feature: MA Experiment 20000456 PARAMETER Experiment Name: At_100uM_BA_P Parameter: Plant Line Value: WS
  misc_feature: MA Experiment 20000456 PARAMETER Experiment Name: At_100uM_BA_P Parameter: Timepoint (hr) Value: 6
  misc_feature: MA Experiment 20000456 PARAMETER Experiment Name: At_100uM_BA_P Parameter: Tissue Value: Aerial
  misc_feature: MA Experiment 20000456 PARAMETER Experiment Name: At_100uM_BA_P Parameter: Treatment Value: 100uM BA vs. No Treatment
  misc_feature: MA Experiment ID: 20000460 Result: Up-regulated in Transcription
  misc_feature: MA Experiment 20000460 PARAMETER Experiment Name: At_10percent_PEG_P Parameter: Age (day) Value: 12
  misc_feature: MA Experiment 20000460 PARAMETER Experiment Name: At_10percent_PEG_P Parameter: Organism Value: A. thaliana
  misc_feature: MA Experiment 20000460 PARAMETER Experiment Name: At_10percent_PEG_P Parameter: Plant Line Value: WS
  misc_feature: MA Experiment 20000460 PARAMETER Experiment Name: At_10percent_PEG_P Parameter: Timepoint (day) Value: 12
  misc_feature: MA Experiment 20000460 PARAMETER Experiment Name: At_10percent_PEG_P Parameter: Tissue Value: Whole Plant
  misc_feature: MA Experiment 20000460 PARAMETER Experiment Name: At_10percent_PEG_P Parameter: Treatment Value: 10percent PEG vs. No Treatment
  misc_feature: MA Experiment ID: 20000506 Result: Up-regulated in Transcription
  misc_feature: MA Experiment 20000506 PARAMETER Experiment Name: At_Wounding_P Parameter: Organism Value: A. thaliana
  misc_feature: MA Experiment 20000506 PARAMETER Experiment Name: At_Wounding_P Parameter: Plant Line Value: WS
  misc_feature: MA Experiment 20000506 PARAMETER Experiment Name: At_Wounding_P Parameter: Timepoint (hr) Value: 6
  misc_feature: MA Experiment 20000506 PARAMETER Experiment Name: At_Wounding_P Parameter: Tissue Value: Aerial
  misc_feature: MA Experiment 20000506 PARAMETER Experiment Name: At_Wounding_P Parameter: Treatment Value: Wounding vs. No Wounding
  misc_feature: MA Experiment ID: 20000527 Result: Down-regulated in Transcription
  misc_feature: MA Experiment 20000527 PARAMETER Experiment Name: At_10percent_PEG_P Parameter: Age (day) Value: 20
  misc_feature: MA Experiment 20000527 PARAMETER Experiment Name: At_10percent_PEG_P Parameter: Organism Value: A. thaliana
  misc_feature: MA Experiment 20000527 PARAMETER Experiment Name: At_10percent_PEG_P Parameter: Plant Line Value: WS
  misc_feature: MA Experiment 20000527 PARAMETER Experiment Name: At_10percent_PEG_P Parameter: Timepoint (day) Value: 20
  misc_feature: MA Experiment 20000527 PARAMETER Experiment Name: At_10percent_PEG_P Parameter: Tissue Value: Whole Plant
  misc_feature: MA Experiment 20000527 PARAMETER Experiment Name: At_10percent_PEG_P Parameter: Treatment Value: 10percent PEG vs. No Treatment
  misc_feature: MA Experiment ID: 20000574 Result: Up-regulated in Transcription
  misc_feature: MA Experiment 20000574 PARAMETER Experiment Name: At_100uM_ABA_Mutants__P Parameter: Organism Value: A. thaliana
  misc_feature: MA Experiment 20000574 PARAMETER Experiment Name: At_100uM_ABA_Mutants__P Parameter: Plant Line Value: CS23 vs. Ler wt
  misc_feature: MA Experiment 20000574 PARAMETER Experiment Name: At_100uM_ABA_Mutants__P Parameter: Timepoint (hr) Value: N/A
  misc_feature: MA Experiment 20000574 PARAMETER Experiment Name: At_100uM_ABA_Mutants__P Parameter: Tissue Value: Whole Plant
  misc_feature: MA Experiment 20000574 PARAMETER Experiment Name: At_100uM_ABA_Mutants__P Parameter: Treatment Value: None
  misc_feature: MA Experiment ID: 20000576 Result: Down-regulated in Transcription
  misc_feature: MA Experiment 20000576 PARAMETER Experiment Name: At_100uM_ABA_Mutants__P Parameter: Organism Value: A. thaliana
  misc_feature: MA Experiment 20000576 PARAMETER Experiment Name: At_100uM_ABA_Mutants__P Parameter: Plant Line Value: CS23
  misc_feature: MA Experiment 20000576 PARAMETER Experiment Name: At_100uM_ABA_Mutants__P Parameter: Timepoint (hr) Value: 6
  misc_feature: MA Experiment 20000576 PARAMETER Experiment Name: At_100uM_ABA_Mutants__P Parameter: Tissue Value: Whole Plant
  misc_feature: MA Experiment 20000576 PARAMETER Experiment Name: At_100uM_ABA_Mutants__P Parameter: Treatment Value: 1uM ABA vs. No Treatment
  misc_feature: MA Experiment ID: 20000709 Result: Up-regulated in Transcription
  misc_feature: MA Experiment 20000709 PARAMETER Experiment Name: At_15mM_NH4NO3_L-to-H_P Parameter: Age (hr) Value: 14
  misc_feature: MA Experiment 20000709 PARAMETER Experiment Name: At_15mM_NH4NO3_L-to-H_P Parameter: Organism Value: A. thaliana
  misc_feature: MA Experiment 20000709 PARAMETER Experiment Name: At_15mM_NH4NO3_L-to-H_P Parameter: Plant Line Value: WS
  misc_feature: MA Experiment 20000709 PARAMETER Experiment Name: At_15mM_NH4NO3_L-to-H_P Parameter: Timepoint (hr) Value: 4
  misc_feature: MA Experiment 20000709 PARAMETER Experiment Name: At_15mM_NH4NO3_L-to-H_P Parameter: Tissue Value: Aerial
  misc_feature: MA Experiment 20000709 PARAMETER Experiment Name: At_15mM_NH4NO3_L-to-H_P Parameter: Treatment Value: 15mM NH4NO3 vs. 30mM Mannitol
  misc_feature: MA Experiment ID: 20000794 Result: Down-regulated in Transcription
  misc_feature: MA Experiment 20000794 PARAMETER Experiment Name: At_Petals_P Parameter: Age (day) Value: 23-25 days
  misc_feature: MA Experiment 20000794 PARAMETER Experiment Name: At_Petals_P Parameter: Plant Line Value: WS
  misc_feature: MA Experiment 20000794 PARAMETER Experiment Name: At_Petals_P Parameter: Tissue Value: Petals vs. Whole plant
  misc_feature: MA Experiment ID: 20001247 Result: Up-regulated in Transcription
  misc_feature: MA Experiment 20001247 PARAMETER Experiment Name: At_Far-red-induction_P Parameter: Age (day) Value: 7
  misc_feature: MA Experiment 20001247 PARAMETER Experiment Name: At_Far-red-induction_P Parameter: Light Value: Far-red vs. White
  misc_feature: MA Experiment 20001247 PARAMETER Experiment Name: At_Far-red-induction_P Parameter: Organism Value: A. thaliana
  misc_feature: MA Experiment 20001247 PARAMETER Experiment Name: At_Far-red-induction_P Parameter: Plant Line Value: Columbia
  misc_feature: MA Experiment 20001247 PARAMETER Experiment Name: At_Far-red-induction_P Parameter: Timepoint (hr) Value: 1
  misc_feature: MA Experiment 20001247 PARAMETER Experiment Name: At_Far-red-induction_P Parameter: Tissue Value: Whole Plant
  misc_feature: MA Experiment ID: 20001557 Result: Up-regulated in Transcription
  misc_feature: MA Experiment 20001557 PARAMETER Experiment Name: At_Drought_Soil_Dry_P Parameter: Age (day) Value: 27
  misc_feature: MA Experiment 20001557 PARAMETER Experiment Name: At_Drought_Soil_Dry_P Parameter: Organism Value: A. thaliana
  misc_feature: MA Experiment 20001557 PARAMETER Experiment Name: At_Drought_Soil_Dry_P Parameter: Plant Line Value: WS
  misc_feature: MA Experiment 20001557 PARAMETER Experiment Name: At_Drought_Soil_Dry_P Parameter: Post Timepoint (hr) Value: 3
  misc_feature: MA Experiment 20001557 PARAMETER Experiment Name: At_Drought_Soil_Dry_P Parameter: Post-Treatment Value: Re-Water vs. No Drought
  misc_feature: MA Experiment 20001557 PARAMETER Experiment Name: At_Drought_Soil_Dry_P Parameter: Timepoint (day) Value: 13
  misc_feature: MA Experiment 20001557 PARAMETER Experiment Name: At_Drought_Soil_Dry_P Parameter: Treatment Value: Drought vs. No Drought
  misc_feature: MA Experiment ID: 20001558 Result: Up-regulated in Transcription
  misc_feature: MA Experiment 20001558 PARAMETER Experiment Name: At_Drought_Soil_Dry_P Parameter: Age (day) Value: 27
  misc_feature: MA Experiment 20001558 PARAMETER Experiment Name: At_Drought_Soil_Dry_P Parameter: Organism Value: A. thaliana
  misc_feature: MA Experiment 20001558 PARAMETER Experiment Name: At_Drought_Soil_Dry_P Parameter: Plant Line Value: WS
  misc_feature: MA Experiment 20001558 PARAMETER Experiment Name: At_Drought_Soil_Dry_P Parameter: Post Timepoint (hr) Value: 6
  misc_feature: MA Experiment 20001558 PARAMETER Experiment Name: At_Drought_Soil_Dry_P Parameter: Post-Treatment Value: Re-Water vs. No Drought
  misc_feature: MA Experiment 20001558 PARAMETER Experiment Name: At_Drought_Soil_Dry_P Parameter: Timepoint (day) Value: 13
  misc_feature: MA Experiment 20001558 PARAMETER Experiment Name: At_Drought_Soil_Dry_P Parameter: Treatment Value: Drought vs. No Drought
  misc_feature: MA Experiment ID: 20001560 Result: Up-regulated in Transcription
  misc_feature: MA Experiment 20001560 PARAMETER Experiment Name: At_Drought_Soil_Dry_P Parameter: Age (day) Value: 28
  misc_feature: MA Experiment 20001560 PARAMETER Experiment Name: At_Drought_Soil_Dry_P Parameter: Organism Value: A. thaliana
  misc_feature: MA Experiment 20001560 PARAMETER Experiment Name: At_Drought_Soil_Dry_P Parameter: Plant Line Value: WS
  misc_feature: MA Experiment 20001560 PARAMETER Experiment Name: At_Drought_Soil_Dry_P Parameter: Post Timepoint (hr) Value: None
  misc_feature: MA Experiment 20001560 PARAMETER Experiment Name: At_Drought_Soil_Dry_P Parameter: Post-Treatment Value: None
  misc_feature: MA Experiment 20001560 PARAMETER Experiment Name: At_Drought_Soil_Dry_P Parameter: Timepoint (day) Value: 14
  misc_feature: MA Experiment 20001560 PARAMETER Experiment Name: At_Drought_Soil_Dry_P Parameter: Treatment Value: Drought vs. No Drought
  misc_feature: MA Experiment ID: 20001772 Result: Down-regulated in Transcription
  misc_feature: MA Experiment 20001772 PARAMETER Experiment Name: At_Far-red-enriched-adult_P Parameter: Age (day) Value: 29
  misc_feature: MA Experiment 20001772 PARAMETER Experiment Name: At_Far-red-enriched-adult_P Parameter: Light Value: Far-red enriched vs. White
  misc_feature: MA Experiment 20001772 PARAMETER Experiment Name: At_Far-red-enriched-adult_P Parameter: Organism Value: A. thaliana
  misc_feature: MA Experiment 20001772 PARAMETER Experiment Name: At_Far-red-enriched-adult_P Parameter: Plant Line Value: Columbia
  misc_feature: MA Experiment 20001772 PARAMETER Experiment Name: At_Far-red-enriched-adult_P Parameter: Timepoint (hr) Value: 24
  misc_feature: MA Experiment 20001772 PARAMETER Experiment Name: At_Far-red-enriched-adult_P Parameter: Tissue Value: Aerial
  misc_feature: MA Experiment ID: 20001773 Result: Down-regulated in Transcription
  misc_feature: MA Experiment 20001773 PARAMETER Experiment Name: At_Far-red-enriched-adult_P Parameter: Age (day) Value: 30
  misc_feature: MA Experiment 20001773 PARAMETER Experiment Name: At_Far-red-enriched-adult_P Parameter: Light Value: Far-red enriched vs. White
  misc_feature: MA Experiment 20001773 PARAMETER Experiment Name: At_Far-red-enriched-adult_P Parameter: Organism Value: A. thaliana
  misc_feature: MA Experiment 20001773 PARAMETER Experiment Name: At_Far-red-enriched-adult_P Parameter: Plant Line Value: Columbia
  misc_feature: MA Experiment 20001773 PARAMETER Experiment Name: At_Far-red-enriched-adult_P Parameter: Timepoint (hr) Value: 48
  misc_feature: MA Experiment 20001773 PARAMETER Experiment Name: At_Far-red-enriched-adult_P Parameter: Tissue Value: Aerial
  misc_feature: MA Experiment ID: 20001904 Result: Up-regulated in Transcription
  misc_feature: MA Experiment 20001904 PARAMETER Experiment Name: At_Drought_Reproduction_P Parameter: Age (day) Value: 37
  misc_feature: MA Experiment 20001904 PARAMETER Experiment Name: At_Drought_Reproduction_P Parameter: Organism Value: A. thaliana
  misc_feature: MA Experiment 20001904 PARAMETER Experiment Name: At_Drought_Reproduction_P Parameter: Plant Line Value: WS
  misc_feature: MA Experiment 20001904 PARAMETER Experiment Name: At_Drought_Reproduction_P Parameter: Timepoint (day) Value: 7
  misc_feature: MA Experiment 20001904 PARAMETER Experiment Name: At_Drought_Reproduction_P Parameter: Tissue Value: Rosettes
  misc_feature: MA Experiment 20001904 PARAMETER Experiment Name: At_Drought_Reproduction_P Parameter: Treatment Value: Drought vs. No Drought
  misc_feature: MA Experiment ID: 20001911 Result: Up-regulated in Transcription
  misc_feature: MA Experiment 20001911 PARAMETER Experiment Name: At_Drought_Reproduction_P Parameter: Age (day) Value: 40
  misc_feature: MA Experiment 20001911 PARAMETER Experiment Name: At_Drought_Reproduction_P Parameter: Organism Value: A. thaliana
  misc_feature: MA Experiment 20001911 PARAMETER Experiment Name: At_Drought_Reproduction_P Parameter: Plant Line Value: WS
  misc_feature: MA Experiment 20001911 PARAMETER Experiment Name: At_Drought_Reproduction_P Parameter: Timepoint (day) Value: 10
  misc_feature: MA Experiment 20001911 PARAMETER Experiment Name: At_Drought_Reproduction_P Parameter: Tissue Value: Flowers
  misc_feature: MA Experiment 20001911 PARAMETER Experiment Name: At_Drought_Reproduction_P Parameter: Treatment Value: Drought vs. No Drought
atagaacaacaacaacaacaacaagaagaacacacgaagaagaagaagagaagcttatggcaggaggaggaacagaagcgtttcctgatcttggagagcattgccaagaccctgattgcaaattactcgattttctcccttttacttgcgacggctgcaaattggtgttttgtttggagcatagatcatacaagtcacataactgtccgaaatccgatcatgggagcagaacggtttccatctgtgaaacatgttcaatagcgattgaaacaactggttttgatgaaaaaggaatcaaatctttgcttgagaaacacgaaagatccggagattgtgatccaaacaagaaaaagaaaccaacgtgtcctgtaaaacgttgcaaagagattctgacttttgcgaataaccttacttgcaaatattgtggagtcaagttctgtttgaaacaccggtttccgacagatcatgtctgtaacaagaagatcattaataccgcgggaacaagctcgaggtggaacgagaggtttatggaagctttgagtttaagaaaccagaaagggtgtggaagagggagctctgtttcatcaaaatcttcaccatcagttagatcgttttagtttcttctcttgtaacaatagtttgcatcaaccaattccttctttatgttctcatgtattttccattgtttgcaagaaagaagatt

SEQ ID NO: 84883 - protein, 204 aa, Arabidopsis thaliana
  peptide (1)..(204): Ceres Seq. ID no. 12677590
  misc_feature (121)..(166): Pfam Name: AN1-like Zinc finger Pfam Description: AN1-like Zinc finger
  misc_feature (19)..(204): Homolog of NCBI NO: 15232930 NR Description: zinc finger protein (PMZ), putative; protein id:
  misc_feature (23)..(197): Homolog of NCBI NO: 30688811 NR Description: zinc finger protein (PMZ) -related [Arabidopsis >gi|17529076|gb|AAL38748.1| unknown protein [Arabidopsis >gi|20465575|gb|AAM20270.1| unknown protein [Arabidopsis
  misc_feature (23)..(198): Homolog of NCBI NO: 15230311 NR Description: putative protein; protein id: At3g57480.1
  misc_feature (23)..(157): Homolog of NCBI NO: 33146779 NR Description: putative arsenite inducible RNA associated
  misc_feature (27)..(192): Homolog of NCBI NO: 33416395 NR Description: Unknown (protein for MGC:66295) [Danio rerio]
  misc_feature (27)..(201): Homolog of NCBI NO: 21312112 NR Description: RIKEN cDNA 1110060O18 [Mus musculus]
  misc_feature (27)..(200): Homolog of NCBI NO: 15079311 NR Description: RIKEN cDNA 1110060O18 gene [Mus musculus]
  misc_feature (27)..(158): Homolog of NCBI NO: 34876869 NR Description: similar to RIKEN cDNA 1110060O18 [Rattus
  misc_feature (27)..(157): Homolog of NCBI NO: 34871288 NR Description: similar to arsenite inducible RNA associated
  misc_feature (27)..(158): Homolog of NCBI NO: 20270357 NR Description: hypothetical protein BC018415 [Homo sapiens]
RTTTTTTRRTHEEEEEKLMAGGGTEAFPDLGEHCQDPDCKLLDFLPFTCDGCKLVFCLEHRSYKSHNCPKSDHGSRTVSICETCSIAIETTGFDEKGIKSLLEKHERSGDCDPNKKKKPTCPVKRCKEILTFANNLTCKYCGVKFCLKHRFPTDHVCNKKIINTAGTSSRWNERFMEALSLRNQKGCGRGSSVSSKSSPSVRSF

SEQ ID NO: 84884 - protein, 186 aa, Arabidopsis thaliana; identical to SEQ ID NO: 77756
  peptide (1)..(186): Ceres Seq. ID no. 12677591
  misc_feature (103)..(148): Pfam Name: AN1-like Zinc finger Pfam Description: AN1-like Zinc finger
  misc_feature (1)..(186): Homolog of NCBI NO: 15232930 NR Description: zinc finger protein (PMZ), putative; protein id:
  misc_feature (5)..(179): Homolog of NCBI NO: 30688811 NR Description: zinc finger protein (PMZ) -related [Arabidopsis >gi|17529076|gb|AAL38748.1| unknown protein [Arabidopsis >gi|20465575|gb|AAM20270.1| unknown protein [Arabidopsis
  misc_feature (5)..(180): Homolog of NCBI NO: 15230311 NR Description: putative protein; protein id: At3g57480.1
  misc_feature (5)..(139): Homolog of NCBI NO: 33146779 NR Description: putative arsenite inducible RNA associated
  misc_feature (9)..(174): Homolog of NCBI NO: 33416395 NR Description: Unknown (protein for MGC:66295) [Danio rerio]
  misc_feature (9)..(183): Homolog of NCBI NO: 21312112 NR Description: RIKEN cDNA 1110060O18 [Mus musculus]
  misc_feature (9)..(182): Homolog of NCBI NO: 15079311 NR Description: RIKEN cDNA 1110060O18 gene [Mus musculus]
  misc_feature (9)..(140): Homolog of NCBI NO: 34876869 NR Description: similar to RIKEN cDNA 1110060O18 [Rattus
  misc_feature (9)..(139): Homolog of NCBI NO: 34871288 NR Description: similar to arsenite inducible RNA associated
  misc_feature (9)..(140): Homolog of NCBI NO: 20270357 NR Description: hypothetical protein BC018415 [Homo sapiens]

SEQ ID NO: 84885 - DNA, 966 bp, Arabidopsis thaliana
  misc_feature (1)..(966): Ceres Seq. ID no. 12677596
  misc_feature: MA Experiment ID: 20000495 Result: Down-regulated in Transcription
  misc_feature: MA Experiment 20000495 PARAMETER Experiment Name: At_Guard_Cells_P Parameter: Harvest Date Value: 8/2/2002
  misc_feature: MA Experiment 20000495 PARAMETER Experiment Name: At_Guard_Cells_P Parameter: Organism Value: A. thaliana
  misc_feature: MA Experiment 20000495 PARAMETER Experiment Name: At_Guard_Cells_P Parameter: Tissue Value: Guard Cells vs. Leaves
atggcgggaatagctttagttttagatctactgaagaaatctcaatctaagaacactctccactcatcttccttctattccgccgcctctgctccttttgcgtctaggtttctcttcggttcttttgagcctagagttgcgtattgtgatgctgctgctgcaatagatgatgattaccttggtgctatacggaaaatgtctgcggatgttttgcagcgtcaaccccttgcgtatatttctaggtccaaggaatacaatatccagccaaaaccagttctctcggcctttgagttcagggcacttgcaatgactacagtgagatcccttttgatgttttatttgcctcttttggagcctaaaacggcttcagaggatgatgatgatttcctaaacaatgctgcagaagaaaaccgccacacagacttgattgttcctcttaaaaagtcagcaaagcaaattgcccgtgagaccacagttgtgaccactcggagagtccttgaaaggctggctctgagttatgtctcacagcgtatggcatggaaacttctaaaggatgtgcctcagtcggctttacgcaaggctcagagagggttgccgacacatgtatatatctttaaagtcagccaaacaactcttagaggtcacttcctgggaatcgcagcatcatgggtagttcaagtaggcattgaaatctacagatgtgtgttcccgaatgttaaacccgaggaagaagaagaagaggagaaagtcgagatatcacagcaagctaaggatctcggaaacaaagttgtgggtatcacagtacgatgtggcgcgtccttagtatttgctgccattggagccgggatatgttcttgccttatccgtccctccacgggccaatggatcggttgcgcgctgggagacttggctggtccgatggttgtttcggtttgcctgcagaagactcttcaagctgattattaa

SEQ ID NO: 84886 - protein, 321 aa, Arabidopsis thaliana
  peptide (1)..(321): Ceres Seq. ID no. 12677597
  misc_feature (1)..(321): Homolog of NCBI NO: 15240548 NR Description: unknown protein; protein id: At5g55610.1 thaliana] >gi|9758595|dbj|BAB09228.1| gene_id:MDF20.5~unknown [Arabidopsis thaliana] >gi|27754360|gb|AAO22629.1| unknown
  misc_feature (1)..(69): Homolog of NCBI NO: 15215588 NR Description: AT5g55610/MDF20_5 [Arabidopsis thaliana] AT5g55610/MDF20_5 [Arabidopsis thaliana]
  misc_feature (1)..(69): Homolog of NCBI NO: 21592482 NR Description: unknown [Arabidopsis thaliana]
MAGIALVLDLLKKSQSKNTLHSSSFYSAASAPFASRFLFGSFEPRVAYCDAAAAIDDDYLGAIRKMSADVLQRQPLAYISRSKEYNIQPKPVLSAFEFRALAMTTVRSLLMFYLPLLEPKTASEDDDDFLNNAAEENRHTDLIVPLKKSAKQIARETTVVTTRRVLERLALSYVSQRMAWKLLKDVPQSALRKAQRGLPTHVYIFKVSQTTLRGHFLGIAASWVVQVGIEIYRCVFPNVKPEEEEEEEKVEISQQAKDLGNKVVGITVRCGASLVFAAIGAGICSCLIRPSTGQWIGCALGDLAGPMVVSVCLQKTLQADY

SEQ ID NO: 84887 - protein, 256 aa, Arabidopsis thaliana; identical to SEQ ID NO: 49027
  peptide (1)..(256): Ceres Seq. ID no. 12677598
  misc_feature (1)..(256): Homolog of NCBI NO: 15240548 NR Description: unknown protein; protein id: At5g55610.1 thaliana] >gi|9758595|dbj|BAB09228.1| gene_id:MDF20.5~unknown [Arabidopsis thaliana] >gi|27754360|gb|AAO22629.1| unknown

SEQ ID NO: 84888 - protein, 219 aa, Arabidopsis thaliana; identical to SEQ ID NO: 49028
  peptide (1)..(219): Ceres Seq. ID no. 12677599
  misc_feature (1)..(219): Homolog of NCBI NO: 15240548 NR Description: unknown protein; protein id: At5g55610.1 thaliana] >gi|9758595|dbj|BAB09228.1| gene_id:MDF20.5~unknown [Arabidopsis thaliana] >gi|27754360|gb|AAO22629.1| unknown

SEQ ID NO: 84889 - DNA, 1145 bp, Arabidopsis thaliana
  misc_feature (1)..(1145): Ceres Seq. ID no. 12677668
  misc_feature: MA Experiment ID: 108579 Result: Down-regulated in Transcription
  misc_feature: MA Experiment 108579 PARAMETER Experiment Name: At_4deg_Cold_cDNA_P Parameter: Temperature (deg C) Value: 4 vs. 22
  misc_feature: MA Experiment 108579 PARAMETER Experiment Name: At_4deg_Cold_cDNA_P Parameter: Timepoint (hr) Value: 6
  misc_feature: MA Experiment 108579 PARAMETER Experiment Name: At_4deg_Cold_cDNA_P Parameter: Tissue Value: Aerial
  misc_feature: MA Experiment ID: 108595 Result: Down-regulated in Transcription
  misc_feature: MA Experiment 108595 PARAMETER Experiment Name: At_Ler-pi_Ovule_cDNA_P Parameter: Plant Line Value: null
  misc_feature: MA Experiment ID: 20000224 Result: Down-regulated in Transcription
gcttcatttttttctccgaccaaacaagttccgggtgttttgaaagaaccccgacaatggcgtggaacgtgttcaagttctgcacagcacttcgcgccttgggttcgatcatgatcttaattgttatcgggatcatcggattcacatactacgccgttgtcgtcgttaattacggacctgctctactgatcggtggtgtcgattcattactatctgttctcgtcttagcgttcttccactttctgcttataatgctactgtggagttatttctctgttgttgtgacggaccctggtggtgttccaacgggttggaggccagaattagacatagagaaaagcgagggaaaccaagctttgattggagaagcttcggttggagattcctcgtctcatggtgtaagatattgtagaaagtgcaatcaatataaaccgcctcgttctcaccattgttcagtctgtggaagatgcatactaaagatggaccatcactgtgtttgggtggtgaattgtgttggtgcaaataactacaaatcatttctcctattcttgttttacacatttcttgagacaacggtggttgcagtatcactattgccaattttcctcgtattcttcagcgatggagatggtgatataaccgtatcaccaggaagcctagcagccagctttgttgcatttgtattgaacatagcatttgccctaagtgtcctaggcttcctaataatgcacataatgttggtcgctcgtaacaccacaactattgaggcgtatgagaagcatacagtgaactggccatacaacgttggtcgtaagacaaactttgaacaggtttttggaagtgataaaatgtattggttcgtgccattgtacacggaagacgataagaagaagttgccagcacttggagggttagactttacgagcaggtcggagtccgagacagagccgcttcagtctctatgaccttacaaacttgaaatttttggaagtgtgtcttctgctttgtgtatgtatcaatcaaatattatatcaaacattgtcttgtgtattataaagattagtgcctattgtggaatttgtatctttttatttcgtgaaaagaaatttctcaaacttcttaaatataccattttcacatttgct

SEQ ID NO: 84890 - protein, 320 aa, Arabidopsis thaliana; identical to SEQ ID NO: 24443
  peptide (1)..(320): Ceres Seq. ID no. 12677669
  misc_feature (125)..(189): Pfam Name: DHHC zinc finger domain Pfam Description: DHHC zinc finger domain
  misc_feature (19)..(320): Homolog of NCBI NO: 18416000 NR Description: Expressed protein; protein id: At4g22750.1, by cDNA: 38360., supported by cDNA: gi_14334549, supported by gi_17065617 [Arabidopsis thaliana] >gi|14334550|gb|AAK59683.1|
  misc_feature (19)..(320): Homolog of NCBI NO: 21593364 NR Description: unknown [Arabidopsis thaliana]
  misc_feature (15)..(320): Homolog of NCBI NO: 7486880 NR Description: hypothetical protein T12H17.140 - Arabidopsis >gi|2827552|emb|CAA16560.1| predicted protein [Arabidopsis >gi|7269121|emb|CAB79230.1| predicted protein [Arabidopsis
  misc_feature (18)..(315): Homolog of NCBI NO: 22331887 NR Description: putative protein; protein id: At3g60800.1, by cDNA: gi_20466004 [Arabidopsis thaliana] unknown protein [Arabidopsis thaliana]
  misc_feature (159)..(315): Homolog of NCBI NO: 11358343 NR Description: hypothetical protein T4C21.210 - Arabidopsis >gi|7329690|emb|CAB82684.1| putative protein [Arabidopsis
  misc_feature (19)..(139): Homolog of NCBI NO: 11358343 NR Description: hypothetical protein T4C21.210 - Arabidopsis >gi|7329690|emb|CAB82684.1| putative protein [Arabidopsis
  misc_feature (84)..(241): Homolog of NCBI NO: 18411456 NR Description: hypothetical protein; protein id: At4g00840.1
  misc_feature (227)..(277): Homolog of NCBI NO: 18411456 NR Description: hypothetical protein; protein id: At4g00840.1
  misc_feature (6)..(305): Homolog of NCBI NO: 29791459 NR Description: Similar to RIKEN cDNA 5033406L14 gene [Homo
  misc_feature (26)..(299): Homolog of NCBI NO: 19921954 NR Description: CG1407-PB [Drosophila melanogaster]

SEQ ID NO: 84891 - protein, 302 aa, Arabidopsis thaliana; identical to SEQ ID NO: 24444
  peptide (1)..(302): Ceres Seq. ID no. 12677670
  misc_feature (107)..(171): Pfam Name: DHHC zinc finger domain Pfam Description: DHHC zinc finger domain
  misc_feature (1)..(302): Homolog of NCBI NO: 18416000 NR Description: Expressed protein; protein id: At4g22750.1, by cDNA: 38360., supported by cDNA: gi_14334549, supported by gi_17065617 [Arabidopsis thaliana] >gi|14334550|gb|AAK59683.1|
  misc_feature (1)..(302): Homolog of NCBI NO: 21593364 NR Description: unknown [Arabidopsis thaliana]
  misc_feature (1)..(302): Homolog of NCBI NO: 7486880 NR Description: hypothetical protein T12H17.140 - Arabidopsis >gi|2827552|emb|CAA16560.1| predicted protein [Arabidopsis >gi|7269121|emb|CAB79230.1| predicted protein [Arabidopsis
  misc_feature (1)..(297): Homolog of NCBI NO: 22331887 NR Description: putative protein; protein id: At3g60800.1, by cDNA: gi_20466004 [Arabidopsis thaliana] unknown protein [Arabidopsis thaliana]
  misc_feature (141)..(297): Homolog of NCBI NO: 11358343 NR Description: hypothetical protein T4C21.210 - Arabidopsis >gi|7329690|emb|CAB82684.1| putative protein [Arabidopsis
  misc_feature (1)..(121): Homolog of NCBI NO: 11358343 NR Description: hypothetical protein T4C21.210 - Arabidopsis >gi|7329690|emb|CAB82684.1| putative protein [Arabidopsis
  misc_feature (66)..(223): Homolog of NCBI NO: 18411456 NR Description: hypothetical protein; protein id: At4g00840.1
  misc_feature (209)..(259): Homolog of NCBI NO: 18411456 NR Description: hypothetical protein; protein id: At4g00840.1
  misc_feature (1)..(287): Homolog of NCBI NO: 29791459 NR Description: Similar to RIKEN cDNA 5033406L14 gene [Homo
  misc_feature (8)..(281): Homolog of NCBI NO: 19921954 NR Description: CG1407-PB [Drosophila melanogaster]

SEQ ID NO: 84892 - protein, 284 aa, Arabidopsis thaliana; identical to SEQ ID NO: 24445
  peptide (1)..(284): Ceres Seq. ID no. 12677671
  misc_feature (89)..(153): Pfam Name: DHHC zinc finger domain Pfam Description: DHHC zinc finger domain
  misc_feature (1)..(284): Homolog of NCBI NO: 18416000 NR Description: Expressed protein; protein id: At4g22750.1, by cDNA: 38360., supported by cDNA: gi_14334549, supported by gi_17065617 [Arabidopsis thaliana] >gi|14334550|gb|AAK59683.1|
  misc_feature (1)..(284): Homolog of NCBI NO: 21593364 NR Description: unknown [Arabidopsis thaliana]
  misc_feature (1)..(284): Homolog of NCBI NO: 7486880 NR Description: hypothetical protein T12H17.140 - Arabidopsis >gi|2827552|emb|CAA16560.1| predicted protein [Arabidopsis >gi|7269121|emb|CAB79230.1| predicted protein [Arabidopsis
  misc_feature (1)..(279): Homolog of NCBI NO: 22331887 NR Description: putative protein; protein id: At3g60800.1, by cDNA: gi_20466004 [Arabidopsis thaliana] unknown protein [Arabidopsis thaliana]
  misc_feature (123)..(279): Homolog of NCBI NO: 11358343 NR Description: hypothetical protein T4C21.210 - Arabidopsis >gi|7329690|emb|CAB82684.1| putative protein [Arabidopsis
  misc_feature (1)..(103): Homolog of NCBI NO: 11358343 NR Description: hypothetical protein T4C21.210 - Arabidopsis >gi|7329690|emb|CAB82684.1| putative protein [Arabidopsis
  misc_feature (48)..(205): Homolog of NCBI NO: 18411456 NR Description: hypothetical protein; protein id: At4g00840.1
  misc_feature (191)..(241): Homolog of NCBI NO: 18411456 NR Description: hypothetical protein; protein id: At4g00840.1
  misc_feature (1)..(269): Homolog of NCBI NO: 29791459 NR Description: Similar to RIKEN cDNA 5033406L14 gene [Homo
  misc_feature (1)..(263): Homolog of NCBI NO: 19921954 NR Description: CG1407-PB [Drosophila melanogaster]

SEQ ID NO: 84893 - DNA, 2011 bp, Arabidopsis thaliana
  misc_feature (1)..(2011): Ceres Seq. ID no. 12677711
  misc_feature: MA Experiment ID: 20000171 Result: Down-regulated in Transcription
  misc_feature: MA Experiment 20000171 PARAMETER Experiment Name: At_42deg_Heat_P Parameter: Age (day) Value: 14
  misc_feature: MA Experiment 20000171 PARAMETER Experiment Name: At_42deg_Heat_P Parameter: Organism Value: A. thaliana
  misc_feature: MA Experiment 20000171 PARAMETER Experiment Name: At_42deg_Heat_P Parameter: Plant Line Value: WS
  misc_feature: MA Experiment 20000171 PARAMETER Experiment Name: At_42deg_Heat_P Parameter: Temperature (deg C) Value: 42 vs. 22
  misc_feature: MA Experiment 20000171 PARAMETER Experiment Name: At_42deg_Heat_P Parameter: Timepoint (hr) Value: 1
  misc_feature: MA Experiment 20000171 PARAMETER Experiment Name: At_42deg_Heat_P Parameter: Tissue Value: Aerial
  misc_feature: MA Experiment ID: 20000173 Result: Down-regulated in Transcription
  misc_feature: MA Experiment 20000173 PARAMETER Experiment Name: At_42deg_Heat_P Parameter: Age (day) Value: 14
  misc_feature: MA Experiment 20000173 PARAMETER Experiment Name: At_42deg_Heat_P Parameter: Organism Value: A. thaliana
  misc_feature: MA Experiment 20000173 PARAMETER Experiment Name: At_42deg_Heat_P Parameter: Plant Line Value: WS
  misc_feature: MA Experiment 20000173 PARAMETER Experiment Name: At_42deg_Heat_P Parameter: Temperature (deg C) Value: 42 vs. 22
  misc_feature: MA Experiment 20000173 PARAMETER Experiment Name: At_42deg_Heat_P Parameter: Timepoint (hr) Value: 6
  misc_feature: MA Experiment 20000173 PARAMETER Experiment Name: At_42deg_Heat_P Parameter: Tissue Value: Aerial
  misc_feature: MA Experiment ID: 20000184 Result: Down-regulated in Transcription
  misc_feature: MA Experiment 20000184 PARAMETER Experiment Name: At_Shoots__P Parameter: Age (day) Value: 7
  misc_feature: MA Experiment 20000184 PARAMETER Experiment Name: At_Shoots__P Parameter: Tissue Value: Shoots vs. Whole Plant
  misc_feature: MA Experiment ID: 20000234 Result: Down-regulated in Transcription
  misc_feature: MA Experiment 20000234 PARAMETER Experiment Name: At_Siliques_P Parameter: Age (day) Value: 21
  misc_feature: MA Experiment 20000234 PARAMETER Experiment Name: At_Siliques_P Parameter: Organism Value: A. thaliana
  misc_feature: MA Experiment 20000234 PARAMETER Experiment Name: At_Siliques_P Parameter: Plant Line Value: WS
  misc_feature: MA Experiment 20000234 PARAMETER Experiment Name: At_Siliques_P Parameter: Tissue Value: Less Than 5mm Siliques vs. Whole Plant
  misc_feature: MA Experiment ID: 20000235 Result: Down-regulated in Transcription
  misc_feature: MA Experiment 20000235 PARAMETER Experiment Name: At_Siliques_P Parameter: Age (day) Value: 21
  misc_feature: MA Experiment 20000235 PARAMETER Experiment Name: At_Siliques_P Parameter: Organism Value: A. thaliana
  misc_feature: MA Experiment 20000235 PARAMETER Experiment Name: At_Siliques_P Parameter: Plant Line Value: WS
  misc_feature: MA Experiment 20000235 PARAMETER Experiment Name: At_Siliques_P Parameter: Tissue Value: 5-10mm Siliques vs. Whole Plant
  misc_feature: MA Experiment ID: 20000264 Result: Down-regulated in Transcription
  misc_feature: MA Experiment 20000264 PARAMETER Experiment Name: At_Open_Flower_P Parameter: Age (day) Value: 21
  misc_feature: MA Experiment 20000264 PARAMETER Experiment Name: At_Open_Flower_P Parameter: Plant Line Value: WS
  misc_feature: MA Experiment 20000264 PARAMETER Experiment Name: At_Open_Flower_P Parameter: Tissue Value: Open Flower vs. Whole Plant
  misc_feature: MA Experiment ID: 20000265 Result: Down-regulated in Transcription
  misc_feature: MA Experiment 20000265 PARAMETER Experiment Name: At_Open_Flower_P Parameter: Age (day) Value: 21
  misc_feature: MA Experiment 20000265 PARAMETER Experiment Name: At_Open_Flower_P Parameter: Plant Line Value: WS
  misc_feature: MA Experiment 20000265 PARAMETER Experiment Name: At_Open_Flower_P Parameter: Tissue Value: Closed Flower vs. Whole Plant
  misc_feature: MA Experiment ID: 20000794 Result: Down-regulated in Transcription
  misc_feature: MA Experiment 20000794 PARAMETER Experiment Name: At_Petals_P Parameter: Age (day) Value: 23-25 days
  misc_feature: MA Experiment 20000794 PARAMETER Experiment Name: At_Petals_P Parameter: Plant Line Value: WS
  misc_feature: MA Experiment 20000794 PARAMETER Experiment Name: At_Petals_P Parameter: Tissue Value: Petals vs. Whole plant
atgtcttctctcttccctttcatattccttttccttttctcattcctcactagcttcagagcttctgctcaagatcctcgtttcctagcctattattgtccaaatgcaacaacttactcaagtaacagcacttacttgaccaatcttaaaacccttttgtcctctctctcttcccgcaacgcctcttactccaccggattccaaaacgccacggtgggacaagcccttgacagggtcaccggacttttcctttgccggggagacgtctcgccggaagtttgccgtaactgcgtcacctttgccgtcaacaacacctttagtaggtgtccgaatcagagagaagctgtgttctattacgaggagtgcatactcagatactctcacaagaatattctatcgacggccattacaaacgaaggagaatttatcttgaggaaccccaatcatatttctcctattcaaaatcaaataaaccagtttactaatttggtgttatctaatatgaaccaaattgccatcgaagcagccgacaatcctagaaaattctctacgataaagaccgaattgaccgcactccagactttctacgggcttgttcaatgcactcctgatctttcaagacaaaactgcatgaactgtctgacaagttccatcaatagaatgccattttctagaattggagcaagacagttttggccaagttgtaattcaaggtacgagctttacgatttctacaacgaaaccgccattggtacaccaccaccgccgctgcctccgttggcatctccttcactatctgataaaagtgggaattcaaatgtggtcgtggtagccgttgttgtgcctatcatagtcgctgttctgattttcatagctggttattgtttctttgcaaagagggcaaagaagacttatggcacaacacctgctttagatgaagatgataaaacaaccatagagtcgctgcaacttgattatagagcaattcaagctgcaacaaatgatttttcagagaataataaaattggtcgaggaggttttggtgacgtttacaagggtacattttcaaatggaaccgaagttgcagtgaagagactgtcgaaaacatcagaacaaggtgacacagaattcaagaacgaggttgtagttgttgcaaatcttcggcacaaaaatcttgttaggattctcggattttctatagaacgagaagaaaggatattggtctacgagtatgtagaaaataaaagccttgataacttcctatttgatcctgcaaagaaaggtcagttgtactggacacagcgataccatatcattggtgggattgctagagggatcctatatcttcatcaagattcacgactcacaatcatacaccgtgaccttaaagcgagtaacattctcctggatgctgatatgaatcctaaaattgctgattttggaatggcaaggatctttggaatggatcaaacccagcagaacacaagcagaatagttggtacctacggttacatgtctcctgaatatgcgatgcgtggccagttctcaatgaaatctgatgtctatagtttcggagtgttagttcttgagattataagcggtaggaagaacaacagctttatcgagacagatgacgcacaggacttggtgacacatgcttggaggctttggagaaacggaacagcgttagacctcgtggatccattcattgcagatagttgccggaagagtgaagtggttcgatgcacccatatcggtcttttatgtgttcaagaagatcctgtaaaacgtccagccatgtcaaccatttccgtgatgctcactagtaatacaatggctttaccagcgcctcagcaaccagggttttttgttaggagtagacctggaacaaaccggcttgattcagatcaatcaacgaccaacaagtctgttacagtatctattgacgataagtcaatgtctgatttagatcctcgttgaatatggtgttattaaaccttacgattgaaat

SEQ ID NO: 84894 - protein, 659 aa, Arabidopsis thaliana
  peptide (1)..(659): Ceres Seq. ID no. 12677712
  misc_feature (79)..(133): Pfam Name: Domain of unknown function DUF26 Pfam Description: Domain of unknown function DUF26
  misc_feature (266)..(659): Homolog of NCBI NO: 7488194 NR Description: probable serine/threonine-specific protein kinase
  misc_feature (8)..(266): Homolog of NCBI NO: 7488194 NR Description: probable serine/threonine-specific protein kinase
  misc_feature (1)..(659): Homolog of NCBI NO: 18416076 NR Description: serine threonine kinase - like protein; protein At4g23140.1, supported by cDNA: gi_13506746 [Arabidopsis
  misc_feature (1)..(659): Homolog of NCBI NO: 15236415 NR Description: putative protein; protein id: At4g23160.1
  misc_feature (1)..(151): Homolog of NCBI NO: 7488194 NR Description: probable serine/threonine-specific protein kinase
  misc_feature (1)..(659): Homolog of NCBI NO: 7488193 NR Description: probable serine/threonine-specific protein kinase
  misc_feature (1)..(659): Homolog of NCBI NO: 24417476 NR Description: unknown [Arabidopsis thaliana]
  misc_feature (1)..(659): Homolog of NCBI NO: 30686087 NR Description: serine/threonine kinase -related protein
  misc_feature (1)..(659): Homolog of NCBI NO: 13506745 NR Description: receptor-like protein kinase 4 [Arabidopsis
  misc_feature (314)..(659): Homolog of NCBI NO: 7488195 NR Description: probable serine/threonine-specific protein kinase
MSSLFPFIFLFLFSFLTSFRASAQDPRFLAYYCPNATTYSSNSTYLTNLKTLLSSLSSRNASYSTGFQNATVGQALDRVTGLFLCRGDVSPEVCRNCVTFAVNNTFSRCPNQREAVFYYEECILRYSHKNILSTAITNEGEFILRNPNHISPIQNQINQFTNLVLSNMNQIAIEAADNPRKFSTIKTELTALQTFYGLVQCTPDLSRQNCMNCLTSSINRMPFSRIGARQFWPSCNSRYELYDFYNETAIGTPPPPLPPLASPSLSDKSGNSNVVVVAVVVPIIVAVLIFIAGYCFFAKRAKKTYGTTPALDEDDKTTIESLQLDYRAIQAATNDFSENNKIGRGGFGDVYKGTFSNGTEVAVKRLSKTSEQGDTEFKNEVVVVANLRHKNLVRILGFSIEREERILVYEYVENKSLDNFLFDPAKKGQLYWTQRYHIIGGIARGILYLHQDSRLTIIHRDLKASNILLDADMNPKIADFGMARIFGMDQTQQNTSRIVGTYGYMSPEYAMRGQFSMKSDVYSFGVLVLEIISGRKNNSFIETDDAQDLVTHAWRLWRNGTALDLVDPFIADSCRKSEVVRCTHIGLLCVQEDPVKRPAMSTISVMLTSNTMALPAPQQPGFFVRSRPGTNRLDSDQSTTNKSVTVSIDDKSMSDLDPR

SEQ ID NO: 84895 - protein, 492 aa, Arabidopsis thaliana
  peptide (1)..(492): Ceres Seq. ID no. 12677713
  misc_feature (99)..(492): Homolog of NCBI NO: 7488194 NR Description: probable serine/threonine-specific protein kinase
  misc_feature (1)..(99): Homolog of NCBI NO: 7488194 NR Description: probable serine/threonine-specific protein kinase
  misc_feature (1)..(492): Homolog of NCBI NO: 18416076 NR Description: serine threonine kinase - like protein; protein At4g23140.1, supported by cDNA: gi_13506746 [Arabidopsis
  misc_feature (1)..(492): Homolog of NCBI NO: 15236415 NR Description: putative protein; protein id: At4g23160.1
  misc_feature (1)..(492): Homolog of NCBI NO: 7488193 NR Description: probable serine/threonine-specific protein kinase
  misc_feature (1)..(492): Homolog of NCBI NO: 24417476 NR Description: unknown [Arabidopsis thaliana]
  misc_feature (1)..(492): Homolog of NCBI NO: 30686087 NR Description: serine/threonine kinase -related protein
  misc_feature (1)..(492): Homolog of NCBI NO: 13506745 NR Description: receptor-like protein kinase 4 [Arabidopsis
  misc_feature (147)..(492): Homolog of NCBI NO: 7488195 NR Description: probable serine/threonine-specific protein kinase
  misc_feature (1)..(107): Homolog of NCBI NO: 7488195 NR Description: probable serine/threonine-specific protein kinase
MNQIAIEAADNPRKFSTIKTELTALQTFYGLVQCTPDLSRQNCMNCLTSSINRMPFSRIGARQFWPSCNSRYELYDFYNETAIGTPPPPLPPLASPSLSDKSGNSNVVVVAVVVPIIVAVLIFIAGYCFFAKRAKKTYGTTPALDEDDKTTIESLQLDYRAIQAATNDFSENNKIGRGGFGDVYKGTFSNGTEVAVKRLSKTSEQGDTEFKNEVVVVANLRHKNLVRILGFSIEREERILVYEYVENKSLDNFLFDPAKKGQLYWTQRYHIIGGIARGILYLHQDSRLTIIHRDLKASNILLDADMNPKIADFGMARIFGMDQTQQNTSRIVGTYGYMSPEYAMRGQFSMKSDVYSFGVLVLEIISGRKNNSFIETDDAQDLVTHAWRLWRNGTALDLVDPFIADSCRKSEVVRCTHIGLLCVQEDPVKRPAMSTISVMLTSNTMALPAPQQPGFFVRSRPGTNRLDSDQSTTNKSVTVSIDDKSMSDLDPR

SEQ ID NO: 84896 - protein, 449 aa, Arabidopsis thaliana
  peptide (1)..(449): Ceres Seq. ID no. 12677714
  misc_feature (56)..(449): Homolog of NCBI NO: 7488194 NR Description: probable serine/threonine-specific protein kinase
  misc_feature (1)..(56): Homolog of NCBI NO: 7488194 NR Description: probable serine/threonine-specific protein kinase
  misc_feature (1)..(449): Homolog of NCBI NO: 18416076 NR Description: serine threonine kinase - like protein; protein At4g23140.1, supported by cDNA: gi_13506746 [Arabidopsis
  misc_feature (1)..(449): Homolog of NCBI NO: 15236415 NR Description: putative protein; protein id: At4g23160.1
  misc_feature (1)..(449): Homolog of NCBI NO: 7488193 NR Description: probable serine/threonine-specific protein kinase
  misc_feature (1)..(449): Homolog of NCBI NO: 24417476 NR Description: unknown [Arabidopsis thaliana]
  misc_feature (1)..(449): Homolog of NCBI NO: 30686087 NR Description: serine/threonine kinase -related protein
  misc_feature (1)..(449): Homolog of NCBI NO: 13506745 NR Description: receptor-like protein kinase 4 [Arabidopsis
  misc_feature (104)..(449): Homolog of NCBI NO: 7488195 NR Description: probable serine/threonine-specific protein kinase
  misc_feature (1)..(64): Homolog of NCBI NO: 7488195 NR Description: probable serine/threonine-specific protein kinase
MNCLTSSINRMPFSRIGARQFWPSCNSRYELYDFYNETAIGTPPPPLPPLASPSLSDKSGNSNVVVVAVVVPIIVAVLIFIAGYCFFAKRAKKTYGTTPALDEDDKTTIESLQLDYRAIQAATNDFSENNKIGRGGFGDVYKGTFSNGTEVAVKRLSKTSEQGDTEFKNEVVVVANLRHKNLVRILGFSIEREERILVYEYVENKSLDNFLFDPAKKGQLYWTQRYHIIGGIARGILYLHQDSRLTIIHRDLKASNILLDADMNPKIADFGMARIFGMDQTQQNTSRIVGTYGYMSPEYAMRGQFSMKSDVYSFGVLVLEIISGRKNNSFIETDDAQDLVTHAWRLWRNGTALDLVDPFIADSCRKSEVVRCTHIGLLCVQEDPVKRPAMSTISVMLTSNTMALPAPQQPGFFVRSRPGTNRLDSDQSTTNKSVTVSIDDKSMSDLDPR

SEQ ID NO: 84897 - DNA, 982 bp, Arabidopsis thaliana
  misc_feature (1)..(982): Ceres Seq. ID no. 12677723
  misc_feature: MA Experiment ID: 20000185 Result: Up-regulated in Transcription
  misc_feature: MA Experiment 20000185 PARAMETER Experiment Name: At_Roots__P Parameter: Age (day) Value: 7 vs. 21
  misc_feature: MA Experiment 20000185 PARAMETER Experiment Name: At_Roots__P Parameter: Organism Value: A. thaliana
  misc_feature: MA Experiment 20000185 PARAMETER Experiment Name: At_Roots__P Parameter: Tissue Value: Roots vs. Whole Plant
  misc_feature: MA Experiment ID: 20000439 Result: Up-regulated in Transcription
  misc_feature: MA Experiment 20000439 PARAMETER Experiment Name: At_Roots__P Parameter: Age (day) Value: 14 vs. 21
  misc_feature: MA Experiment 20000439 PARAMETER Experiment Name: At_Roots__P Parameter: Organism Value: A. thaliana
  misc_feature: MA Experiment 20000439 PARAMETER Experiment Name: At_Roots__P Parameter: Tissue Value: Roots vs. Whole Plant
  misc_feature: MA Experiment ID: 20000495 Result: Down-regulated in Transcription
  misc_feature: MA Experiment 20000495 PARAMETER Experiment Name: At_Guard_Cells_P Parameter: Harvest Date Value: 8/2/2002
  misc_feature: MA Experiment 20000495 PARAMETER Experiment Name: At_Guard_Cells_P Parameter: Organism Value: A. thaliana
  misc_feature: MA Experiment 20000495 PARAMETER Experiment Name: At_Guard_Cells_P Parameter: Tissue Value: Guard Cells vs. Leaves
  misc_feature: MA Experiment ID: 20000496 Result: Down-regulated in Transcription
  misc_feature: MA Experiment 20000496 PARAMETER Experiment Name: At_Guard_Cells_P Parameter: Harvest Date Value: 7/19/2002
  misc_feature: MA Experiment 20000496 PARAMETER Experiment Name: At_Guard_Cells_P Parameter: Organism Value: Canola
  misc_feature: MA Experiment 20000496 PARAMETER Experiment Name: At_Guard_Cells_P Parameter: Tissue Value: Guard Cells vs. Leaves
  misc_feature: MA Experiment ID: 20001451 Result: Down-regulated in Transcription
  misc_feature: MA Experiment 20001451 PARAMETER Experiment Name: At_Far-red-induction_P Parameter: Age (day) Value: 7
  misc_feature: MA Experiment 20001451 PARAMETER Experiment Name: At_Far-red-induction_P Parameter: Light Value: Far-red vs. White
  misc_feature: MA Experiment 20001451 PARAMETER Experiment Name: At_Far-red-induction_P Parameter: Organism Value: A. thaliana
  misc_feature: MA Experiment 20001451 PARAMETER Experiment Name: At_Far-red-induction_P Parameter: Plant Line Value: Columbia
  misc_feature: MA Experiment 20001451 PARAMETER Experiment Name: At_Far-red-induction_P Parameter: Timepoint (hr) Value: 24
  misc_feature: MA Experiment 20001451 PARAMETER Experiment Name: At_Far-red-induction_P Parameter: Tissue Value: Whole Plant
  misc_feature: MA Experiment ID: 20001557 Result: Down-regulated in Transcription
  misc_feature: MA Experiment 20001557 PARAMETER Experiment Name: At_Drought_Soil_Dry_P Parameter: Age (day) Value: 27
  misc_feature: MA Experiment 20001557 PARAMETER Experiment Name: At_Drought_Soil_Dry_P Parameter: Organism Value: A. thaliana
  misc_feature: MA Experiment 20001557 PARAMETER Experiment Name: At_Drought_Soil_Dry_P Parameter: Plant Line Value: WS
  misc_feature: MA Experiment 20001557 PARAMETER Experiment Name: At_Drought_Soil_Dry_P Parameter: Post Timepoint (hr) Value: 3
  misc_feature: MA Experiment 20001557 PARAMETER Experiment Name: At_Drought_Soil_Dry_P Parameter: Post-Treatment Value: Re-Water vs. No Drought
  misc_feature: MA Experiment 20001557 PARAMETER Experiment Name: At_Drought_Soil_Dry_P Parameter: Timepoint (day) Value: 13
  misc_feature: MA Experiment 20001557 PARAMETER Experiment Name: At_Drought_Soil_Dry_P Parameter: Treatment Value: Drought vs. No Drought
  misc_feature: MA Experiment ID: 20001560 Result: Down-regulated in Transcription
  misc_feature: MA Experiment 20001560 PARAMETER Experiment Name: At_Drought_Soil_Dry_P Parameter: Age (day) Value: 28
  misc_feature: MA Experiment 20001560 PARAMETER Experiment Name: At_Drought_Soil_Dry_P Parameter: Organism Value: A. thaliana
  misc_feature: MA Experiment 20001560 PARAMETER Experiment Name: At_Drought_Soil_Dry_P Parameter: Plant Line Value: WS
  misc_feature: MA Experiment 20001560 PARAMETER Experiment Name: At_Drought_Soil_Dry_P Parameter: Post Timepoint (hr) Value: None
  misc_feature: MA Experiment 20001560 PARAMETER Experiment Name: At_Drought_Soil_Dry_P Parameter: Post-Treatment Value: None
  misc_feature: MA Experiment 20001560 PARAMETER Experiment Name: At_Drought_Soil_Dry_P Parameter: Timepoint (day) Value: 14
  misc_feature: MA Experiment 20001560 PARAMETER Experiment Name: At_Drought_Soil_Dry_P Parameter: Treatment Value: Drought vs. No Drought
atgtggttttttggatcgaaaggagcatctggattctcttctcgttccacagcagaggaagtcacacatggtgttgatgggactggtctcactgccattgtcacaggagcatcaagtggtataggtgtagaaacagctcgtgttcttgcactgcgtggtgtgcatgtggttatggcggtgagaaacactggcgccggtgctaaagttaaggaagatattgtcaagcaagtccctggagctaaagttgatgtcatggagttagaactcagctcaatggaatctgtcaggaaatttgcatctgagtacaaatctgctggtcttccactcaacctcttgatcaacaatgccgggattatggcatgtccttttatgctctctaaggacaacatcgagctgcaattcgcaaccaaccatttaggacattttctgcttaccaaacttctgttagatacaatgaagaacacatcacgtgaaagcaaaagagaaggaaggattgttaacgtatcatcagaagctcatcgttactcgtacccagaaggagtccgctttgataagatcaacgacgagtcaagttacagtagtatacgtgcttatggacaatctaaactctgcaatgtattgcacgccaacgagcttgcaaagcaactgaaggaagatggagtcaatataacagcaaattcacttcatccaggagccattatgacaaatctatggggctacttcaactcctatttggctggagctgttggtgcagtggctaaatatatggtcaagtctgttccgcagggggcggcaacaacttgctatgtggcattgaatccacaggttgcaggagttacaggggaatacttctcagatagcaacattgctaaaccaatagaacttgtcaaagatacagaattggcgaagaagctttgggatttcagcactaagcttactgattcgcaatgatgattaccgttgcagtagatagttgttcagg

SEQ ID NO: 84898 - protein, 316 aa, Arabidopsis thaliana
  peptide (1)..(316): Ceres Seq. ID no. 12677724
  misc_feature (1)..(316): Homolog of NCBI NO: 23297050 NR Description: unknown protein [Arabidopsis thaliana]
  misc_feature (1)..(316): Homolog of NCBI NO: 30686197 NR Description: short-chain dehydrogenase/reductase family
  misc_feature (1)..(316): Homolog of NCBI NO: 18416145 NR Description: putative protein; protein id: At4g23430.1,
  misc_feature (1)..(113): Homolog of NCBI NO: 7485551 NR Description: hypothetical protein F16G20.130 - Arabidopsis >gi|3451068|emb|CAA20464.1| putative protein [Arabidopsis >gi|7269191|emb|CAB79298.1| putative protein [Arabidopsis
  misc_feature (109)..(217): Homolog of NCBI NO: 7485551 NR Description: hypothetical protein F16G20.130 - Arabidopsis >gi|3451068|emb|CAA20464.1| putative protein [Arabidopsis >gi|7269191|emb|CAB79298.1| putative protein [Arabidopsis
  misc_feature (253)..(316): Homolog of NCBI NO: 7485551 NR Description: hypothetical protein F16G20.130 - Arabidopsis >gi|3451068|emb|CAA20464.1| putative protein [Arabidopsis >gi|7269191|emb|CAB79298.1| putative protein [Arabidopsis
  misc_feature (1)..(316): Homolog of NCBI NO: 15233359 NR Description: putative protein; protein id: At4g11410.1
  misc_feature (1)..(218): Homolog of NCBI NO: 24762219 NR Description: unknown protein [Arabidopsis thaliana]
  misc_feature (5)..(315): Homolog of NCBI NO: 18413950 NR Description: putative protein; protein id: At5g02540.1, by cDNA: 26538., supported by cDNA: gi_20260301 [Arabidopsis
  misc_feature (5)..(315): Homolog of NCBI NO: 21554820 NR Description: putativepod-specific dehydrogenase SAC25
MWFFGSKGASGFSSRSTAEEVTHGVDGTGLTAIVTGASSGIGVETARVLALRGVHVVMAVRNTGAGAKVKEDIVKQVPGAKVDVMELELSSMESVRKFASEYKSAGLPLNLLINNAGIMACPFMLSKDNIELQFATNHLGHFLLTKLLLDTMKNTSRESKREGRIVNVSSEAHRYSYPEGVRFDKINDESSYSSIRAYGQSKLCNVLHANELAKQLKEDGVNITANSLHPGAIMTNLWGYFNSYLAGAVGAVAKYMVKSVPQGAATTCYVALNPQVAGVTGEYFSDSNIAKPIELVKDTELAKKLWDFSTKLTDSQ

SEQ ID NO: 84899 - protein, 259 aa, Arabidopsis thaliana
  peptide (1)..(259): Ceres Seq. ID no. 12677725
  misc_feature (1)..(259): Homolog of NCBI NO: 23297050 NR Description: unknown protein [Arabidopsis thaliana]
  misc_feature (1)..(259): Homolog of NCBI NO: 30686197 NR Description: short-chain dehydrogenase/reductase family
  misc_feature (1)..(259): Homolog of NCBI NO: 18416145 NR Description: putative protein; protein id: At4g23430.1,
  misc_feature (1)..(56): Homolog of NCBI NO: 7485551 NR Description: hypothetical protein F16G20.130 - Arabidopsis >gi|3451068|emb|CAA20464.1| putative protein [Arabidopsis >gi|7269191|emb|CAB79298.1| putative protein [Arabidopsis
  misc_feature (52)..(160): Homolog of NCBI NO: 7485551 NR Description: hypothetical protein F16G20.130 - Arabidopsis >gi|3451068|emb|CAA20464.1| putative protein [Arabidopsis >gi|7269191|emb|CAB79298.1| putative protein [Arabidopsis
  misc_feature (196)..(259): Homolog of NCBI NO: 7485551 NR Description: hypothetical protein F16G20.130 - Arabidopsis >gi|3451068|emb|CAA20464.1| putative protein [Arabidopsis >gi|7269191|emb|CAB79298.1| putative protein [Arabidopsis
  misc_feature (1)..(259): Homolog of NCBI NO: 15233359 NR Description: putative protein; protein id: At4g11410.1
  misc_feature (1)..(161): Homolog of NCBI NO: 24762219 NR Description: unknown protein [Arabidopsis thaliana]
  misc_feature (1)..(258): Homolog of NCBI NO: 18413950 NR Description: putative protein; protein id: At5g02540.1, by cDNA: 26538., supported by cDNA: gi_20260301 [Arabidopsis
  misc_feature (1)..(258): Homolog of NCBI NO: 21554820 NR Description: putativepod-specific dehydrogenase SAC25
MAVRNTGAGAKVKEDIVKQVPGAKVDVMELELSSMESVRKFASEYKSAGLPLNLLINNAGIMACPFMLSKDNIELQFATNHLGHFLLTKLLLDTMKNTSRESKREGRIVNVSSEAHRYSYPEGVRFDKINDESSYSSIRAYGQSKLCNVLHANELAKQLKEDGVNITANSLHPGAIMTNLWGYFNSYLAGAVGAVAKYMVKSVPQGAATTCYVALNPQVAGVTGEYFSDSNIAKPIELVKDTELAKKLWDFSTKLTDSQ

SEQ ID NO: 84900 - protein, 232 aa, Arabidopsis thaliana
  peptide (1)..(232): Ceres Seq. ID no. 12677726
  misc_feature (1)..(232): Homolog of NCBI NO: 23297050 NR Description: unknown protein [Arabidopsis thaliana]
  misc_feature (1)..(232): Homolog of NCBI NO: 30686197 NR Description: short-chain dehydrogenase/reductase family
  misc_feature (1)..(232): Homolog of NCBI NO: 18416145 NR Description: putative protein; protein id: At4g23430.1,
  misc_feature (1)..(29): Homolog of NCBI NO: 7485551 NR Description: hypothetical protein F16G20.130 - Arabidopsis >gi|3451068|emb|CAA20464.1| putative protein [Arabidopsis >gi|7269191|emb|CAB79298.1| putative protein [Arabidopsis
  misc_feature (25)..(133): Homolog of NCBI NO: 7485551 NR Description: hypothetical protein F16G20.130 - Arabidopsis >gi|3451068|emb|CAA20464.1| putative protein [Arabidopsis >gi|7269191|emb|CAB79298.1| putative protein [Arabidopsis
  misc_feature (169)..(232): Homolog of NCBI NO: 7485551 NR Description: hypothetical protein F16G20.130 - Arabidopsis >gi|3451068|emb|CAA20464.1| putative protein [Arabidopsis >gi|7269191|emb|CAB79298.1| putative protein [Arabidopsis
  misc_feature (1)..(232): Homolog of NCBI NO: 15233359 NR Description: putative protein; protein id: At4g11410.1
  misc_feature (1)..(134): Homolog of NCBI NO: 24762219 NR Description: unknown protein [Arabidopsis thaliana]
  misc_feature (1)..(231): Homolog of NCBI NO: 18413950 NR Description: putative protein; protein id: At5g02540.1, by cDNA: 26538., supported by cDNA: gi_20260301 [Arabidopsis
  misc_feature (1)..(231): Homolog of NCBI NO: 21554820 NR Description: putativepod-specific dehydrogenase SAC25
MELELSSMESVRKFASEYKSAGLPLNLLINNAGIMACPFMLSKDNIELQFATNHLGHFLLTKLLLDTMKNTSRESKREGRIVNVSSEAHRYSYPEGVRFDKINDESSYSSIRAYGQSKLCNVLHANELAKQLKEDGVNITANSLHPGAIMTNLWGYFNSYLAGAVGAVAKYMVKSVPQGAATTCYVALNPQVAGVTGEYFSDSNIAKPIELVKDTELAKKLWDFSTKLTDSQ

SEQ ID NO: 84901 - DNA, 1324 bp, Arabidopsis thaliana
  misc_feature (1)..(1324): Ceres Seq. ID no. 12677733
  misc_feature: MA Experiment ID: 20000306 Result: Up-regulated in Transcription
  misc_feature: MA Experiment 20000306 PARAMETER Experiment Name: At_Germinating_Seeds_Sub_P Parameter: Age (hr) Value: 6 vs. 0
  misc_feature: MA Experiment 20000306 PARAMETER Experiment Name: At_Germinating_Seeds_Sub_P Parameter: Organism Value: A. thaliana
  misc_feature: MA Experiment 20000306 PARAMETER Experiment Name: At_Germinating_Seeds_Sub_P Parameter: Plant Line Value: WS
  misc_feature: MA Experiment 20000306 PARAMETER Experiment Name: At_Germinating_Seeds_Sub_P Parameter: Tissue Value: Germinating Seeds
  misc_feature: MA Experiment ID: 20000307 Result: Up-regulated in Transcription
  misc_feature: MA Experiment 20000307 PARAMETER Experiment Name: At_Germinating_Seeds_Sub_P Parameter: Age (hr) Value: 24 vs. 0
  misc_feature: MA Experiment 20000307 PARAMETER Experiment Name: At_Germinating_Seeds_Sub_P Parameter: Organism Value: A. thaliana
  misc_feature: MA Experiment 20000307 PARAMETER Experiment Name: At_Germinating_Seeds_Sub_P Parameter: Plant Line Value: WS
  misc_feature: MA Experiment 20000307 PARAMETER Experiment Name: At_Germinating_Seeds_Sub_P Parameter: Tissue Value: Germinating Seeds
  misc_feature: MA Experiment ID: 20000327 Result: Down-regulated in Transcription
  misc_feature: MA Experiment 20000327 PARAMETER Experiment Name: At_42deg_Heat_Sub_P Parameter: Age (day) Value: 14
  misc_feature: MA Experiment 20000327 PARAMETER Experiment Name: At_42deg_Heat_Sub_P Parameter: Organism Value: A. thaliana
  misc_feature: MA Experiment 20000327 PARAMETER Experiment Name: At_42deg_Heat_Sub_P Parameter: Plant Line Value: WS
  misc_feature: MA Experiment 20000327 PARAMETER Experiment Name: At_42deg_Heat_Sub_P Parameter: Temperature (deg C) Value: 42 vs. 22
  misc_feature: MA Experiment 20000327 PARAMETER Experiment Name: At_42deg_Heat_Sub_P Parameter: Timepoint (hr) Value: 1
  misc_feature: MA Experiment 20000327 PARAMETER Experiment Name: At_42deg_Heat_Sub_P Parameter: Tissue Value: Aerial
atgaagttgaagttgtcatcaatctccatgaatcataagaatgtgcttctcatcaagctcatctccgctattctgatatcttttttcgcgttccgtctcttcattctccactccagcgagttttctccaatctttgcgtcggtcaccggaaaattcgaagctcggtttctgccgccggagattatcgtaccggaaaatgaagatctgattcctcaagatattgaagtagagaagtgtgatcttttcgccggaaaatggatcccagattcagtaggaccaatctacacaaacaaatcatgcggatcactcattgacggtcaccaaaattgtatcaccaatggccggcctgacttagattttctctactggaaatggaaacctcatgactgtttgttaccacgttttgaccctagaagatttcttcaacttatgaggcataaatcttgggcatttattggtgactccatatctcgtaaccacgtcgaatcactgctttgtatgctctctacgattgaagaaccggttgaagtataccatgacatggagtacaaatcaaaacgttggcatttccctttacataaccttactgtatccaacatatggtcgccatttcttgttcaagccgctattttcgaagattctaacggtgtctcgaccgcttctgttcagctacatcttgatagactcgatgagacatggaccagtctcatgcctagcttcgactatgcgatcatctcaaccggtaaatggtttcttaaatccgcaatttaccacgaaaatgcaaaactcgtcggttgccataactgtcaggaaaaacctcacatagaagagttaggattcgactatgcttataacgcatcgctgcataatgtcatggactttctagcagctgaagataacagtaaaggcacggttttctttcggacttcgactcccgatcatttccaaaacggggaatggcatagtggcgggacgtgtaagcaaacagagccggtgagcgatgaggagattgagattaaggatgtacataagatactaaaagatattgagattgatcagttcaagagggcggttagagagaagactaaccaggacggtgggaatctaaagcttttggatttcacccggatgttgctgacccgaccggacggtcatccgggtgagtaccgacagttcaggccgtttgataaagacaaaaatgcaaaggtacagaacgattgtttgcattggtgcttgcctggtccgtttgattacttgaatgatgttatattggagactatagtaaatggctgagaggcacacaaaatgtgattggtacatggcc

SEQ ID NO: 84902 - protein, 430 aa, Arabidopsis thaliana
  peptide (1)..(430): Ceres Seq. ID no. 12677734
  misc_feature (251)..(427): Pfam Name: Arabidopsis proteins of unknown function Pfam Description: Arabidopsis proteins of unknown function
  misc_feature (1)..(430): Homolog of NCBI NO: 30686312 NR Description: expressed protein [Arabidopsis thaliana]
  misc_feature (10)..(430): Homolog of NCBI NO: 7486743 NR Description: hypothetical protein F9D16.260 - Arabidopsis >gi|4454048|emb|CAA23045.1| putative protein [Arabidopsis >gi|7269228|emb|CAB81297.1| putative protein [Arabidopsis
  misc_feature (1)..(430): Homolog of NCBI NO: 15237044 NR Description: putative protein; protein id: At4g11090.1
  misc_feature (9)..(429): Homolog of NCBI NO: 30678135 NR Description: expressed protein [Arabidopsis thaliana] unknown protein [Arabidopsis thaliana]
  misc_feature (31)..(429): Homolog of NCBI NO: 15234058 NR Description: hypothetical protein; protein id: At4g01080.1
  misc_feature (31)..(429): Homolog of NCBI NO: 28393189 NR Description: unknown protein [Arabidopsis thaliana]
  misc_feature (9)..(429): Homolog of NCBI NO: 25518737 NR Description: hypothetical protein F6F3.23 [imported] - thaliana >gi|9665154|gb|AAF97338.1|AC023628_19 Unknown protein
  misc_feature (19)..(427): Homolog of NCBI NO: 15223079 NR Description: unknown protein; protein id: At1g70230.1, by cDNA: gi_19310588 [Arabidopsis thaliana]
  misc_feature (77)..(425): Homolog of NCBI NO: 15237211 NR Description: putative protein; protein id: At5g15890.1
  misc_feature (77)..(424): Homolog of NCBI NO: 15237213 NR Description: putative protein; protein id: At5g15900.1
MKLKLSSISMNHKNVLLIKLISAILISFFAFRLFILHSSEFSPIFASVTGKFEARFLPPEIIVPENEDLIPQDIEVEKCDLFAGKWIPDSVGPIYTNKSCGSLIDGHQNCITNGRPDLDFLYWKWKPHDCLLPRFDPRRFLQLMRHKSWAFIGDSISRNHVESLLCMLSTIEEPVEVYHDMEYKSKRWHFPLHNLTVSNIWSPFLVQAAIFEDSNGVSTASVQLHLDRLDETWTSLMPSFDYAIISTGKWFLKSAIYHENAKLVGCHNCQEKPHIEELGFDYAYNASLHNVMDFLAAEDNSKGTVFFRTSTPDHFQNGEWHSGGTCKQTEPVSDEEIEIKDVHKILKDIEIDQFKRAVREKTNQDGGNLKLLDFTRMLLTRPDGHPGEYRQFRPFDKDKNAKVQNDCLHWCLPGPFDYLNDVILETIVNG

SEQ ID NO: 84903 - protein, 421 aa, Arabidopsis thaliana; identical to SEQ ID NO: 82848
  peptide (1)..(421): Ceres Seq. ID no. 12677735
  misc_feature (242)..(418): Pfam Name: Arabidopsis proteins of unknown function Pfam Description: Arabidopsis proteins of unknown function
  misc_feature (1)..(421): Homolog of NCBI NO: 30686312 NR Description: expressed protein [Arabidopsis thaliana]
  misc_feature (1)..(421): Homolog of NCBI NO: 7486743 NR Description: hypothetical protein F9D16.260 - Arabidopsis >gi|4454048|emb|CAA23045.1| putative protein [Arabidopsis >gi|7269228|emb|CAB81297.1| putative protein [Arabidopsis
  misc_feature (1)..(421): Homolog of NCBI NO: 15237044 NR Description: putative protein; protein id: At4g11090.1
  misc_feature (1)..(420): Homolog of NCBI NO: 30678135 NR Description: expressed protein [Arabidopsis thaliana] unknown protein [Arabidopsis thaliana]
  misc_feature (22)..(420): Homolog of NCBI NO: 15234058 NR Description: hypothetical protein; protein id: At4g01080.1
  misc_feature (22)..(420): Homolog of NCBI NO: 28393189 NR Description: unknown protein [Arabidopsis thaliana]
  misc_feature (1)..(420): Homolog of NCBI NO: 25518737 NR Description: hypothetical protein F6F3.23 [imported] - thaliana >gi|9665154|gb|AAF97338.1|AC023628_19 Unknown protein
  misc_feature (10)..(418): Homolog of NCBI NO: 15223079 NR Description: unknown protein; protein id: At1g70230.1, by cDNA: gi_19310588 [Arabidopsis thaliana]
  misc_feature (68)..(416): Homolog of NCBI NO: 15237211 NR Description: putative protein; protein id: At5g15890.1
  misc_feature (68)..(415): Homolog of NCBI NO: 15237213 NR Description: putative protein; protein id: At5g15900.1

SEQ ID NO: 84904 - protein, 287 aa, Arabidopsis thaliana; identical to SEQ ID NO: 82849
  peptide (1)..(287): Ceres Seq. ID no. 12677736
  misc_feature (108)..(284): Pfam Name: Arabidopsis proteins of unknown function Pfam Description: Arabidopsis proteins of unknown function
  misc_feature (1)..(287): Homolog of NCBI NO: 30686312 NR Description: expressed protein [Arabidopsis thaliana]
  misc_feature (1)..(287): Homolog of NCBI NO: 7486743 NR Description: hypothetical protein F9D16.260 - Arabidopsis >gi|4454048|emb|CAA23045.1| putative protein [Arabidopsis >gi|7269228|emb|CAB81297.1| putative protein [Arabidopsis
  misc_feature (1)..(287): Homolog of NCBI NO: 15237044 NR Description: putative protein; protein id: At4g11090.1
  misc_feature (1)..(286): Homolog of NCBI NO: 30678135 NR Description: expressed protein [Arabidopsis thaliana] unknown protein [Arabidopsis thaliana]
  misc_feature (1)..(286): Homolog of NCBI NO: 15234058 NR Description: hypothetical protein; protein id: At4g01080.1
  misc_feature (1)..(286): Homolog of NCBI NO: 28393189 NR Description: unknown protein [Arabidopsis thaliana]
  misc_feature (1)..(286): Homolog of NCBI NO: 25518737 NR Description: hypothetical protein F6F3.23 [imported] - thaliana >gi|9665154|gb|AAF97338.1|AC023628_19 Unknown protein
  misc_feature (1)..(284): Homolog of NCBI NO: 15223079 NR Description: unknown protein; protein id: At1g70230.1, by cDNA: gi_19310588 [Arabidopsis thaliana]
  misc_feature (1)..(282): Homolog of NCBI NO: 15237211 NR Description: putative protein; protein id: At5g15890.1
  misc_feature (1)..(281): Homolog of NCBI NO: 15237213 NR Description: putative protein; protein id: At5g15900.1

SEQ ID NO: 84905 - DNA, 1720 bp, Arabidopsis thaliana
  misc_feature (1)..(1720): Ceres Seq. ID no. 12677749
  misc_feature: MA Experiment ID: 108461 Result: Up-regulated in Transcription
  misc_feature: MA Experiment 108461 PARAMETER Experiment Name: At_Germinating_Seeds_cDNA_P Parameter: Age (day) Value: 1 vs. 0
  misc_feature: MA Experiment 108461 PARAMETER Experiment Name: At_Germinating_Seeds_cDNA_P Parameter: Tissue Value: Germinating Seeds
  misc_feature: MA Experiment ID: 108462 Result: Up-regulated in Transcription
  misc_feature: MA Experiment 108462 PARAMETER Experiment Name: At_Germinating_Seeds_cDNA_P Parameter: Age (day) Value: 2 vs. 0
  misc_feature: MA Experiment 108462 PARAMETER Experiment Name: At_Germinating_Seeds_cDNA_P Parameter: Tissue Value: Germinating Seeds
  misc_feature: MA Experiment ID: 108668 Result: Up-regulated in Transcription
  misc_feature: MA Experiment 108668 PARAMETER Experiment Name: At_2mM_SA_cDNA_P Parameter: Plant Line Value: WS
  misc_feature: MA Experiment 108668 PARAMETER Experiment Name: At_2mM_SA_cDNA_P Parameter: Timepoint (hr) Value: 6
  misc_feature: MA Experiment 108668 PARAMETER Experiment Name: At_2mM_SA_cDNA_P Parameter: Treatment Value: 2mM SA vs. No Treatment
  misc_feature: MA Experiment ID: 20000179 Result: Up-regulated in Transcription
  misc_feature: MA Experiment 20000179 PARAMETER Experiment Name: At_Germinating_Seeds_P Parameter: Age (hr) Value: 6 vs. 0
  misc_feature: MA Experiment 20000179 PARAMETER Experiment Name: At_Germinating_Seeds_P Parameter: Tissue Value: Germinating Seeds
  misc_feature: MA Experiment ID: 20000180 Result: Up-regulated in Transcription
  misc_feature: MA Experiment 20000180 PARAMETER Experiment Name: At_Germinating_Seeds_P Parameter: Age (hr) Value: 24 vs. 0
  misc_feature: MA Experiment 20000180 PARAMETER Experiment Name: At_Germinating_Seeds_P Parameter: Tissue Value: Germinating Seeds
  misc_feature: MA Experiment ID: 20000184 Result: Down-regulated in Transcription
  misc_feature: MA Experiment 20000184 PARAMETER Experiment Name: At_Shoots__P Parameter: Age (day) Value: 7
  misc_feature: MA Experiment 20000184 PARAMETER Experiment Name: At_Shoots__P Parameter: Tissue Value: Shoots vs. Whole Plant
  misc_feature: MA Experiment ID: 20000495 Result: Down-regulated in Transcription
  misc_feature: MA Experiment 20000495 PARAMETER Experiment Name: At_Guard_Cells_P Parameter: Harvest Date Value: 8/2/2002
  misc_feature: MA Experiment 20000495 PARAMETER Experiment Name: At_Guard_Cells_P Parameter: Organism Value: A. thaliana
  misc_feature: MA Experiment 20000495 PARAMETER Experiment Name: At_Guard_Cells_P Parameter: Tissue Value: Guard Cells vs. Leaves
ctctctcgattgactttattgactgagagaaagcttttgacaatgggccacagacacagcaagtccaaatcctccgatccgccaccgtcctcctcctcctcttcctccggcaacgtagtccaccatgttaaacctgccggagaacgccgcggatcatccggttccggaaccgtcggatcgtcaggctccggaacaggcggatctcgttccaccacatctactcagcagaatggtcggatcttaggtcggccgatggaggaagtacggagaacctatgagtttggtcgtgagcttggtcgtggccagtttggtgtcacgtacctcgtaactcacaaagagacgaaacaacaggtcgcttgcaagtcaatccctacgcgccgccttgttcacaaagacgacattgaagatgttcgccgtgaagtccagattatgcaccatctcagcggtcaccggaacatagtggacttgaagggagcctacgaggacagacactctgtgaatctgataatggagttgtgtgaaggaggggaattgttcgataggatcatttctaaaggtctttactcagagagagctgctgcggatttgtgtaggcagatggtgatggttgtgcatagttgtcattctatgggtgtaatgcaccgagacttgaagcccgaaaactttctctttcttagtaaagatgagaactcaccattgaaagctacagactttggtctctctgtcttcttcaagccaggtgataagtttaaggatcttgttggaagtgcatactatgttgccccagaagttctaaaacggaactatggaccagaggctgatatctggagtgctggtgtgattctatacatccttctcagtggtgttccgcctttctggggagaaaatgaaacggggatctttgatgccattcttcaagggcaacttgatttttcagctgatccatggccagcactatcagatggtgccaaagatcttgtgaggaaaatgttaaaatatgaccctaaagatcggcttacagctgcggaagtgctaaatcatccgtggattagagaagatggggaggcatcagacaaaccgcttgacaatgcggtgttatccaggatgaaacaattccgggcgatgaacaaactaaaaaaaatggccctgaaggttatcgctgagaacctttctgaagaagaaatcattggtcttaaagagatgttcaaatctctagacactgataacaatggaatagtcaccttggaggaattgagaaccggtctcccaaaacttggttcaaagatctctgaagctgaaataaggcagttaatggaagcagctgatatggatggagatggatcaattgattacttggagtttatatcagccacaatgcatatgaacagaatcgaacgtgaggatcacttgtacaccgcattccagttctttgacaatgacaacagcggctacataacaatggaagagctagagctagccatgaagaaatacaacatgggtgatgataaatccatcaaagagatcattgctgaagtagacaccgatcgtgacggaaaaatcaactacgaagaatttgtagcgatgatgaagaagggaaatccagaattggtgccaaaccgacgcagaatgtgagagatcttttgatgttgtttgtttgtttttggttatcactttactcaaactttgtgtttctgttacaatcaattattttgtttcctgc

SEQ ID NO: 84906 - protein, 543 aa, Arabidopsis thaliana; identical to SEQ ID NO: 23895
  peptide (1)..(543): Ceres Seq. ID no. 12677750
  misc_feature (92)..(350): Pfam Name: Protein kinase domain Pfam Description: Protein kinase domain
  misc_feature (15)..(543): Homolog of NCBI NO: 15236560 NR Description: calcium-dependent protein kinase (CDPK6); protein At4g23650.1, supported by cDNA: 37278., supported by cDNA: supported by cDNA: gi_15450436, supported by cDNA: gi_17386099,
  misc_feature (15)..(543): Homolog of NCBI NO: 15450437 NR Description: AT4g23650/F9D16_120 [Arabidopsis thaliana]
  misc_feature (78)..(542): Homolog of NCBI NO: 14970920 NR Description: calcium dependent calmodulin independent protein
  misc_feature (16)..(542): Homolog of NCBI NO: 5162877 NR Description: calcium-dependent protein kinase [Marchantia
  misc_feature (16)..(542): Homolog of NCBI NO: 5162878 NR Description: calcium-dependent protein kinase [Marchantia
  misc_feature (48)..(542): Homolog of NCBI NO: 15239716 NR Description: calcium-dependent protein kinase - like; protein
  misc_feature (33)..(542): Homolog of NCBI NO: 18175903 NR Description: putative calcium-dependent protein kinase
  misc_feature (33)..(542): Homolog of NCBI NO: 15239888 NR Description: calcium-dependent protein kinase; protein id:
  misc_feature (132)..(542): Homolog of NCBI NO: 16754824 NR Description: calcium dependent calmodulin independent protein
  misc_feature (80)..(532): Homolog of NCBI NO: 7428009 NR Description: calcium-dependent protein kinase (EC 2.7.1.-) 1 -

SEQ ID NO: 84907 - protein, 529 aa, Arabidopsis thaliana; identical to SEQ ID NO: 23896
  peptide (1)..(529): Ceres Seq. ID no. 12677751
  misc_feature (78)..(336): Pfam Name: Protein kinase domain Pfam Description: Protein kinase domain
  misc_feature (1)..(529): Homolog of NCBI NO: 15236560 NR Description: calcium-dependent protein kinase (CDPK6); protein At4g23650.1, supported by cDNA: 37278., supported by cDNA: supported by cDNA: gi_15450436, supported by cDNA: gi_17386099,
  misc_feature (1)..(529): Homolog of NCBI NO: 15450437 NR Description: AT4g23650/F9D16_120 [Arabidopsis thaliana]
  misc_feature (64)..(528): Homolog of NCBI NO: 14970920 NR Description: calcium dependent calmodulin independent protein
  misc_feature (2)..(528): Homolog of NCBI NO: 5162877 NR Description: calcium-dependent protein kinase [Marchantia
  misc_feature (2)..(528): Homolog of NCBI NO: 5162878 NR Description: calcium-dependent protein kinase [Marchantia
  misc_feature (34)..(528): Homolog of NCBI NO: 15239716 NR Description: calcium-dependent protein kinase - like; protein
  misc_feature (19)..(528): Homolog of NCBI NO: 18175903 NR Description: putative calcium-dependent protein kinase
  misc_feature (19)..(528): Homolog of NCBI NO: 15239888 NR Description: calcium-dependent protein kinase; protein id:
  misc_feature (118)..(528): Homolog of NCBI NO: 16754824 NR Description: calcium dependent calmodulin independent protein
  misc_feature (66)..(518): Homolog of NCBI NO: 7428009 NR Description: calcium-dependent protein kinase (EC 2.7.1.-) 1 -

SEQ ID NO: 84908 - protein, 459 aa, Arabidopsis thaliana; identical to SEQ ID NO: 23897
  peptide (1)..(459): Ceres Seq. ID no. 12677752
  misc_feature (8)..(266): Pfam Name: Protein kinase domain Pfam Description: Protein kinase domain
  misc_feature (1)..(459): Homolog of NCBI NO: 15236560 NR Description: calcium-dependent protein kinase (CDPK6); protein At4g23650.1, supported by cDNA: 37278., supported by cDNA: supported by cDNA: gi_15450436, supported by cDNA: gi_17386099,
  misc_feature (1)..(459): Homolog of NCBI NO: 15450437 NR Description: AT4g23650/F9D16_120 [Arabidopsis thaliana]
  misc_feature (1)..(458): Homolog of NCBI NO: 14970920 NR Description: calcium dependent calmodulin independent protein
  misc_feature (1)..(458): Homolog of NCBI NO: 5162877 NR Description: calcium-dependent protein kinase [Marchantia
  misc_feature (1)..(458): Homolog of NCBI NO: 5162878 NR Description: calcium-dependent protein kinase [Marchantia
  misc_feature (1)..(458): Homolog of NCBI NO: 15239716 NR Description: calcium-dependent protein kinase - like; protein
  misc_feature (1)..(458): Homolog of NCBI NO: 18175903 NR Description: putative calcium-dependent protein kinase
  misc_feature (1)..(458): Homolog of NCBI NO: 15239888 NR Description: calcium-dependent protein kinase; protein id:
  misc_feature (48)..(458): Homolog of NCBI NO: 16754824 NR Description: calcium dependent calmodulin independent protein
  misc_feature (1)..(448): Homolog of NCBI NO: 7428009 NR Description: calcium-dependent protein kinase (EC 2.7.1.-) 1 -

SEQ ID NO: 84909 - DNA, 1392 bp, Arabidopsis thaliana
  misc_feature (1)..(1392): Ceres Seq. ID no. 12677814
  misc_feature: MA Experiment ID: 20000794 Result: Up-regulated in Transcription
  misc_feature: MA Experiment 20000794 PARAMETER Experiment Name: At_Petals_P Parameter: Age (day) Value: 23-25 days
  misc_feature: MA Experiment 20000794 PARAMETER Experiment Name: At_Petals_P Parameter: Plant Line Value: WS
  misc_feature: MA Experiment 20000794 PARAMETER Experiment Name: At_Petals_P Parameter: Tissue Value: Petals vs. Whole plant
  misc_feature: MA Experiment ID: 20001557 Result: Down-regulated in Transcription
  misc_feature: MA Experiment 20001557 PARAMETER Experiment Name: At_Drought_Soil_Dry_P Parameter: Age (day) Value: 27
  misc_feature: MA Experiment 20001557 PARAMETER Experiment Name: At_Drought_Soil_Dry_P Parameter: Organism Value: A. thaliana
  misc_feature: MA Experiment 20001557 PARAMETER Experiment Name: At_Drought_Soil_Dry_P Parameter: Plant Line Value: WS
  misc_feature: MA Experiment 20001557 PARAMETER Experiment Name: At_Drought_Soil_Dry_P Parameter: Post Timepoint (hr) Value: 3
  misc_feature: MA Experiment 20001557 PARAMETER Experiment Name: At_Drought_Soil_Dry_P Parameter: Post-Treatment Value: Re-Water vs. No Drought
  misc_feature: MA Experiment 20001557 PARAMETER Experiment Name: At_Drought_Soil_Dry_P Parameter: Timepoint (day) Value: 13
  misc_feature: MA Experiment 20001557 PARAMETER Experiment Name: At_Drought_Soil_Dry_P Parameter: Treatment Value: Drought vs. No Drought
aaatgtcaaaaacgtaaaagttccattgtggccattaacgtgcgttctcgccatcctcgtatatcgctaatgaaatctaaaccaataaaaaaacttcaatcttttttttcttcacaattatcgatccaaatcaagattttcttgatttgaattccttgcgatgaaactccttccgaatccatcactaaccttgttccctttcttcactccctatacttcaaagcatattttcagacccatcaaagtctccgtctccgttcaaactcctccgccggatttcgatttccgcaacgacatcgcgtcggaatcacgcgccgcaatcgcgaaaacttacccggagttgcttgacctcgctgataacgggactctgattcttctccagaaacagagtttcggtcctgttccagcttggcgcaaagagttcgttgagccggaagcgatttggcttgtgggcacttctcatatctcgccggaatctgcttccatcgttgaacgcgtcgtccgtactgtgaagcctgataatgtcgccgttgaactctgtcgtagcagagctgggattatgtacacttcaagtgttggaggagaggttgaccaaaacttaaaatccggagagttgtcgttgaccgggactggctttctcggtgctgttggccggagtttagacttgggagggcaaactgcgttggcattgcgacttctattggcggttttctcttctaagttatcttctgttgctgaccgccctttcggggatgagtttcgtgctgctcggaaagcatctgaggaagttggtgcgcagctggttcttggagatcgacccatcgaaataactctccaaagggcttggaactctttgaaatggggagagaagtttaatctggtgatggctgtgactcgggtaatcacatcgtcatcgggtatatccgcagcggagcttaaggaacaagagaccgatgaaaacagtggaagtttgcagctttacgaacggctaagtttctcatacccggcactcctaatgcctcttatacacgaaagagatacctatcttgcttggtcattgaagagaagtaaggcagtgaatgggtgtaaaacagtggtgggagtgatcgggaaaggacacatgaatggtgtcatctacgcgttggtgtcagactctggggatctccggtttagagatttggtgggaagaggagattcatataatggtggtactggtactacatcgaacggttggattcaaaaggttttaaagagcttcgtaagagacacaattatagggttcttgctatgggagttatatgaacagtatctgatgatgaatcaaaacctttcatgatataactaaaaaaacaagttgttgcatatttaaaaaggaaactggaaaaagaatct

SEQ ID NO: 84910 - protein, 391 aa, Arabidopsis thaliana
  peptide (1)..(391): Ceres Seq. ID no. 12677815
  misc_feature (89)..(337): Pfam Name: TraB family Pfam Description: TraB family
  misc_feature (1)..(391): Homolog of NCBI NO: 19699285 NR Description: AT5g52030/MSG15_11 [Arabidopsis thaliana]
  misc_feature (1)..(391): Homolog of NCBI NO: 10177738 NR Description: gene_id:MSG15.11~pir||C69291~similar to unknown
  misc_feature (134)..(391): Homolog of NCBI NO: 22327748 NR Description: putative protein; protein id: At5g52030.1,
  misc_feature (179)..(324): Homolog of NCBI NO: 30679206 NR Description: expressed protein [Arabidopsis thaliana] unknown protein [Arabidopsis thaliana]
  misc_feature (94)..(134): Homolog of NCBI NO: 30679206 NR Description: expressed protein [Arabidopsis thaliana] unknown protein [Arabidopsis thaliana]
  misc_feature (180)..(325): Homolog of NCBI NO: 21227421 NR Description: Pheromone shutdown protein [Methanosarcina mazei >gi|20905787|gb|AAM31015.1| Pheromone shutdown protein
  misc_feature (59)..(130): Homolog of NCBI NO: 21227421 NR Description: Pheromone shutdown protein [Methanosarcina mazei >gi|20905787|gb|AAM31015.1| Pheromone shutdown protein
  misc_feature (180)..(325): Homolog of NCBI NO: 20088907 NR Description: TraB family protein [Methanosarcina acetivorans C2A] >gi|19913750|gb|AAM03462.1| TraB family protein
  misc_feature (90)..(130): Homolog of NCBI NO: 20088907 NR Description: TraB family protein [Methanosarcina acetivorans C2A] >gi|19913750|gb|AAM03462.1| TraB family protein
  misc_feature (179)..(325): Homolog of NCBI NO: 24217187 NR Description: pheromone shutdown protein [Leptospira serovar lai str. 56601] >gi|24202233|gb|AAN51685.1|AE011601_8
MKLLPNPSLTLFPFFTPYTSKHIFRPIKVSVSVQTPPPDFDFRNDIASESRAAIAKTYPELLDLADNGTLILLQKQSFGPVPAWRKEFVEPEAIWLVGTSHISPESASIVERVVRTVKPDNVAVELCRSRAGIMYTSSVGGEVDQNLKSGELSLTGTGFLGAVGRSLDLGGQTALALRLLLAVFSSKLSSVADRPFGDEFRAARKASEEVGAQLVLGDRPIEITLQRAWNSLKWGEKFNLVMAVTRVITSSSGISAAELKEQETDENSGSLQLYERLSFSYPALLMPLIHERDTYLAWSLKRSKAVNGCKTVVGVIGKGHMNGVIYALVSDSGDLRFRDLVGRGDSYNGGTGTTSNGWIQKVLKSFVRDTIIGFLLWELYEQYLMMNQNLS

SEQ ID NO: 84911 - protein, 258 aa, Arabidopsis thaliana
  peptide (1)..(258): Ceres Seq. ID no. 12677816
  misc_feature (1)..(204): Pfam Name: TraB family Pfam Description: TraB family
  misc_feature (1)..(258): Homolog of NCBI NO: 19699285 NR Description: AT5g52030/MSG15_11 [Arabidopsis thaliana]
  misc_feature (1)..(258): Homolog of NCBI NO: 10177738 NR Description: gene_id:MSG15.11~pir||C69291~similar to unknown
  misc_feature (1)..(258): Homolog of NCBI NO: 22327748 NR Description: putative protein; protein id: At5g52030.1,
  misc_feature (46)..(191): Homolog of NCBI NO: 30679206 NR Description: expressed protein [Arabidopsis thaliana] unknown protein [Arabidopsis thaliana]
  misc_feature (47)..(192): Homolog of NCBI NO: 21227421 NR Description: Pheromone shutdown protein [Methanosarcina mazei >gi|20905787|gb|AAM31015.1| Pheromone shutdown protein
  misc_feature (47)..(192): Homolog of NCBI NO: 20088907 NR Description: TraB family protein [Methanosarcina acetivorans C2A] >gi|19913750|gb|AAM03462.1| TraB family protein
  misc_feature (46)..(192): Homolog of NCBI NO: 24217187 NR Description: pheromone shutdown protein [Leptospira serovar lai str. 56601] >gi|24202233|gb|AAN51685.1|AE011601_8
  misc_feature (44)..(192): Homolog of NCBI NO: 28828782 NR Description: similar to Plasmodium falciparum (isolate 3D7).
  misc_feature (47)..(191): Homolog of NCBI NO: 23049850 NR Description: hypothetical protein [Methanosarcina barkeri]
  misc_feature (40)..(191): Homolog of NCBI NO: 23111275 NR Description: hypothetical protein [Desulfitobacterium
MYTSSVGGEVDQNLKSGELSLTGTGFLGAVGRSLDLGGQTALALRLLLAVFSSKLSSVADRPFGDEFRAARKASEEVGAQLVLGDRPIEITLQRAWNSLKWGEKFNLVMAVTRVITSSSGISAAELKEQETDENSGSLQLYERLSFSYPALLMPLIHERDTYLAWSLKRSKAVNGCKTVVGVIGKGHMNGVIYALVSDSGDLRFRDLVGRGDSYNGGTGTTSNGWIQKVLKSFVRDTIIGFLLWELYEQYLMMNQNLS

SEQ ID NO: 84912 - DNA, 1274 bp, Arabidopsis thaliana
  misc_feature (1)..(1274): Ceres Seq. ID no. 12677875
  misc_feature: MA Experiment ID: 108462 Result: Up-regulated in Transcription
  misc_feature: MA Experiment 108462 PARAMETER Experiment Name: At_Germinating_Seeds_cDNA_P Parameter: Age (day) Value: 2 vs. 0
  misc_feature: MA Experiment 108462 PARAMETER Experiment Name: At_Germinating_Seeds_cDNA_P Parameter: Tissue Value: Germinating Seeds
  misc_feature: MA Experiment ID: 108463 Result: Up-regulated in Transcription
  misc_feature: MA Experiment 108463 PARAMETER Experiment Name: At_Germinating_Seeds_cDNA_P Parameter: Age (day) Value: 3 vs. 0
  misc_feature: MA Experiment 108463 PARAMETER Experiment Name: At_Germinating_Seeds_cDNA_P Parameter: Tissue Value: Germinating Seeds
  misc_feature: MA Experiment ID: 108469 Result: Up-regulated in Transcription
  misc_feature: MA Experiment ID: 108569 Result: Up-regulated in Transcription
  misc_feature: MA Experiment 108569 PARAMETER Experiment Name: At_0.001%_MeJA__cDNA_P Parameter: Timepoint (hr) Value: 6
  misc_feature: MA Experiment 108569 PARAMETER Experiment Name: At_0.001%_MeJA__cDNA_P Parameter: Tissue Value: Aerial
  misc_feature: MA Experiment 108569 PARAMETER Experiment Name: At_0.001%_MeJA__cDNA_P Parameter: Treatment Value: 0.001% MeJA vs. No Treatment
  misc_feature: MA Experiment ID: 108573 Result: Up-regulated in Transcription
  misc_feature: MA Experiment 108573 PARAMETER Experiment Name: At_Drought_cDNA_P Parameter: Timepoint (hr) Value: 6
  misc_feature: MA Experiment 108573 PARAMETER Experiment Name: At_Drought_cDNA_P Parameter: Tissue Value: Aerial
  misc_feature: MA Experiment 108573 PARAMETER Experiment Name: At_Drought_cDNA_P Parameter: Treatment Value: Drought vs. No Drought
  misc_feature: MA Experiment ID: 108585 Result: Up-regulated in Transcription
  misc_feature: MA Experiment 108585 PARAMETER Experiment Name: At_5mM_NaNP_cDNA_P Parameter: Timepoint (hr) Value: 6
  misc_feature: MA Experiment 108585 PARAMETER Experiment Name: At_5mM_NaNP_cDNA_P Parameter: Tissue Value: Aerial
  misc_feature: MA Experiment 108585 PARAMETER Experiment Name: At_5mM_NaNP_cDNA_P Parameter: Treatment Value: null
  misc_feature: MA Experiment ID: 108668 Result: Up-regulated in Transcription
  misc_feature: MA Experiment 108668 PARAMETER Experiment Name: At_2mM_SA_cDNA_P Parameter: Plant Line Value: WS
  misc_feature: MA Experiment 108668 PARAMETER Experiment Name: At_2mM_SA_cDNA_P Parameter: Timepoint (hr) Value: 6
  misc_feature: MA Experiment 108668 PARAMETER Experiment Name: At_2mM_SA_cDNA_P Parameter: Treatment Value: 2mM SA vs. No Treatment
  misc_feature: MA Experiment ID: 20000113 Result: Down-regulated in Transcription
  misc_feature: MA Experiment 20000113 PARAMETER Experiment Name: At_42deg_Heat_cDNA_P Parameter: Temperature (deg C) Value: 42 vs. 22
  misc_feature: MA Experiment 20000113 PARAMETER Experiment Name: At_42deg_Heat_cDNA_P Parameter: Timepoint (hr) Value: 8
  misc_feature: MA Experiment 20000113 PARAMETER Experiment Name: At_42deg_Heat_cDNA_P Parameter: Tissue Value: Aerial
  misc_feature: MA Experiment ID: 20000182 Result: Up-regulated in Transcription
  misc_feature: MA Experiment 20000182 PARAMETER Experiment Name: At_2mM_SA_P Parameter: Age (day) Value: 14
  misc_feature: MA Experiment 20000182 PARAMETER Experiment Name: At_2mM_SA_P Parameter: Organism Value: A. thaliana
  misc_feature: MA Experiment 20000182 PARAMETER Experiment Name: At_2mM_SA_P Parameter: Plant Line Value: WS
  misc_feature: MA Experiment 20000182 PARAMETER Experiment Name: At_2mM_SA_P Parameter: Timepoint (hr) Value: 6
  misc_feature: MA Experiment 20000182 PARAMETER Experiment Name: At_2mM_SA_P Parameter: Tissue Value: Aerial
  misc_feature: MA Experiment 20000182 PARAMETER Experiment Name: At_2mM_SA_P Parameter: Treatment Value: 2mM SA vs. No Treatment
  misc_feature: MA Experiment ID: 20000185 Result: Up-regulated in Transcription
  misc_feature: MA Experiment 20000185 PARAMETER Experiment Name: At_Roots__P Parameter: Age (day) Value: 7 vs. 21
  misc_feature: MA Experiment 20000185 PARAMETER Experiment Name: At_Roots__P Parameter: Organism Value: A. thaliana
  misc_feature: MA Experiment 20000185 PARAMETER Experiment Name: At_Roots__P Parameter: Tissue Value: Roots vs. Whole Plant
  misc_feature: MA Experiment ID: 20000439 Result: Up-regulated in Transcription
  misc_feature: MA Experiment 20000439 PARAMETER Experiment Name: At_Roots__P Parameter: Age (day) Value: 14 vs. 21
  misc_feature: MA Experiment 20000439 PARAMETER Experiment Name: At_Roots__P Parameter: Organism Value: A. thaliana
  misc_feature: MA Experiment 20000439 PARAMETER Experiment Name: At_Roots__P Parameter: Tissue Value: Roots vs. Whole Plant
  misc_feature: MA Experiment ID: 20000527 Result: Down-regulated in Transcription
  misc_feature: MA Experiment 20000527 PARAMETER Experiment Name: At_10percent_PEG_P Parameter: Age (day) Value: 20
  misc_feature: MA Experiment 20000527 PARAMETER Experiment Name: At_10percent_PEG_P Parameter: Organism Value: A. thaliana
  misc_feature: MA Experiment 20000527 PARAMETER Experiment Name: At_10percent_PEG_P Parameter: Plant Line Value: WS
  misc_feature: MA Experiment 20000527 PARAMETER Experiment Name: At_10percent_PEG_P Parameter: Timepoint (day) Value: 20
  misc_feature: MA Experiment 20000527 PARAMETER Experiment Name: At_10percent_PEG_P Parameter: Tissue Value: Whole Plant
  misc_feature: MA Experiment 20000527 PARAMETER Experiment Name: At_10percent_PEG_P Parameter: Treatment Value: 10percent PEG vs. No Treatment
atgtattcttctccttgtccttccttactctctatatttttctcaattctccgatttgatccaacgatttcacagatctctgatctaaatggcatccaacggtgataaaggactgatcgttagcttcggcgagatgctaatcgatttcgtccctaccgaatcaggcgtctctctcgccgaagctcctggattcctcaaagctccaggcggtgctcccgctaacgtcgcaatcgctgtttctcgtctcggtggacgatctgctttcgtcggaaaacttggagacgacgagttcggtcatatgttggctgggattttgaggaagaacggtgttgatgatcaggggattaacttcgatactggagctagaactgctttagctttcgttacgttacgtgctgatggagatcgtgagtttatgttttaccgcaatcctagcgccgatatgcttcttcgtcctgatgaactcaatctcgacctcatcagatccgcgaaagtgtttcactatggatcaataagtttgatagtggagccgtgtaggtcagctcatttgaaggccatggaagtggcgaaagaagcaggagctcttctttcctatgacccaaacctcagggagcctctgtggccatcaaaagaagaagccaaaacacagatcatgagcatttgggacaaagctgagatcatcaaggtgagcgatgttgagcttgagtttctaactggaagcaacaagattgatgatgagaccgcgttgaccttgtggcatcccaacttgaagctgttgttagtcactcttggtgaaaagggctgtcggtattacaccaagactttcaaaggagccgttgaccctttccatgtgaacgctgtggacacaaccggagctggagattcctttgtcggtgctcttctaaaccagattgtcgatgatcgatccgttctcgaggacgaagagagattgaggaaagtgctgagattcgcaaatgcttgtggagcaatcacaacgaccaaaaaaggagccattccagctcttccctcagatgctgaagttcggagctttctcgaaaagaaatagaaacaaaacaactcaagcttctattacgtaatctgtttccgcgattatcttctctttttgtattcttgttttcggatggttgaatcgagaagagaaacaaattcggcattccgctctgtttttgtttctcttcttcaaatgtaatgatttagaaaagacgtatgttgcaatttaaggcttcacttgctaataaaatgataaggttttt

SEQ ID NO: 84913 - protein, 325 aa, Arabidopsis thaliana; identical to SEQ ID NO: 30388
  peptide (1)..(325): Ceres Seq. ID no. 12677876
  misc_feature (7)..(315): Pfam Name: pfkB family carbohydrate kinase Pfam Description: pfkB family carbohydrate kinase
  misc_feature (1)..(325): Homolog of NCBI NO: 15224669 NR Description: putative fructokinase; protein id: At2g31390.1, by cDNA: 17664., supported by cDNA: gi_14423527, supported by gi_18389235, supported by cDNA: gi_20259070 [Arabidopsis
  misc_feature (1)..(325): Homolog of NCBI NO: 14423528 NR Description: putative fructokinase [Arabidopsis thaliana]
  misc_feature (2)..(323): Homolog of NCBI NO: 15221365 NR Description: fructokinase, putative; protein id: At1g06030.1, by cDNA: gi_20258777 [Arabidopsis thaliana]
  misc_feature (2)..(325): Homolog of NCBI NO: 15221364 NR Description: fructokinase, putative; protein id: At1g06020.1
  misc_feature (2)..(323): Homolog of NCBI NO: 15231692 NR Description: fructokinase-like protein; protein id: supported by cDNA: 24751. [Arabidopsis thaliana]
  misc_feature (2)..(323): Homolog of NCBI NO: 21592495 NR Description: fructokinase-like protein [Arabidopsis thaliana]
  misc_feature (1)..(323): Homolog of NCBI NO: 1915974 NR Description: fructokinase [Lycopersicon esculentum]
  misc_feature (1)..(323): Homolog of NCBI NO: 32765547 NR Description: fructokinase 2 [Lycopersicon hirsutum]
  misc_feature (3)..(324): Homolog of NCBI NO: 7434223 NR Description: fructokinase (EC 2.7.1.4) - beet
  misc_feature (1)..(323): Homolog of NCBI NO: 585973 NR Description: FRUCTOKINASE >gi|626018|pir||S39997 fructokinase

SEQ ID NO: 84914 - protein, 310 aa, Arabidopsis thaliana; identical to SEQ ID NO: 30389
  peptide (1)..(310): Ceres Seq. ID no. 12677877
  misc_feature (1)..(300): Pfam Name: pfkB family carbohydrate kinase Pfam Description: pfkB family carbohydrate kinase
  misc_feature (1)..(310): Homolog of NCBI NO: 15224669 NR Description: putative fructokinase; protein id: At2g31390.1, by cDNA: 17664., supported by cDNA: gi_14423527, supported by gi_18389235, supported by cDNA: gi_20259070 [Arabidopsis
  misc_feature (1)..(310): Homolog of NCBI NO: 14423528 NR Description: putative fructokinase [Arabidopsis thaliana]
  misc_feature (1)..(308): Homolog of NCBI NO: 15221365 NR Description: fructokinase, putative; protein id: At1g06030.1, by cDNA: gi_20258777 [Arabidopsis thaliana]
  misc_feature (1)..(310): Homolog of NCBI NO: 15221364 NR Description: fructokinase, putative; protein id: At1g06020.1
  misc_feature (1)..(308): Homolog of NCBI NO: 15231692 NR Description: fructokinase-like protein; protein id: supported by cDNA: 24751. [Arabidopsis thaliana]
  misc_feature (1)..(308): Homolog of NCBI NO: 21592495 NR Description: fructokinase-like protein [Arabidopsis thaliana]
  misc_feature (1)..(308): Homolog of NCBI NO: 1915974 NR Description: fructokinase [Lycopersicon esculentum]
  misc_feature (1)..(308): Homolog of NCBI NO: 32765547 NR Description: fructokinase 2 [Lycopersicon hirsutum]
  misc_feature (1)..(309): Homolog of NCBI NO: 7434223 NR Description: fructokinase (EC 2.7.1.4) - beet
  misc_feature (1)..(308): Homolog of NCBI NO: 585973 NR Description: FRUCTOKINASE >gi|626018|pir||S39997 fructokinase

SEQ ID NO: 84915 - protein, 255 aa, Arabidopsis thaliana; identical to SEQ ID NO: 30390
  peptide (1)..(255): Ceres Seq. ID no. 12677878
  misc_feature (1)..(245): Pfam Name: pfkB family carbohydrate kinase Pfam Description: pfkB family carbohydrate kinase
  misc_feature (1)..(255): Homolog of NCBI NO: 15224669 NR Description: putative fructokinase; protein id: At2g31390.1, by cDNA: 17664., supported by cDNA: gi_14423527, supported by gi_18389235, supported by cDNA: gi_20259070 [Arabidopsis
  misc_feature (1)..(255): Homolog of NCBI NO: 14423528 NR Description: putative fructokinase [Arabidopsis thaliana]
  misc_feature (1)..(253): Homolog of NCBI NO: 15221365 NR Description: fructokinase, putative; protein id: At1g06030.1, by cDNA: gi_20258777 [Arabidopsis thaliana]
  misc_feature (1)..(255): Homolog of NCBI NO: 15221364 NR Description: fructokinase, putative; protein id: At1g06020.1
  misc_feature (1)..(253): Homolog of NCBI NO: 15231692 NR Description: fructokinase-like protein; protein id: supported by cDNA: 24751. [Arabidopsis thaliana]
  misc_feature (1)..(253): Homolog of NCBI NO: 21592495 NR Description: fructokinase-like protein [Arabidopsis thaliana]
  misc_feature (1)..(253): Homolog of NCBI NO: 1915974 NR Description: fructokinase [Lycopersicon esculentum]
  misc_feature (1)..(253): Homolog of NCBI NO: 32765547 NR Description: fructokinase 2 [Lycopersicon hirsutum]
  misc_feature (1)..(254): Homolog of NCBI NO: 7434223 NR Description: fructokinase (EC 2.7.1.4) - beet
  misc_feature (1)..(253): Homolog of NCBI NO: 585973 NR Description: FRUCTOKINASE >gi|626018|pir||S39997 fructokinase

SEQ ID NO: 84916 - DNA, 1365 bp, Arabidopsis thaliana
  misc_feature (1)..(1365): Ceres Seq. ID no. 12677899
  misc_feature: MA Experiment ID: 20000314 Result: Down-regulated in Transcription
  misc_feature: MA Experiment 20000314 PARAMETER Experiment Name: At_14day_Shoots-Roots_Sub_P Parameter: Age (day) Value: 14
  misc_feature: MA Experiment 20000314 PARAMETER Experiment Name: At_14day_Shoots-Roots_Sub_P Parameter: Organism Value: A. thaliana
  misc_feature: MA Experiment 20000314 PARAMETER Experiment Name: At_14day_Shoots-Roots_Sub_P Parameter: Plant Line Value: WS
  misc_feature: MA Experiment 20000314 PARAMETER Experiment Name: At_14day_Shoots-Roots_Sub_P Parameter: Tissue Value: Roots vs. Whole Plant
  misc_feature: MA Experiment ID: 20000315 Result: Down-regulated in Transcription
  misc_feature: MA Experiment 20000315 PARAMETER Experiment Name: At_14day_Shoots-Roots_Sub_P Parameter: Age (day) Value: 14
  misc_feature: MA Experiment 20000315 PARAMETER Experiment Name: At_14day_Shoots-Roots_Sub_P Parameter: Organism Value: A. thaliana
  misc_feature: MA Experiment 20000315 PARAMETER Experiment Name: At_14day_Shoots-Roots_Sub_P Parameter: Plant Line Value: WS
  misc_feature: MA Experiment 20000315 PARAMETER Experiment Name: At_14day_Shoots-Roots_Sub_P Parameter: Tissue Value: Shoots vs. Whole Plant
  misc_feature: MA Experiment ID: 20000355 Result: Down-regulated in Transcription
  misc_feature: MA Experiment 20000355 PARAMETER Experiment Name: At_Siliques_Sub_P Parameter: Age (day) Value: 21
  misc_feature: MA Experiment 20000355 PARAMETER Experiment Name: At_Siliques_Sub_P Parameter: Organism Value: A. thaliana
  misc_feature: MA Experiment 20000355 PARAMETER Experiment Name: At_Siliques_Sub_P Parameter: Plant Line Value: WS
  misc_feature: MA Experiment 20000355 PARAMETER Experiment Name: At_Siliques_Sub_P Parameter: Tissue Value: Less Than 5mm Siliques vs. Whole Plant
  misc_feature: MA Experiment ID: 20000440 Result: Down-regulated in Transcription
  misc_feature: MA Experiment 20000440 PARAMETER Experiment Name: At_Closed-Flower__Sub_P Parameter: Tissue Value: Closed Flower vs. Whole Plant
atacgaggaaccataatgatttcatcgtcagagatgatggcgacggagaaggctccggaatttgtaacagccatggcaactgaaactgaacggatagggaattcgagggaagtagatgaggagaaaataagccgcaagaagaatcctgaagaagaagctcttgaagctaaatgtcttcccggaatcatcagtgcttatctcaattatcccaaggctgcggaagaaaatctgaaaaaatgcgaaagatcatatcagaagctgtctcctgcgcacaaggcattggtaacccatttccctatgaagttgcagagattaagaaggtgtatattgatgaattcacatttcatatataatatgcttcaggcttttgagccccctatagacttgagtaaacacatgcgcgagccaataacaggagcactgtctatggaggagctccaaagggaggaacatcatcatgatcattccctcaagaatgcagagataagactcaataacaagacatgtgaatttgatggaggccacttaaatcatgaccatggcagtgcgcatgttcctctggttgatgtaaataaggttcgttgggtaataaggaatatagttcgagactggggagcagagggtcagagagaacgagatgaatgctacaagcctatccttgaagagcttgattccttgtttcctgatcgtcacaaggagagcactcgtccagcctgtttagtccctggtgctggacttgggcggctggcccttgaaatttcttgtctaggtttcagaagccaaggcaatgaagtttcatactacatgatgttatgctcaagttttattcttaattatacacaattgcctggtgagtggacaatatacccctggatacacactaactgcaattcactctcggatgatgatcaactacgccctatttctattcctgatattcatcctgcaagtgcaggagtaacagaaagtttctcaatgtgtcgtggtgattttgttgaagtattcaatgaatcaagtcaagcaggaatgtgggatgcagttgtgacttgctttttcattgacacggctcataacatcatcgagtacatcgaaaccatatccaagattttaaaggatggaggagttttgataaatctaggacctctgttgtatcactttgcagacgagcagggccttgaaaatgaaatgtcgattgagctaagtttggaggatgtaaagagagttgcttcacattatgggtttgagatggagaaagaaaaaacaatagaaacaacgtactctacaaacccccggtctatgatgaagaaccgatactatcctgtcttctggacaatgaggaagaagtgtgctataacaacaacttaa

SEQ ID NO: 84917 - protein, 454 aa, Arabidopsis thaliana
  peptide (1)..(454): Ceres Seq. ID no. 12677900
  misc_feature (6)..(454): Homolog of NCBI NO: 30685200 NR Description: expressed protein [Arabidopsis thaliana]
  misc_feature (6)..(420): Homolog of NCBI NO: 30685195 NR Description: expressed protein [Arabidopsis thaliana]
  misc_feature (183)..(454): Homolog of NCBI NO: 25349707 NR Description: hypothetical protein At2g32160 [imported] - thaliana >gi|4263703|gb|AAD15389.1| hypothetical protein
  misc_feature (6)..(144): Homolog of NCBI NO: 25349707 NR Description: hypothetical protein At2g32160 [imported] - thaliana >gi|4263703|gb|AAD15389.1| hypothetical protein
  misc_feature (130)..(454): Homolog of NCBI NO: 30685202 NR Description: expressed protein [Arabidopsis thaliana] unknown protein [Arabidopsis thaliana]
  misc_feature (6)..(176): Homolog of NCBI NO: 30685202 NR Description: expressed protein [Arabidopsis thaliana] unknown protein [Arabidopsis thaliana]
  misc_feature (154)..(447): Homolog of NCBI NO: 20886869 NR Description: RIKEN cDNA 2410127L17 [Mus musculus] similar to data source:SPTR, source key:O46078, to EG:39E1.1 PROTEIN (CG11596 PROTEIN) [Mus musculus]
  misc_feature (50)..(120): Homolog of NCBI NO: 20886869 NR Description: RIKEN cDNA 2410127L17 [Mus musculus] similar to data source:SPTR, source key:O46078, to EG:39E1.1 PROTEIN (CG11596 PROTEIN) [Mus musculus]
  misc_feature (154)..(447): Homolog of NCBI NO: 22748889 NR Description: hypothetical protein FLJ25795 [Homo sapiens]
  misc_feature (44)..(120): Homolog of NCBI NO: 22748889 NR Description: hypothetical protein FLJ25795 [Homo sapiens]
IRGTIMISSSEMMATEKAPEFVTAMATETERIGNSREVDEEKISRKKNPEEEALEAKCLPGIISAYLNYPKAAEENLKKCERSYQKLSPAHKALVTHFPMKLQRLRRCILMNSHFIYNMLQAFEPPIDLSKHMREPITGALSMEELQREEHHHDHSLKNAEIRLNNKTCEFDGGHLNHDHGSAHVPLVDVNKVRWVIRNIVRDWGAEGQRERDECYKPILEELDSLFPDRHKESTRPACLVPGAGLGRLALEISCLGFRSQGNEVSYYMMLCSSFILNYTQLPGEWTIYPWIHTNCNSLSDDDQLRPISIPDIHPASAGVTESFSMCRGDFVEVFNESSQAGMWDAVVTCFFIDTAHNIIEYIETISKILKDGGVLINLGPLLYHFADEQGLENEMSIELSLEDVKRVASHYGFEMEKEKTIETTYSTNPRSMMKNRYYPVFWTMRKKCAITTT

SEQ ID NO: 84918 - protein, 449 aa, Arabidopsis thaliana
  peptide (1)..(449): Ceres Seq. ID no. 12677901
  misc_feature (1)..(449): Homolog of NCBI NO: 30685200 NR Description: expressed protein [Arabidopsis thaliana]
  misc_feature (1)..(415): Homolog of NCBI NO: 30685195 NR Description: expressed protein [Arabidopsis thaliana]
  misc_feature (178)..(449): Homolog of NCBI NO: 25349707 NR Description: hypothetical protein At2g32160 [imported] - thaliana >gi|4263703|gb|AAD15389.1| hypothetical protein
  misc_feature (1)..(139): Homolog of NCBI NO: 25349707 NR Description: hypothetical protein At2g32160 [imported] - thaliana >gi|4263703|gb|AAD15389.1| hypothetical protein
  misc_feature (125)..(449): Homolog of NCBI NO: 30685202 NR Description: expressed protein [Arabidopsis thaliana] unknown protein [Arabidopsis thaliana]
  misc_feature (1)..(171): Homolog of NCBI NO: 30685202 NR Description: expressed protein [Arabidopsis thaliana] unknown protein [Arabidopsis thaliana]
  misc_feature (149)..(442): Homolog of NCBI NO: 20886869 NR Description: RIKEN cDNA 2410127L17 [Mus musculus] similar to data source:SPTR, source key:O46078, to EG:39E1.1 PROTEIN (CG11596 PROTEIN) [Mus musculus]
  misc_feature (45)..(115): Homolog of NCBI NO: 20886869 NR Description: RIKEN cDNA 2410127L17 [Mus musculus] similar to data source:SPTR, source key:O46078, to EG:39E1.1 PROTEIN (CG11596 PROTEIN) [Mus musculus]
  misc_feature (149)..(442): Homolog of NCBI NO: 22748889 NR Description: hypothetical protein FLJ25795 [Homo sapiens]
  misc_feature (39)..(115): Homolog of NCBI NO: 22748889 NR Description: hypothetical protein FLJ25795 [Homo sapiens]
MISSSEMMATEKAPEFVTAMATETERIGNSREVDEEKISRKKNPEEEALEAKCLPGIISAYLNYPKAAEENLKKCERSYQKLSPAHKALVTHFPMKLQRLRRCILMNSHFIYNMLQAFEPPIDLSKHMREPITGALSMEELQREEHHHDHSLKNAEIRLNNKTCEFDGGHLNHDHGSAHVPLVDVNKVRWVIRNIVRDWGAEGQRERDECYKPILEELDSLFPDRHKESTRPACLVPGAGLGRLALEISCLGFRSQGNEVSYYMMLCSSFILNYTQLPGEWTIYPWIHTNCNSLSDDDQLRPISIPDIHPASAGVTESFSMCRGDFVEVFNESSQAGMWDAVVTCFFIDTAHNIIEYIETISKILKDGGVLINLGPLLYHFADEQGLENEMSIELSLEDVKRVASHYGFEMEKEKTIETTYSTNPRSMMKNRYYPVFWTMRKKCAITTT

SEQ ID NO: 84919 - protein, 443 aa, Arabidopsis thaliana
  peptide (1)..(443): Ceres Seq. ID no. 12677902
  misc_feature (1)..(443): Homolog of NCBI NO: 30685200 NR Description: expressed protein [Arabidopsis thaliana]
  misc_feature (1)..(409): Homolog of NCBI NO: 30685195 NR Description: expressed protein [Arabidopsis thaliana]
  misc_feature (172)..(443): Homolog of NCBI NO: 25349707 NR Description: hypothetical protein At2g32160 [imported] - thaliana >gi|4263703|gb|AAD15389.1| hypothetical protein
  misc_feature (1)..(133): Homolog of NCBI NO: 25349707 NR Description: hypothetical protein At2g32160 [imported] - thaliana >gi|4263703|gb|AAD15389.1| hypothetical protein
  misc_feature (119)..(443): Homolog of NCBI NO: 30685202 NR Description: expressed protein [Arabidopsis thaliana] unknown protein [Arabidopsis thaliana]
  misc_feature (1)..(165): Homolog of NCBI NO: 30685202 NR Description: expressed protein [Arabidopsis thaliana] unknown protein [Arabidopsis thaliana]
  misc_feature (143)..(436): Homolog of NCBI NO: 20886869 NR Description: RIKEN cDNA 2410127L17 [Mus musculus] similar to data source:SPTR, source key:O46078, to EG:39E1.1 PROTEIN (CG11596 PROTEIN) [Mus musculus]
  misc_feature (39)..(109): Homolog of NCBI NO: 20886869 NR Description: RIKEN cDNA 2410127L17 [Mus musculus] similar to data source:SPTR, source key:O46078, to EG:39E1.1 PROTEIN (CG11596 PROTEIN) [Mus musculus]
  misc_feature (143)..(436): Homolog of NCBI NO: 22748889 NR Description: hypothetical protein FLJ25795 [Homo sapiens]
  misc_feature (33)..(109): Homolog of NCBI NO: 22748889 NR Description: hypothetical protein FLJ25795 [Homo sapiens]
MMATEKAPEFVTAMATETERIGNSREVDEEKISRKKNPEEEALEAKCLPGIISAYLNYPKAAEENLKKCERSYQKLSPAHKALVTHFPMKLQRLRRCILMNSHFIYNMLQAFEPPIDLSKHMREPITGALSMEELQREEHHHDHSLKNAEIRLNNKTCEFDGGHLNHDHGSAHVPLVDVNKVRWVIRNIVRDWGAEGQRERDECYKPILEELDSLFPDRHKESTRPACLVPGAGLGRLALEISCLGFRSQGNEVSYYMMLCSSFILNYTQLPGEWTIYPWIHTNCNSLSDDDQLRPISIPDIHPASAGVTESFSMCRGDFVEVFNESSQAGMWDAVVTCFFIDTAHNIIEYIETISKILKDGGVLINLGPLLYHFADEQGLENEMSIELSLEDVKRVASHYGFEMEKEKTIETTYSTNPRSMMKNRYYPVFWTMRKKCAITTT

SEQ ID NO: 84920 - DNA, 2384 bp, Arabidopsis thaliana
  misc_feature (1)..(2384): Ceres Seq. ID no. 12677907
  misc_feature: MA Experiment ID: 20000307 Result: Up-regulated in Transcription
  misc_feature: MA Experiment 20000307 PARAMETER Experiment Name: At_Germinating_Seeds_Sub_P Parameter: Age (hr) Value: 24 vs. 0
  misc_feature: MA Experiment 20000307 PARAMETER Experiment Name: At_Germinating_Seeds_Sub_P Parameter: Organism Value: A. thaliana
  misc_feature: MA Experiment 20000307 PARAMETER Experiment Name: At_Germinating_Seeds_Sub_P Parameter: Plant Line Value: WS
  misc_feature: MA Experiment 20000307 PARAMETER Experiment Name: At_Germinating_Seeds_Sub_P Parameter: Tissue Value: Germinating Seeds
  misc_feature: MA Experiment ID: 20000440 Result: Up-regulated in Transcription
  misc_feature: MA Experiment 20000440 PARAMETER Experiment Name: At_Closed-Flower__Sub_P Parameter: Tissue Value: Closed Flower vs. Whole Plant
accctatataaacatatccaaaaaccgcaagaaagctcacaagaaatctcctcccatggcagattcaagttcttctctccctcctctttgcgagaagatctcatacaaaaactattttctaagagttgtggatctcacgattctaggctttctcttttctcttctcttgtaccgaattctacttatgaaccaaaacaactccgtttgggttgtggctttcctctgtgaatcctttttctctttcatatggcttcttattaccagcataaaatggagtcctgcttcatataaatcatatcctgaaagacttgatgaaagggttcatgaccttccatcggtagatatgtttgtgactactgcggatcctgttcgggagccgccgattcttgtagcaaacacgttgctttcgctgttagcagtgaattatccagcgaataaacttgcttgttatgtatcggatgatggatgctcacctctcacttacttctctctcaaggaagcttctaagttcgccaagatttgggttcccttctgcaaaaaatataacattaaagttagagctccttttagatattttttgaaccctccagccgcaacagaaagttctgaattcagtaaagactgggaaataaccaagagggagtacgagaaattaagcaggagggtggaagatgccactggagattcccattggttggatgcagaagatgactttgaagatttctcgaatacaaaaccaaatgatcattcaactatagtaaaggtggtatgggagaacaagggaggtgtcggagtcgagaacgaggttcctcattttgtatacatttcaagagagaaaagaccaaattatcttcatcattacaaagctggagccatgaactttctggtaagagtgtcagggttgatgacaaatgcaccatacatgttgaacgtagactgtgacatgtatgctaatgaagcagatgtggtgcgccaagcaatgtgtatatttctacaaaaatcaatgaattcaaaccattgtgcttttgttcaattccctcaagagttctatgattctaacgccgacgaactcaccgtcttacaatcatatttgggacgaggaattgcgggaatccaaggacctacatatgcaggttcaggatgcttccacactagaagagttatgtacggtctatcaatagatgatttagaagatgatggaagtctttcttcacttgcaacaaggaagtatttggctgaagagaatttagctagagaatttgggaactctaacgagatggtgacatcggtggtcgaggcattacaaagaaaaccaaatccgcaaaatacccttgcaaactccctcgaagcggctcaagaagtgggacattgtcattttgagtaccaaactagctggggcaaaactattggttggttatacgaatcaacagcggaagatgcaaacacgagtatcggaatccattcgagagggtggactagctcatatatatctccgaaaccaccagcgtttcttggggctatgccaccgggaggtccggaagcgatgctccagcagcggcgatgggccacaggactgctcgaagtccttttcaacaaacaaagtccgttgatcggaatgttttgtaggaaaataagatttcgacaaagcttggcttatttatacattttcacttggggtctaaggtcaatccctgagcttatttattgtctcttgcctgcttattgcctactccacaacgctgccttatttcccaagggagtttatttaggtatagtcgtcacacttgtgggaatgcattgtctttactctctatgggaatttatgagccttggtttctcagtacaatcgtggtttgcctcccaatcattttggaggataaaaaccacttgcagttggttatttagcatccctgatatcatactcaagctacttggaatctcgaaaactgttttcatagtcactaaaaagactatgcccaagacaatgtcaggatctggatccgaaaaatctcaacgagaagttgattgtccaaaccaagattccggtaaatttgaatttgatggctcgctttatttcttgcctggcacatttatccttttagtgaatctagccgctctagccggttgttcggtgggtctacaacgtcacagaggaggtggttcgggtttagcagaagcttgtggatgtattttggtggttatattgtttcttccatttctaaagggtatgtttgagaagggaaaatatggtatcccatggtctactctttctaaagctgcctttttagcagttttatttgttgttttctctgtgggaaactagtatactgatatggctttaatttgtagctaaaaactgctaatatgaaaataattattctcta

SEQ ID NO: 84921 - protein, 773 aa, Arabidopsis thaliana
  peptide (1)..(773): Ceres Seq. ID no. 12677908
  misc_feature (19)..(771): Homolog of NCBI NO: 15225711 NR Description: putative cellulose synthase; protein id: [Arabidopsis thaliana] >gi|7484863|pir||T02560 cellulose synthase
  misc_feature (293)..(620): Homolog of NCBI NO: 15233771 NR Description: cellulose synthase like protein; protein id:
  misc_feature (19)..(256): Homolog of NCBI NO: 15233771 NR Description: cellulose synthase like protein; protein id:
  misc_feature (252)..(296): Homolog of NCBI NO: 15233771 NR Description: cellulose synthase like protein; protein id:
  misc_feature (469)..(675): Homolog of NCBI NO: 15233771 NR Description: cellulose synthase like protein; protein id:
  misc_feature (31)..(773): Homolog of NCBI NO: 17385973 NR Description: CSLH1 [Oryza sativa]
  misc_feature (29)..(729): Homolog of NCBI NO: 37533088 NR Description: unknown protein [Oryza sativa (japonica >gi|22539080|gb|AAN01252.1| Unknown protein similar to putative
  misc_feature (41)..(431): Homolog of NCBI NO: 9622882 NR Description: cellulose synthase-5 [Zea mays]
  misc_feature (392)..(766): Homolog of NCBI NO: 9622882 NR Description: cellulose synthase-5 [Zea mays]
  misc_feature (381)..(767): Homolog of NCBI NO: 15237958 NR Description: cellulose synthase catalytic subunit (IRX3); id: At5g17420.1, supported by cDNA: gi_4886755 [Arabidopsis >gi|11357223|pir||T51579 cellulose synthase catalytic subunit
PYINISKNRKKAHKKSPPMADSSSSLPPLCEKISYKNYFLRVVDLTILGFLFSLLLYRILLMNQNNSVWVVAFLCESFFSFIWLLITSIKWSPASYKSYPERLDERVHDLPSVDMFVTTADPVREPPILVANTLLSLLAVNYPANKLACYVSDDGCSPLTYFSLKEASKFAKIWVPFCKKYNIKVRAPFRYFLNPPAATESSEFSKDWEITKREYEKLSRRVEDATGDSHWLDAEDDFEDFSNTKPNDHSTIVKVVWENKGGVGVENEVPHFVYISREKRPNYLHHYKAGAMNFLVRVSGLMTNAPYMLNVDCDMYANEADVVRQAMCIFLQKSMNSNHCAFVQFPQEFYDSNADELTVLQSYLGRGIAGIQGPTYAGSGCFHTRRVMYGLSIDDLEDDGSLSSLATRKYLAEENLAREFGNSNEMVTSVVEALQRKPNPQNTLANSLEAAQEVGHCHFEYQTSWGKTIGWLYESTAEDANTSIGIHSRGWTSSYISPKPPAFLGAMPPGGPEAMLQQRRWATGLLEVLFNKQSPLIGMFCRKIRFRQSLAYLYIFTWGLRSIPELIYCLLPAYCLLHNAALFPKGVYLGIVVTLVGMHCLYSLWEFMSLGFSVQSWFASQSFWRIKTTCSWLFSIPDIILKLLGISKTVFIVTKKTMPKTMSGSGSEKSQREVDCPNQDSGKFEFDGSLYFLPGTFILLVNLAALAGCSVGLQRHRGGGSGLAEACGCILVVILFLPFLKGMFEKGKYGIPWSTLSKAAFLAVLFVVFSVGN

SEQ ID NO: 84922 - protein, 755 aa, Arabidopsis thaliana
  peptide (1)..(755): Ceres Seq. ID no. 12677909
  misc_feature (1)..(753): Homolog of NCBI NO: 15225711 NR Description: putative cellulose synthase; protein id: [Arabidopsis thaliana] >gi|7484863|pir||T02560 cellulose synthase
  misc_feature (275)..(602): Homolog of NCBI NO: 15233771 NR Description: cellulose synthase like protein; protein id:
  misc_feature (1)..(238): Homolog of NCBI NO: 15233771 NR Description: cellulose synthase like protein; protein id:
  misc_feature (234)..(278): Homolog of NCBI NO: 15233771 NR Description: cellulose synthase like protein; protein id:
  misc_feature (451)..(657): Homolog of NCBI NO: 15233771 NR Description: cellulose synthase like protein; protein id:
  misc_feature (13)..(755): Homolog of NCBI NO: 17385973 NR Description: CSLH1 [Oryza sativa]
  misc_feature (11)..(711): Homolog of NCBI NO: 37533088 NR Description: unknown protein [Oryza sativa (japonica >gi|22539080|gb|AAN01252.1| Unknown protein similar to putative
  misc_feature (23)..(413): Homolog of NCBI NO: 9622882 NR Description: cellulose synthase-5 [Zea mays]
  misc_feature (374)..(748): Homolog of NCBI NO: 9622882 NR Description: cellulose synthase-5 [Zea mays]
  misc_feature (363)..(749): Homolog of NCBI NO: 15237958 NR Description: cellulose synthase catalytic subunit (IRX3); id: At5g17420.1, supported by cDNA: gi_4886755 [Arabidopsis >gi|11357223|pir||T51579 cellulose synthase catalytic subunit
MADSSSSLPPLCEKISYKNYFLRVVDLTILGFLFSLLLYRILLMNQNNSVWVVAFLCESFFSFIWLLITSIKWSPASYKSYPERLDERVHDLPSVDMFVTTADPVREPPILVANTLLSLLAVNYPANKLACYVSDDGCSPLTYFSLKEASKFAKIWVPFCKKYNIKVRAPFRYFLNPPAATESSEFSKDWEITKREYEKLSRRVEDATGDSHWLDAEDDFEDFSNTKPNDHSTIVKVVWENKGGVGVENEVPHFVYISREKRPNYLHHYKAGAMNFLVRVSGLMTNAPYMLNVDCDMYANEADVVRQAMCIFLQKSMNSNHCAFVQFPQEFYDSNADELTVLQSYLGRGIAGIQGPTYAGSGCFHTRRVMYGLSIDDLEDDGSLSSLATRKYLAEENLAREFGNSNEMVTSVVEALQRKPNPQNTLANSLEAAQEVGHCHFEYQTSWGKTIGWLYESTAEDANTSIGIHSRGWTSSYISPKPPAFLGAMPPGGPEAMLQQRRWATGLLEVLFNKQSPLIGMFCRKIRFRQSLAYLYIFTWGLRSIPELIYCLLPAYCLLHNAALFPKGVYLGIVVTLVGMHCLYSLWEFMSLGFSVQSWFASQSFWRIKTTCSWLFSIPDIILKLLGISKTVFIVTKKTMPKTMSGSGSEKSQREVDCPNQDSGKFEFDGSLYFLPGTFILLVNLAALAGCSVGLQRHRGGGSGLAEACGCILVVILFLPFLKGMFEKGKYGIPWSTLSKAAFLAVLFVVFSVGN

SEQ ID NO: 84923 - protein, 712 aa, Arabidopsis thaliana
  peptide (1)..(712): Ceres Seq. ID no. 12677910
  misc_feature (1)..(710): Homolog of NCBI NO: 15225711 NR Description: putative cellulose synthase; protein id: [Arabidopsis thaliana] >gi|7484863|pir||T02560 cellulose synthase
  misc_feature (232)..(559): Homolog of NCBI NO: 15233771 NR Description: cellulose synthase like protein; protein id:
  misc_feature (1)..(195): Homolog of NCBI NO: 15233771 NR Description: cellulose synthase like protein; protein id:
  misc_feature (191)..(235): Homolog of NCBI NO: 15233771 NR Description: cellulose synthase like protein; protein id:
  misc_feature (408)..(614): Homolog of NCBI NO: 15233771 NR Description: cellulose synthase like protein; protein id:
  misc_feature (1)..(712): Homolog of NCBI NO: 17385973 NR Description: CSLH1 [Oryza sativa]
  misc_feature (1)..(668): Homolog of NCBI NO: 37533088 NR Description: unknown protein [Oryza sativa (japonica >gi|22539080|gb|AAN01252.1| Unknown protein similar to putative
  misc_feature (1)..(370): Homolog of NCBI NO: 9622882 NR Description: cellulose synthase-5 [Zea mays]
  misc_feature (331)..(705): Homolog of NCBI NO: 9622882 NR Description: cellulose synthase-5 [Zea mays]
  misc_feature (320)..(706): Homolog of NCBI NO: 15237958 NR Description: cellulose synthase catalytic subunit (IRX3); id: At5g17420.1, supported by cDNA: gi_4886755 [Arabidopsis >gi|11357223|pir||T51579 cellulose synthase catalytic subunit
MNQNNSVWVVAFLCESFFSFIWLLITSIKWSPASYKSYPERLDERVHDLPSVDMFVTTADPVREPPILVANTLLSLLAVNYPANKLACYVSDDGCSPLTYFSLKEASKFAKIWVPFCKKYNIKVRAPFRYFLNPPAATESSEFSKDWEITKREYEKLSRRVEDATGDSHWLDAEDDFEDFSNTKPNDHSTIVKVVWENKGGVGVENEVPHFVYISREKRPNYLHHYKAGAMNFLVRVSGLMTNAPYMLNVDCDMYANEADVVRQAMCIFLQKSMNSNHCAFVQFPQEFYDSNADELTVLQSYLGRGIAGIQGPTYAGSGCFHTRRVMYGLSIDDLEDDGSLSSLATRKYLAEENLAREFGNSNEMVTSVVEALQRKPNPQNTLANSLEAAQEVGHCHFEYQTSWGKTIGWLYESTAEDANTSIGIHSRGWTSSYISPKPPAFLGAMPPGGPEAMLQQRRWATGLLEVLFNKQSPLIGMFCRKIRFRQSLAYLYIFTWGLRSIPELIYCLLPAYCLLHNAALFPKGVYLGIVVTLVGMHCLYSLWEFMSLGFSVQSWFASQSFWRIKTTCSWLFSIPDIILKLLGISKTVFIVTKKTMPKTMSGSGSEKSQREVDCPNQDSGKFEFDGSLYFLPGTFILLVNLAALAGCSVGLQRHRGGGSGLAEACGCILVVILFLPFLKGMFEKGKYGIPWSTLSKAAFLAVLFVVFSVGN

SEQ ID NO: 84924 - DNA, 627 bp, Arabidopsis thaliana
  misc_feature (1)..(627): Ceres Seq. ID no. 12677923
  misc_feature: MA Experiment ID: 20000185 Result: Up-regulated in Transcription
  misc_feature: MA Experiment 20000185 PARAMETER Experiment Name: At_Roots__P Parameter: Age (day) Value: 7 vs. 21
  misc_feature: MA Experiment 20000185 PARAMETER Experiment Name: At_Roots__P Parameter: Organism Value: A. thaliana
  misc_feature: MA Experiment 20000185 PARAMETER Experiment Name: At_Roots__P Parameter: Tissue Value: Roots vs. Whole Plant
  misc_feature: MA Experiment ID: 20001451 Result: Down-regulated in Transcription
  misc_feature: MA Experiment 20001451 PARAMETER Experiment Name: At_Far-red-induction_P Parameter: Age (day) Value: 7
  misc_feature: MA Experiment 20001451 PARAMETER Experiment Name: At_Far-red-induction_P Parameter: Light Value: Far-red vs. White
  misc_feature: MA Experiment 20001451 PARAMETER Experiment Name: At_Far-red-induction_P Parameter: Organism Value: A. thaliana
  misc_feature: MA Experiment 20001451 PARAMETER Experiment Name: At_Far-red-induction_P Parameter: Plant Line Value: Columbia
  misc_feature: MA Experiment 20001451 PARAMETER Experiment Name: At_Far-red-induction_P Parameter: Timepoint (hr) Value: 24
  misc_feature: MA Experiment 20001451 PARAMETER Experiment Name: At_Far-red-induction_P Parameter: Tissue Value: Whole Plant
tctctctcgaatctctctctataatccgatctgagaaatttcgccggagctaggttttgttgtttaccgatcaatcctttaacttgactcatatgagattgaaggtggggaaacaaagggagaaatattgcagaatctggccgagttccaattctcttgtgtgatgttcaatgcggttctggagaatgcatgtagtgagatgggagcaagaatgtctgccatggacagctcaagcagaaacgcaggagaaatgctcgaccgtctcaccctcacatacaacaggactcgtcaagcttctattacaacagagcttattgagattatctctggagcttctgctcttgaagctgctaaataagcccatccgtgttagttctcttttcttcgctttgatatttacccccaccttgaaggagaagagtgtgttaaaattttactgaatcagtttcctttgctggcttcttgttgagacctaccaatgtttgctcaacgatttttaataaacatacctgtaatttccagcaggatttcgaataattgcattaacattttgttctgattcagactcgcttcctccagagtctgtagtgttgttttgtgcaaacaccatgtactccggtttatttg

SEQ ID NO: 84925 - protein, 89 aa, Arabidopsis thaliana
  peptide (1)..(89): Ceres Seq. ID no. 12677924
MRFWRMHVVRWEQECLPWTAQAETQEKCSTVSPSHTTGLVKLLLQQSLLRLSLELLLLKLLNKPIRVSSLFFALIFTPTLKEKSVLKFY

SEQ ID NO: 84926 - protein, 84 aa, Arabidopsis thaliana
  peptide (1)..(84): Ceres Seq. ID no. 12677925
MHVVRWEQECLPWTAQAETQEKCSTVSPSHTTGLVKLLLQQSLLRLSLELLLLKLLNKPIRVSSLFFALIFTPTLKEKSVLKFY

SEQ ID NO: 84927 - protein, 64 aa, Arabidopsis thaliana; identical to SEQ ID NO: 43383
  peptide (1)..(64): Ceres Seq. ID no. 12677926
  misc_feature (1)..(60): Pfam Name: ATP synthase Pfam Description: ATP synthase
  misc_feature (1)..(64): Homolog of NCBI NO: 7436158 NR Description: probable H+-transporting two-sector ATPase (EC
  misc_feature (1)..(64): Homolog of NCBI NO: 15227257 NR Description: mitochondrial F1-ATPase, gamma subunit protein id: At2g33040.1, supported by cDNA: 26812., supported by
  misc_feature (1)..(64): Homolog of NCBI NO: 22530902 NR Description: mitochondrial F1-ATPase, gamma subunit
  misc_feature (1)..(61): Homolog of NCBI NO: 37532654 NR Description: putative ATP SYNTHASE GAMMA CHAIN, MITOCHONDRIAL
  misc_feature (1)..(61): Homolog of NCBI NO: 543867 NR Description: ATP synthase gamma chain, mitochondrial precursor
  misc_feature (1)..(61): Homolog of NCBI NO: 7436157 NR Description: probable H+-transporting two-sector ATPase (EC
  misc_feature (1)..(60): Homolog of NCBI NO: 13473457 NR Description: ATP synthase gamma subunit [Mesorhizobium loti]
  misc_feature (1)..(60): Homolog of NCBI NO: 15966788 NR Description: PROBABLE ATP SYNTHASE GAMMA CHAIN PROTEIN meliloti] >gi|15076060|emb|CAC47614.1| PROBABLE ATP SYNTHASE
  misc_feature (1)..(64): Homolog of NCBI NO: 11466530 NR Description: ATP synthase F1 subunit alpha [Reclinomonas
  misc_feature (1)..(60): Homolog of NCBI NO: 15889878 NR Description: AGR_C_4756p [Agrobacterium tumefaciens] ATP synthase gamma chain [Agrobacterium tumefaciens str. C58 (U.

SEQ ID NO: 84928 - DNA, 2971 bp, Arabidopsis thaliana
  misc_feature (1)..(2971): Ceres Seq. ID no. 12677927
  misc_feature: MA Experiment ID: 20000173 Result: Down-regulated in Transcription
  misc_feature: MA Experiment 20000173 PARAMETER Experiment Name: At_42deg_Heat_P Parameter: Age (day) Value: 14
  misc_feature: MA Experiment 20000173 PARAMETER Experiment Name: At_42deg_Heat_P Parameter: Organism Value: A. thaliana
  misc_feature: MA Experiment 20000173 PARAMETER Experiment Name: At_42deg_Heat_P Parameter: Plant Line Value: WS
  misc_feature: MA Experiment 20000173 PARAMETER Experiment Name: At_42deg_Heat_P Parameter: Temperature (deg C) Value: 42 vs. 22
  misc_feature: MA Experiment 20000173 PARAMETER Experiment Name: At_42deg_Heat_P Parameter: Timepoint (hr) Value: 6
  misc_feature: MA Experiment 20000173 PARAMETER Experiment Name: At_42deg_Heat_P Parameter: Tissue Value: Aerial
  misc_feature: MA Experiment ID: 20000180 Result: Up-regulated in Transcription
  misc_feature: MA Experiment 20000180 PARAMETER Experiment Name: At_Germinating_Seeds_P Parameter: Age (hr) Value: 24 vs. 0
  misc_feature: MA Experiment 20000180 PARAMETER Experiment Name: At_Germinating_Seeds_P Parameter: Tissue Value: Germinating Seeds
  misc_feature: MA Experiment ID: 20001451 Result: Down-regulated in Transcription
  misc_feature: MA Experiment 20001451 PARAMETER Experiment Name: At_Far-red-induction_P Parameter: Age (day) Value: 7
  misc_feature: MA Experiment 20001451 PARAMETER Experiment Name: At_Far-red-induction_P Parameter: Light Value: Far-red vs. White
  misc_feature: MA Experiment 20001451 PARAMETER Experiment Name: At_Far-red-induction_P Parameter: Organism Value: A. thaliana
  misc_feature: MA Experiment 20001451 PARAMETER Experiment Name: At_Far-red-induction_P Parameter: Plant Line Value: Columbia
  misc_feature: MA Experiment 20001451 PARAMETER Experiment Name: At_Far-red-induction_P Parameter: Timepoint (hr) Value: 24
  misc_feature: MA Experiment 20001451 PARAMETER Experiment Name: At_Far-red-induction_P Parameter: Tissue Value: Whole Plant
ttttacttcaatggcagagtcaattcgaactttttcgcttcaatggcggatactgtcactgatcatcgctttacttgtgtactttccgattctgtcgggaagttactttaaaccgttcaatgtgagctacgatcaccgggctttaatcatcgccggcaagaggcgcatgctcgtctcagctggaattcactaccctcgagccactcctgagatgtggtctgatctcatcgcaaagagtaaagaaggtggagctgatgtggttcaaacttatgtgttttggaatgggcacgagcctgtaaagggtcagtataactttgaaggaagatatgaccttgtcaaatttgtgaagcttattggatcaagtggtctttatctccatctacggataggtccttatgtttgtgctgagtggaactttggggggttcccagtgtggctgcgggatattcctggcattgagtttcgaacagataatgaaccttttaagaaagagatgcaaaagtttgtaacaaagattgtggatttgatgcgagaagcaaagctcttctgttggcaaggaggtcccataatcatgctgcagatcgagaatgaatatggggatgttgaaaaatcttacgggcagaagggaaaggattacgtcaaatgggcagctagcatggctctagggcttggtgctggagttccgtgggttatgtgcaaacaaacggacgctccagagaatattattgatgcatgcaatggatactattgtgatggttttaaaccaaattcgcggacgaagccagtactttggacagaggattgggatggatggctgactttttgaaggtacacgaagtggggtggaagtttgcctcaccgacctgctgaagatcttgcatttgcagttgcaagattttatcagcgtggaggaagctttcaaaattattatatgtattttggtggaacaaactttggtcgaacttctggtggtcctttctacattacaagctatgattatgatgctcctcttgatgaatatggtctgaggagcgagccaaaatgggggcatctaaaggaccttcatgctgccataaaactttgtgaacctgctcttgtcgcggcggatgcacctcaatatagaaaattgggatcaaagcaggaggcacacatttatcatggagatggtgagactggaggaaaggtgtgcgctgcatttctcgcaaacattgatgagcataaatctgcacatgtgaaatttaatggccagtcatatactttaccaccttggtcagtgagtatattgccagactgtcgacatgtggccttcaacactgccaaggtaggagcacaaacttctgttaaaacggttgagtctgcaaggccatctttaggtagtatgtctatactgcaaaaagtcgtgaggcaggataatgtttcttatatctcaaaatcatggatggctctgaaagaacctattggcatatggggtgaaaacaatttcactttccaaggattattggagcatttgaatgttacaaaagaccggtctgattacctgtggcataagacaagaataagcgtatctgaagatgatatctcgttctggaagaaaaatggacctaactcaacagtgtcgattgatagcatgagggatgtgttacgtgtgtttgttaacaaacaactcgcaggcagtattgttggtcactgggtgaaggcagtgcagcctgtacgatttatacagggaaacaatgatttacttctgttgactcaaacagttggtttacagaattatggtgctttcttggagaaggatggagccggttttagaggcaaagctaagcttactggattcaagaatggagatttagacctgtcaaaatcgtcatggacgtatcaggtgggattgaagggcgaggctgataaaatatatactgttgaacacaatgaaaaagctgagtggagtactttggagaccgatgcttcaccttcgatcttcatgtggtacaagacatactttgaccccccggccggaacagatcctgttgttcttaatctggaaagtatgggaagggggcaagcttgggtcaatggacaacatattggaaggtattggaatatcatttcccaaaaggatggatgtgacagaacctgtgattatcgtggagcctacaattcagataagtgcacaacaaattgtggaaagcctacacaaaccaggtaccatgtaccgcgttcgtggttaaagccgtcaagtaatctacttgtgctctttgaagagactgggggaaacccatttaagatatcggttaagacagttactgctgggattctgtgcggtcaagtctcggaatcgcattatccacctctgcggaaatggtccacaccagattacataaacggaacaatgtcgataaacagtgtggcaccagaagtgcatctgcattgtgaagatggacatgtcatatcctccatagaatttgctagctatgggactccaagaggtagctgcgacgggttttctatcgggaaatgtcatgcatccaactcattatcaatcgtctctgaggcttgtaaaggacgcaacagctgcttcatcgaggtatcaaatactgcttttatcagtgacccatgtagcggaactttaaagactttagcggttatgtcacgatgttccccgtctcaaaacatgagtgacctcagtttttagacaccaggaagcggctcagaacgatgaacagctgtttctctaagaaacaagagaccattgatattgattaaagaagtgtatgtcccatcacaagctttctttgacctttatatttcaaagtctgaactctgaacaattgtgtttgctcttgttcattggtgtatccaaactctacctggaaccaattaacagactcaaaaccatctctaaggtttcttaccgtatgtaatgatttagatctcagtggttttaaatgcaaataatatttatgtttatccttgc

SEQ ID NO: 84929 - protein, 585 aa, Arabidopsis thaliana
  peptide (1)..(585): Ceres Seq. ID no. 12677928
  misc_feature (497)..(574): Pfam Name: Galactose binding lectin domain Pfam Description: Galactose binding lectin domain
  misc_feature (1)..(149): Homolog of NCBI NO: 25326167 NR Description: probable beta-galactosidase [imported] -
  misc_feature (165)..(575): Homolog of NCBI NO: 25326167 NR Description: probable beta-galactosidase [imported] -
  misc_feature (145)..(574): Homolog of NCBI NO: 14970841 NR Description: beta-galactosidase [Fragaria x ananassa]
  misc_feature (1)..(137): Homolog of NCBI NO: 14970841 NR Description: beta-galactosidase [Fragaria x ananassa]
  misc_feature (86)..(575): Homolog of NCBI NO: 15231354 NR Description: glycosyl hydrolase family 35 protein id: At3g13750.1, supported by cDNA: gi_20260595
  misc_feature (1)..(169): Homolog of NCBI NO: 15231354 NR Description: glycosyl hydrolase family 35 protein id: At3g13750.1, supported by cDNA: gi_20260595
  misc_feature (86)..(575): Homolog of NCBI NO: 20260596 NR Description: galactosidase, putative [Arabidopsis thaliana]
  misc_feature (1)..(169): Homolog of NCBI NO: 20260596 NR Description: galactosidase, putative [Arabidopsis thaliana]
  misc_feature (86)..(575): Homolog of NCBI NO: 14970839 NR Description: beta-galactosidase [Fragaria x ananassa]
  misc_feature (1)..(136): Homolog of NCBI NO: 14970839 NR Description: beta-galactosidase [Fragaria x ananassa]
MYFGGTNFGRTSGGPFYITSYDYDAPLDEYGLRSEPKWGHLKDLHAAIKLCEPALVAADAPQYRKLGSKQEAHIYHGDGETGGKVCAAFLANIDEHKSAHVKFNGQSYTLPPWSVSILPDCRHVAFNTAKVGAQTSVKTVESARPSLGSMSILQKVVRQDNVSYISKSWMALKEPIGIWGENNFTFQGLLEHLNVTKDRSDYLWHKTRISVSEDDISFWKKNGPNSTVSIDSMRDVLRVFVNKQLAGSIVGHWVKAVQPVRFIQGNNDLLLLTQTVGLQNYGAFLEKDGAGFRGKAKLTGFKNGDLDLSKSSWTYQVGLKGEADKIYTVEHNEKAEWSTLETDASPSIFMWYKTYFDPPAGTDPVVLNLESMGRGQAWVNGQHIGRYWNIISQKDGCDRTCDYRGAYNSDKCTTNCGKPTQTRYHVPRSWLKPSSNLLVLFEETGGNPFKISVKTVTAGILCGQVSESHYPPLRKWSTPDYINGTMSINSVAPEVHLHCEDGHVISSIEFASYGTPRGSCDGFSIGKCHASNSLSIVSEACKGRNSCFIEVSNTAFISDPCSGTLKTLAVMSRCSPSQNMSDLSF

SEQ ID NO: 84930 - protein, 436 aa, Arabidopsis thaliana
  peptide (1)..(436): Ceres Seq. ID no. 12677929
  misc_feature (348)..(425): Pfam Name: Galactose binding lectin domain Pfam Description: Galactose binding lectin domain
  misc_feature (16)..(426): Homolog of NCBI NO: 25326167 NR Description: probable beta-galactosidase [imported] -
  misc_feature (1)..(425): Homolog of NCBI NO: 14970841 NR Description: beta-galactosidase [Fragaria x ananassa]
  misc_feature (1)..(426): Homolog of NCBI NO: 15231354 NR Description: glycosyl hydrolase family 35 protein id: At3g13750.1, supported by cDNA: gi_20260595
  misc_feature (1)..(20): Homolog of NCBI NO: 15231354 NR Description: glycosyl hydrolase family 35 protein id: At3g13750.1, supported by cDNA: gi_20260595
  misc_feature (1)..(426): Homolog of NCBI NO: 20260596 NR Description: galactosidase, putative [Arabidopsis thaliana]
  misc_feature (1)..(20): Homolog of NCBI NO: 20260596 NR Description: galactosidase, putative [Arabidopsis thaliana]
  misc_feature (1)..(426): Homolog of NCBI NO: 14970839 NR Description: beta-galactosidase [Fragaria x ananassa]
  misc_feature (1)..(426): Homolog of NCBI NO: 20514290 NR Description: beta-galactosidase [Oryza sativa (japonica
  misc_feature (20)..(432): Homolog of NCBI NO: 30690633 NR Description: glycosyl hydrolase family 35 (beta-galactosidase)
  misc_feature (1)..(309): Homolog of NCBI NO: 30687121 NR Description: glycosyl hydrolase family 35 (beta-galactosidase)
MSILQKVVRQDNVSYISKSWMALKEPIGIWGENNFTFQGLLEHLNVTKDRSDYLWHKTRISVSEDDISFWKKNGPNSTVSIDSMRDVLRVFVNKQLAGSIVGHWVKAVQPVRFIQGNNDLLLLTQTVGLQNYGAFLEKDGAGFRGKAKLTGFKNGDLDLSKSSWTYQVGLKGEADKIYTVEHNEKAEWSTLETDASPSIFMWYKTYFDPPAGTDPVVLNLESMGRGQAWVNGQHIGRYWNIISQKDGCDRTCDYRGAYNSDKCTTNCGKPTQTRYHVPRSWLKPSSNLLVLFEETGGNPFKISVKTVTAGILCGQVSESHYPPLRKWSTPDYINGTMSINSVAPEVHLHCEDGHVISSIEFASYGTPRGSCDGFSIGKCHASNSLSIVSEACKGRNSCFIEVSNTAFISDPCSGTLKTLAVMSRCSPSQNMSDLSF

SEQ ID NO: 84931 - protein, 416 aa, Arabidopsis thaliana
  peptide (1)..(416): Ceres Seq. ID no. 12677930
  misc_feature (328)..(405): Pfam Name: Galactose binding lectin domain Pfam Description: Galactose binding lectin domain
  misc_feature (1)..(406): Homolog of NCBI NO: 25326167 NR Description: probable beta-galactosidase [imported] -
  misc_feature (1)..(405): Homolog of NCBI NO: 14970841 NR Description: beta-galactosidase [Fragaria x ananassa]
  misc_feature (1)..(406): Homolog of NCBI NO: 15231354 NR Description: glycosyl hydrolase family 35 protein id: At3g13750.1, supported by cDNA: gi_20260595
  misc_feature (1)..(406): Homolog of NCBI NO: 20260596 NR Description: galactosidase, putative [Arabidopsis thaliana]
  misc_feature (1)..(406): Homolog of NCBI NO: 14970839 NR Description: beta-galactosidase [Fragaria x ananassa]
  misc_feature (1)..(406): Homolog of NCBI NO: 20514290 NR Description: beta-galactosidase [Oryza sativa (japonica
  misc_feature (1)..(412): Homolog of NCBI NO: 30690633 NR Description: glycosyl hydrolase family 35 (beta-galactosidase)
  misc_feature (1)..(289): Homolog of NCBI NO: 30687121 NR Description: glycosyl hydrolase family 35 (beta-galactosidase)
  misc_feature (1)..(298): Homolog of NCBI NO: 30687930 NR Description: glycosyl hydrolase family 35 (beta-galactosidase)
  misc_feature (310)..(405): Homolog of NCBI NO: 30687930 NR Description: glycosyl hydrolase family 35 (beta-galactosidase)
MALKEPIGIWGENNFTFQGLLEHLNVTKDRSDYLWHKTRISVSEDDISFWKKNGPNSTVSIDSMRDVLRVFVNKQLAGSIVGHWVKAVQPVRFIQGNNDLLLLTQTVGLQNYGAFLEKDGAGFRGKAKLTGFKNGDLDLSKSSWTYQVGLKGEADKIYTVEHNEKAEWSTLETDASPSIFMWYKTYFDPPAGTDPVVLNLESMGRGQAWVNGQHIGRYWNIISQKDGCDRTCDYRGAYNSDKCTTNCGKPTQTRYHVPRSWLKPSSNLLVLFEETGGNPFKISVKTVTAGILCGQVSESHYPPLRKWSTPDYINGTMSINSVAPEVHLHCEDGHVISSIEFASYGTPRGSCDGFSIGKCHASNSLSIVSEACKGRNSCFIEVSNTAFISDPCSGTLKTLAVMSRCSPSQNMSDLSF

SEQ ID NO: 84932 - DNA, 671 bp, Arabidopsis thaliana
  misc_feature (1)..(671): Ceres Seq. ID no. 12677931
  misc_feature: MA Experiment ID: 108434 Result: Up-regulated in Transcription
  misc_feature: MA Experiment 108434 PARAMETER Experiment Name: At_Root_Tips_cDNA_P Parameter: Tissue Value: Root Tips
  misc_feature: MA Experiment ID: 108569 Result: Up-regulated in Transcription
  misc_feature: MA Experiment 108569 PARAMETER Experiment Name: At_0.001%_MeJA__cDNA_P Parameter: Timepoint (hr) Value: 6
  misc_feature: MA Experiment 108569 PARAMETER Experiment Name: At_0.001%_MeJA__cDNA_P Parameter: Tissue Value: Aerial
  misc_feature: MA Experiment 108569 PARAMETER Experiment Name: At_0.001%_MeJA__cDNA_P Parameter: Treatment Value: 0.001% MeJA vs. No Treatment
  misc_feature: MA Experiment ID: 108573 Result: Up-regulated in Transcription
  misc_feature: MA Experiment 108573 PARAMETER Experiment Name: At_Drought_cDNA_P Parameter: Timepoint (hr) Value: 6
  misc_feature: MA Experiment 108573 PARAMETER Experiment Name: At_Drought_cDNA_P Parameter: Tissue Value: Aerial
  misc_feature: MA Experiment 108573 PARAMETER Experiment Name: At_Drought_cDNA_P Parameter: Treatment Value: Drought vs. No Drought
  misc_feature: MA Experiment ID: 20000185 Result: Up-regulated in Transcription
  misc_feature: MA Experiment 20000185 PARAMETER Experiment Name: At_Roots__P Parameter: Age (day) Value: 7 vs. 21
  misc_feature: MA Experiment 20000185 PARAMETER Experiment Name: At_Roots__P Parameter: Organism Value: A. thaliana
  misc_feature: MA Experiment 20000185 PARAMETER Experiment Name: At_Roots__P Parameter: Tissue Value: Roots vs. Whole Plant
  misc_feature: MA Experiment ID: 20001451 Result: Down-regulated in Transcription
  misc_feature: MA Experiment 20001451 PARAMETER Experiment Name: At_Far-red-induction_P Parameter: Age (day) Value: 7
  misc_feature: MA Experiment 20001451 PARAMETER Experiment Name: At_Far-red-induction_P Parameter: Light Value: Far-red vs. White
  misc_feature: MA Experiment 20001451 PARAMETER Experiment Name: At_Far-red-induction_P Parameter: Organism Value: A. thaliana
  misc_feature: MA Experiment 20001451 PARAMETER Experiment Name: At_Far-red-induction_P Parameter: Plant Line Value: Columbia
  misc_feature: MA Experiment 20001451 PARAMETER Experiment Name: At_Far-red-induction_P Parameter: Timepoint (hr) Value: 24
  misc_feature: MA Experiment 20001451 PARAMETER Experiment Name: At_Far-red-induction_P Parameter: Tissue Value: Whole Plant
gtgtagactgagaaataaagaagcccttgattttgcccattgcagtcatctctctcgaatctctctctataatccgatctgagaaatttcgccggagctaggttttgttgtttaccgatcaatcctttaatcaatggcaatggctgttttccgtcgcgaagggaggcgtctcctcccttcaatcgccgctcgcccaatcgctgctatccgatctcctctctcttctgaccaggaggaaggacttcttggagttcgatctatctcaactcaagtggtgcgtaaccgcatgaagagtgttaagaacatccaaaagatcacaaaggcaatgaagatggttgctgcttccaagcttagagcagttcaaggccgagctgagaactcccgtggactttggcagccatttactgcacttctaggagataatcccagcattgatgtaaagaagatgtgttaaaattttactgaatcagtttcctttgctggcttcttgttgagacctaccaatgtttgctcaacgatttttaataaacatacctgtaatttccagcaggatttcgaataattgcattaacattttgttctgattcagactcgcttcctccagagtctgtagtgttgttttgtgcaaacaccatgtactccggtttatttgatatttttttacctgagcc

SEQ ID NO: 84933 - protein, 106 aa, Arabidopsis thaliana
  peptide (1)..(106): Ceres Seq. ID no. 12677932
  misc_feature (43)..(104): Pfam Name: ATP synthase Pfam Description: ATP synthase
  misc_feature (1)..(104): Homolog of NCBI NO: 15227257 NR Description: mitochondrial F1-ATPase, gamma subunit protein id: At2g33040.1, supported by cDNA: 26812., supported by
  misc_feature (1)..(104): Homolog of NCBI NO: 22530902 NR Description: mitochondrial F1-ATPase, gamma subunit
  misc_feature (3)..(104): Homolog of NCBI NO: 7436158 NR Description: probable H+-transporting two-sector ATPase (EC
  misc_feature (1)..(104): Homolog of NCBI NO: 543867 NR Description: ATP synthase gamma chain, mitochondrial precursor
  misc_feature (46)..(104): Homolog of NCBI NO: 37532654 NR Description: putative ATP SYNTHASE GAMMA CHAIN, MITOCHONDRIAL
MAMAVFRREGRRLLPSIAARPIAAIRSPLSSDQEEGLLGVRSISTQVVRNRMKSVKNIQKITKAMKMVAASKLRAVQGRAENSRGLWQPFTALLGDNPSIDVKKMC

SEQ ID NO: 84934 - protein, 104 aa, Arabidopsis thaliana
  peptide (1)..(104): Ceres Seq. ID no. 12677933
  misc_feature (41)..(102): Pfam Name: ATP synthase Pfam Description: ATP synthase
  misc_feature (1)..(102): Homolog of NCBI NO: 15227257 NR Description: mitochondrial F1-ATPase, gamma subunit protein id: At2g33040.1, supported by cDNA: 26812., supported by
  misc_feature (1)..(102): Homolog of NCBI NO: 22530902 NR Description: mitochondrial F1-ATPase, gamma subunit
  misc_feature (1)..(102): Homolog of NCBI NO: 7436158 NR Description: probable H+-transporting two-sector ATPase (EC
  misc_feature (1)..(102): Homolog of NCBI NO: 543867 NR Description: ATP synthase gamma chain, mitochondrial precursor
  misc_feature (44)..(102): Homolog of NCBI NO: 37532654 NR Description: putative ATP SYNTHASE GAMMA CHAIN, MITOCHONDRIAL
MAVFRREGRRLLPSIAARPIAAIRSPLSSDQEEGLLGVRSISTQVVRNRMKSVKNIQKITKAMKMVAASKLRAVQGRAENSRGLWQPFTALLGDNPSIDVKKMC

SEQ ID NO: 84935 - protein, 55 aa, Arabidopsis thaliana
  peptide (1)..(55): Ceres Seq. ID no. 12677934
  misc_feature (1)..(53): Pfam Name: ATP synthase Pfam Description: ATP synthase
  misc_feature (1)..(53): Homolog of NCBI NO: 15227257 NR Description: mitochondrial F1-ATPase, gamma subunit protein id: At2g33040.1, supported by cDNA: 26812., supported by
  misc_feature (1)..(53): Homolog of NCBI NO: 22530902 NR Description: mitochondrial F1-ATPase, gamma subunit
  misc_feature (1)..(53): Homolog of NCBI NO: 7436158 NR Description: probable H+-transporting two-sector ATPase (EC
  misc_feature (1)..(53): Homolog of NCBI NO: 543867 NR Description: ATP synthase gamma chain, mitochondrial precursor
  misc_feature (1)..(53): Homolog of NCBI NO: 37532654 NR Description: putative ATP SYNTHASE GAMMA CHAIN, MITOCHONDRIAL
MKSVKNIQKITKAMKMVAASKLRAVQGRAENSRGLWQPFTALLGDNPSIDVKKMC

SEQ ID NO: 84936 - DNA, 1702 bp, Arabidopsis thaliana
  misc_feature (1)..(1702): Ceres Seq. ID no. 12677941
  misc_feature: MA Experiment ID: 108434 Result: Down-regulated in Transcription
  misc_feature: MA Experiment 108434 PARAMETER Experiment Name: At_Root_Tips_cDNA_P Parameter: Tissue Value: Root Tips
  misc_feature: MA Experiment ID: 108585 Result: Up-regulated in Transcription
  misc_feature: MA Experiment 108585 PARAMETER Experiment Name: At_5mM_NaNP_cDNA_P Parameter: Timepoint (hr) Value: 6
  misc_feature: MA Experiment 108585 PARAMETER Experiment Name: At_5mM_NaNP_cDNA_P Parameter: Tissue Value: Aerial
  misc_feature: MA Experiment 108585 PARAMETER Experiment Name: At_5mM_NaNP_cDNA_P Parameter: Treatment Value: null
  misc_feature: MA Experiment ID: 108668 Result: Up-regulated in Transcription
  misc_feature: MA Experiment 108668 PARAMETER Experiment Name: At_2mM_SA_cDNA_P Parameter: Plant Line Value: WS
  misc_feature: MA Experiment 108668 PARAMETER Experiment Name: At_2mM_SA_cDNA_P Parameter: Timepoint (hr) Value: 6
  misc_feature: MA Experiment 108668 PARAMETER Experiment Name: At_2mM_SA_cDNA_P Parameter: Treatment Value: 2mM SA vs. No Treatment
  misc_feature: MA Experiment ID: 20000182 Result: Up-regulated in Transcription
  misc_feature: MA Experiment 20000182 PARAMETER Experiment Name: At_2mM_SA_P Parameter: Age (day) Value: 14
  misc_feature: MA Experiment 20000182 PARAMETER Experiment Name: At_2mM_SA_P Parameter: Organism Value: A. thaliana
  misc_feature: MA Experiment 20000182 PARAMETER Experiment Name: At_2mM_SA_P Parameter: Plant Line Value: WS
  misc_feature: MA Experiment 20000182 PARAMETER Experiment Name: At_2mM_SA_P Parameter: Timepoint (hr) Value: 6
  misc_feature: MA Experiment 20000182 PARAMETER Experiment Name: At_2mM_SA_P Parameter: Tissue Value: Aerial
  misc_feature: MA Experiment 20000182 PARAMETER Experiment Name: At_2mM_SA_P Parameter: Treatment Value: 2mM SA vs. No Treatment
  misc_feature: MA Experiment ID: 20000224 Result: Down-regulated in Transcription
  misc_feature: MA Experiment ID: 20000286 Result: Down-regulated in Transcription
  misc_feature: MA Experiment 20000286 PARAMETER Experiment Name: At_Open_Flower_P Parameter: Age (day) Value: 21
  misc_feature: MA Experiment 20000286 PARAMETER Experiment Name: At_Open_Flower_P Parameter: Plant Line Value: WS
  misc_feature: MA Experiment 20000286 PARAMETER Experiment Name: At_Open_Flower_P Parameter: Tissue Value: Half Open vs. Whole Plant
  misc_feature: MA Experiment ID: 20001905 Result: Up-regulated in Transcription
  misc_feature: MA Experiment 20001905 PARAMETER Experiment Name: At_Drought_Reproduction_P Parameter: Age (day) Value: 40
  misc_feature: MA Experiment 20001905 PARAMETER Experiment Name: At_Drought_Reproduction_P Parameter: Organism Value: A. thaliana
  misc_feature: MA Experiment 20001905 PARAMETER Experiment Name: At_Drought_Reproduction_P Parameter: Plant Line Value: WS
  misc_feature: MA Experiment 20001905 PARAMETER Experiment Name: At_Drought_Reproduction_P Parameter: Timepoint (day) Value: 10
  misc_feature: MA Experiment 20001905 PARAMETER Experiment Name: At_Drought_Reproduction_P Parameter: Tissue Value: Rosettes
  misc_feature: MA Experiment 20001905 PARAMETER Experiment Name: At_Drought_Reproduction_P Parameter: Treatment Value: Drought vs. No Drought
  misc_feature: Pfam Name: Synaptobrevin Pfam Description: Synaptobrevin
attcgcgtcgtttttgagtaaaaaaaatggcgcaacaatcgttgatctacagtttcgtcgctcgtggtaccgttatcctcgttgagttcacagatttcaaaggcaatttcacatcaatcgctgctcagtgccttcagaagcttccttcttctaacaacaagtttacctacaactgcgatggtcacacgttcaattacctcgtcgaaaatggattcagtgagtcaaaatattgctcgatctgtaagcgtagcttgtttgtgttttgatttatccattgtttgaattagattttttgcctaattgagaaatatgaatcgagttcttatgtttggtatagtttccagtaataattatgtattggcgttgataattaattgatgttagatctatggtaatcagtgatatttttggtggatctatcaatgaatatttgcaatttttgttctggatctattgattctttgcttatttgcgtgtagctttcgatatcatgaagtttttggcattagtgtattgtgttctttatgtaactctgttttactaaacctaattgggttttgggtgatgttgatggcggatatggtctctttatgatagtgttaactttcttatcagcgatatattgatgaatctattgctttatctcttaatatagagtttaaaatggaccggttttgttttcgtttgtgcagcctattgtgttgttgcagttgattctgctgggaggcagattcctatggctttcttggaacgagttaaggaggatttcaacaagagatatggtggtggaaaggctgcaactgctcaagcaaacagcttgaataaagaatttgggtcgaaactgaaagagcatatgcagtattgcatggatcatcctgatgagattagcaagcttgctaaggttaaagctcaagtgtctgaagttaaaggtgttatgatggaaaacattgagaaggtttgattctgacccttttttctttttatcgatatagttttatgttgtaaaccttttcgaacagagttcagcttgtatgactttagtaccaggatcttatgattcgtaaagcataaactgtagagaggaatgttttattctcggttgtgaagacatattctgttgttaactcgtttatgcattcgtttgcaggttcttgaccgtggtgagaagattgagcttttggttgacaaaacagaaaaccttcgctcacaggtttgttttctaaatggttcaaagtcaatagacccacacagagacatgcaagagtttgcagctttctcttactgattgttgtttcttgggtttctaactttaaatttgaactcgactttatcacaggcgcaagattttagaacacaaggaactcaaatgagaagaaagatgtggtttcagaacatgaagataaagctcattgtccttgcaattatcattgccttgattctcatcatcatcctctcaatttgtgggggattcaactgcggtaaataagtctggaacatttcttcccggcgttatcgactgcgctctgtgcttcccaagatctctgagaatatcttcattcagttcgttgtgctacctttttgttttgtttttgtttttgtgatttctatattctcatactatatgtttcttcttagattgtacttcttgaaatttgttttgtataggctatatatattatacatatatgtatgcatgttcgac

SEQ ID NO: 84937 - protein, 79 aa, Arabidopsis thaliana; identical to SEQ ID NO: 25204
  peptide (1)..(79): Ceres Seq. ID no. 12677942
  misc_feature: Pfam Name: Synaptobrevin Pfam Description: Synaptobrevin
  misc_feature (1)..(71): Homolog of NCBI NO: 15225796 NR Description: putative synaptobrevin; protein id: At2g33120.1, by cDNA: 2443., supported by cDNA: gi_16930420, supported by
  misc_feature (1)..(71): Homolog of NCBI NO: 600710 NR Description: formerly called HAT24; synaptobrevin-related
  misc_feature (1)..(71): Homolog of NCBI NO: 15220943 NR Description: synaptobrevin 7B, putative; protein id:
  misc_feature (1)..(71): Homolog of NCBI NO: 27805765 NR Description: Putative vesicle-associated membrane protein 726
  misc_feature (1)..(71): Homolog of NCBI NO: 15220315 NR Description: synaptobrevin 7B, putative; protein id:
  misc_feature (1)..(76): Homolog of NCBI NO: 29150380 NR Description: synaptobrevin-like protein [Oryza sativa
  misc_feature (1)..(76): Homolog of NCBI NO: 30685375 NR Description: synaptobrevin -related [Arabidopsis thaliana] putative synaptobrevin [Arabidopsis thaliana]
  misc_feature (1)..(76): Homolog of NCBI NO: 27805753 NR Description: Vesicle-associated membrane protein 725
  misc_feature (1)..(71): Homolog of NCBI NO: 25408245 NR Description: probable synaptobrevin [imported] - Arabidopsis >gi|2924793|gb|AAC04922.1| putative synaptobrevin [Arabidopsis
  misc_feature (1)..(71): Homolog of NCBI NO: 30685571 NR Description: synaptobrevin -related [Arabidopsis thaliana]

SEQ ID NO: 84938 - protein, 74 aa, Arabidopsis thaliana
  peptide (1)..(74): Ceres Seq. ID no. 12677943
  misc_feature: Pfam Name: Synaptobrevin Pfam Description: Synaptobrevin
  misc_feature (1)..(74): Homolog of NCBI NO: 15225796 NR Description: putative synaptobrevin; protein id: At2g33120.1, by cDNA: 2443., supported by cDNA: gi_16930420, supported by
  misc_feature (1)..(74): Homolog of NCBI NO: 600710 NR Description: formerly called HAT24; synaptobrevin-related
  misc_feature (1)..(74): Homolog of NCBI NO: 15220943 NR Description: synaptobrevin 7B, putative; protein id:
  misc_feature (1)..(74): Homolog of NCBI NO: 27805765 NR Description: Putative vesicle-associated membrane protein 726
  misc_feature (1)..(74): Homolog of NCBI NO: 15220315 NR Description: synaptobrevin 7B, putative; protein id:
  misc_feature (1)..(74): Homolog of NCBI NO: 29150380 NR Description: synaptobrevin-like protein [Oryza sativa
  misc_feature (1)..(74): Homolog of NCBI NO: 30685375 NR Description: synaptobrevin -related [Arabidopsis thaliana] putative synaptobrevin [Arabidopsis thaliana]
  misc_feature (1)..(74): Homolog of NCBI NO: 27805753 NR Description: Vesicle-associated membrane protein 725
  misc_feature (1)..(74): Homolog of NCBI NO: 25408245 NR Description: probable synaptobrevin [imported] - Arabidopsis >gi|2924793|gb|AAC04922.1| putative synaptobrevin [Arabidopsis
  misc_feature (1)..(74): Homolog of NCBI NO: 30685571 NR Description: synaptobrevin -related [Arabidopsis thaliana]
MAFLERVKEDFNKRYGGGKAATAQANSLNKEFGSKLKEHMQYCMDHPDEISKLAKVKAQVSEVKGVMMENIEKV

SEQ ID NO: 84939 - protein, 39 aa, Arabidopsis thaliana
  peptide (1)..(39): Ceres Seq. ID no. 12677944
  misc_feature: Pfam Name: Synaptobrevin Pfam Description: Synaptobrevin
  misc_feature (1)..(39): Homolog of NCBI NO: 15225796 NR Description: putative synaptobrevin; protein id: At2g33120.1, by cDNA: 2443., supported by cDNA: gi_16930420, supported by
  misc_feature (1)..(39): Homolog of NCBI NO: 600710 NR Description: formerly called HAT24; synaptobrevin-related
  misc_feature (1)..(37): Homolog of NCBI NO: 15220943 NR Description: synaptobrevin 7B, putative; protein id:
  misc_feature (1)..(37): Homolog of NCBI NO: 27805765 NR Description: Putative vesicle-associated membrane protein 726
  misc_feature (1)..(37): Homolog of NCBI NO: 15220315 NR Description: synaptobrevin 7B, putative; protein id:
  misc_feature (1)..(37): Homolog of NCBI NO: 29150380 NR Description: synaptobrevin-like protein [Oryza sativa
  misc_feature (1)..(37): Homolog of NCBI NO: 30685375 NR Description: synaptobrevin -related [Arabidopsis thaliana] putative synaptobrevin [Arabidopsis thaliana]
  misc_feature (1)..(37): Homolog of NCBI NO: 27805753 NR Description: Vesicle-associated membrane protein 725
  misc_feature (1)..(39): Homolog of NCBI NO: 30685571 NR Description: synaptobrevin -related [Arabidopsis thaliana]
  misc_feature (1)..(39): Homolog of NCBI NO: 34900770 NR Description: putative synaptobrevin [Oryza sativa (japonica
MRRKMWFQNMKIKLIVLAIIIALILIIILSICGGFNCGK

SEQ ID NO: 84940 - DNA, 1138 bp, Arabidopsis thaliana
  misc_feature (1)..(1138): Ceres Seq. ID no. 12677993
  misc_feature: MA Experiment ID: 108434 Result: Down-regulated in Transcription
  misc_feature: MA Experiment 108434 PARAMETER Experiment Name: At_Root_Tips_cDNA_P Parameter: Tissue Value: Root Tips
  misc_feature: MA Experiment ID: 108577 Result: Down-regulated in Transcription
  misc_feature: MA Experiment 108577 PARAMETER Experiment Name: At_42deg_Heat_cDNA_P Parameter: Temperature (deg C) Value: 42 vs. 22
  misc_feature: MA Experiment 108577 PARAMETER Experiment Name: At_42deg_Heat_cDNA_P Parameter: Timepoint (hr) Value: 6
  misc_feature: MA Experiment 108577 PARAMETER Experiment Name: At_42deg_Heat_cDNA_P Parameter: Tissue Value: Aerial
  misc_feature: MA Experiment ID: 108668 Result: Up-regulated in Transcription
  misc_feature: MA Experiment 108668 PARAMETER Experiment Name: At_2mM_SA_cDNA_P Parameter: Plant Line Value: WS
  misc_feature: MA Experiment 108668 PARAMETER Experiment Name: At_2mM_SA_cDNA_P Parameter: Timepoint (hr) Value: 6
  misc_feature: MA Experiment 108668 PARAMETER Experiment Name: At_2mM_SA_cDNA_P Parameter: Treatment Value: 2mM SA vs. No Treatment
  misc_feature: MA Experiment ID: 20000087 Result: Up-regulated in Transcription
  misc_feature: MA Experiment 20000087 PARAMETER Experiment Name: At_100uM_ABA_Mutants_cDNA_P Parameter: Plant Line Value: WS
  misc_feature: MA Experiment 20000087 PARAMETER Experiment Name: At_100uM_ABA_Mutants_cDNA_P Parameter: Timepoint (hr) Value: 6
  misc_feature: MA Experiment 20000087 PARAMETER Experiment Name: At_100uM_ABA_Mutants_cDNA_P Parameter: Tissue Value: Aerial
  misc_feature: MA Experiment 20000087 PARAMETER Experiment Name: At_100uM_ABA_Mutants_cDNA_P Parameter: Treatment Value: 100uM ABA vs. No Treatment
  misc_feature: MA Experiment ID: 20000111 Result: Down-regulated in Transcription
  misc_feature: MA Experiment 20000111 PARAMETER Experiment Name: At_42deg_Heat_cDNA_P Parameter: Temperature (deg C) Value: 42 vs. 22
  misc_feature: MA Experiment 20000111 PARAMETER Experiment Name: At_42deg_Heat_cDNA_P Parameter: Timepoint (hr) Value: 6
  misc_feature: MA Experiment 20000111 PARAMETER Experiment Name: At_42deg_Heat_cDNA_P Parameter: Tissue Value: Aerial
  misc_feature: MA Experiment ID: 20000113 Result: Down-regulated in Transcription
  misc_feature: MA Experiment 20000113 PARAMETER Experiment Name: At_42deg_Heat_cDNA_P Parameter: Temperature (deg C) Value: 42 vs. 22
  misc_feature: MA Experiment 20000113 PARAMETER Experiment Name: At_42deg_Heat_cDNA_P Parameter: Timepoint (hr) Value: 8
  misc_feature: MA Experiment 20000113 PARAMETER Experiment Name: At_42deg_Heat_cDNA_P Parameter: Tissue Value: Aerial
  misc_feature: MA Experiment ID: 20000173 Result: Down-regulated in Transcription
  misc_feature: MA Experiment 20000173 PARAMETER Experiment Name: At_42deg_Heat_P Parameter: Age (day) Value: 14
  misc_feature: MA Experiment 20000173 PARAMETER Experiment Name: At_42deg_Heat_P Parameter: Organism Value: A. thaliana
  misc_feature: MA Experiment 20000173 PARAMETER Experiment Name: At_42deg_Heat_P Parameter: Plant Line Value: WS
  misc_feature: MA Experiment 20000173 PARAMETER Experiment Name: At_42deg_Heat_P Parameter: Temperature (deg C) Value: 42 vs. 22
  misc_feature: MA Experiment 20000173 PARAMETER Experiment Name: At_42deg_Heat_P Parameter: Timepoint (hr) Value: 6
  misc_feature: MA Experiment 20000173 PARAMETER Experiment Name: At_42deg_Heat_P Parameter: Tissue Value: Aerial
  misc_feature: MA Experiment ID: 20000184 Result: Down-regulated in Transcription
  misc_feature: MA Experiment 20000184 PARAMETER Experiment Name: At_Shoots__P Parameter: Age (day) Value: 7
  misc_feature: MA Experiment 20000184 PARAMETER Experiment Name: At_Shoots__P Parameter: Tissue Value: Shoots vs. Whole Plant
  misc_feature: MA Experiment ID: 20000438 Result: Down-regulated in Transcription
  misc_feature: MA Experiment 20000438 PARAMETER Experiment Name: At_Shoots__P Parameter: Age (day) Value: 14
  misc_feature: MA Experiment 20000438 PARAMETER Experiment Name: At_Shoots__P Parameter: Tissue Value: Shoots vs. Whole Plant
  misc_feature: MA Experiment ID: 20000495 Result: Down-regulated in Transcription
  misc_feature: MA Experiment 20000495 PARAMETER Experiment Name: At_Guard_Cells_P Parameter: Harvest Date Value: 8/2/2002
  misc_feature: MA Experiment 20000495 PARAMETER Experiment Name: At_Guard_Cells_P Parameter: Organism Value: A. thaliana
  misc_feature: MA Experiment 20000495 PARAMETER Experiment Name: At_Guard_Cells_P Parameter: Tissue Value: Guard Cells vs. Leaves
tttcttgagagatccaaaaaaagaatcagaaagaagaagaagaagactccaaaaacgatgccgtattacaccaacgacgacaatgacgtcgacgatttcaccgaatacgatccgatgccttatagtggaggctacgacatcaccgtgacatacggccgttcaattccaccgtccgacgagacttgttaccctctctcctctctctccggcgacgcctttgagtatcagcgacctaatttctcttctaaccacgattcttctgcttatgacgaccaagctcttaaaaccgagtacagtagctatgcacgacccggacccgttggatctggatctgattttggccggaaacctaattctggatatggagggagaacggaggttgagtatggccggaaaactgaatcggagcatggatctggctatggtggaagaattgagagcgattacgtgaagcctagctatggcggtcacgaggatgatggtgacgatggtcacaaaaaacatagtggtaaggattatgatgatggagatgagaagagtaagaagaaggagaaggagaagaagaaggataagaagaaagatggtaataactctgaagatgatgagtttaagaagaagaagaagaaagagcagtacaaggagcatcatgatgatgatgattatgatgagaagaagaagaagaagaaagactataatgatgatgatgagaagaagaagaagaagcattataatgatgatgatgatgagaagaagaagaagcataattacaatgatgatgatgatgagaagaagaagaagaaggagtatcatgatgatgaggataagaagaagaagaagcactatgataatgatgatgatgagaagaagaagaagaaggatcatcgtgatgatgatgatgagaagaagaagaagaaggataagcaccacaagggacatgactaaaaaagctttatgatttgggatttgcattcttatgactaaataagtaacaataacaacctaagcacactgctctctacgtttatgtcaattgttgttttgtttttgctttgtgtttttgcttcgtgtttttgctaactttagtgagatcttcataagtcatatatgttaagtgtgtcttctagtgatgtcctttggt

SEQ ID NO: 84941 - protein, 313 aa, Arabidopsis thaliana
  peptide (1)..(313): Ceres Seq. ID no. 12677994
  misc_feature (174)..(308): Pfam Name: Chromadorea ALT protein Pfam Description: Chromadorea ALT protein
  misc_feature (20)..(313): Homolog of NCBI NO: 15228587 NR Description: hypothetical protein; protein id: At3g29075.1
  misc_feature (20)..(261): Homolog of NCBI NO: 21928162 NR Description: AT3g29075/MXE2_1 [Arabidopsis thaliana]
  misc_feature (20)..(287): Homolog of NCBI NO: 9758332 NR Description: gene_id:MIJ24.6~ref|NP_013897.1~similar to protein [Arabidopsis thaliana] >gi|16604364|gb|AAL24188.1| [Arabidopsis thaliana] >gi|23308191|gb|AAN18065.1|
  misc_feature (20)..(287): Homolog of NCBI NO: 24417262 NR Description: unknown [Arabidopsis thaliana]
  misc_feature (157)..(310): Homolog of NCBI NO: 17558378 NR Description: Putative protein, with 4 coiled coil-4 domains, specific [Caenorhabditis elegans] >gi|7496941|pir||T34137
  misc_feature (158)..(313): Homolog of NCBI NO: 17558378 NR Description: Putative protein, with 4 coiled coil-4 domains, specific [Caenorhabditis elegans] >gi|7496941|pir||T34137
  misc_feature (109)..(313): Homolog of NCBI NO: 39594465 NR Description: Hypothetical protein CBG19125 [Caenorhabditis
  misc_feature (158)..(307): Homolog of NCBI NO: 39594465 NR Description: Hypothetical protein CBG19125 [Caenorhabditis
  misc_feature (129)..(313): Homolog of NCBI NO: 17558378 NR Description: Putative protein, with 4 coiled coil-4 domains, specific [Caenorhabditis elegans] >gi|7496941|pir||T34137
  misc_feature (98)..(313): Homolog of NCBI NO: 17558378 NR Description: Putative protein, with 4 coiled coil-4 domains, specific [Caenorhabditis elegans] >gi|7496941|pir||T34137
FLERSKKRIRKKKKKTPKTMPYYTNDDNDVDDFTEYDPMPYSGGYDITVTYGRSIPPSDETCYPLSSLSGDAFEYQRPNFSSNHDSSAYDDQALKTEYSSYARPGPVGSGSDFGRKPNSGYGGRTEVEYGRKTESEHGSGYGGRIESDYVKPSYGGHEDDGDDGHKKHSGKDYDDGDEKSKKKEKEKKKDKKKDGNNSEDDEFKKKKKKEQYKEHHDDDDYDEKKKKKKDYNDDDEKKKKKHYNDDDDEKKKKHNYNDDDDEKKKKKEYHDDEDKKKKKHYDNDDDEKKKKKDHRDDDDEKKKKKDKHHKGHD

SEQ ID NO: 84942 - protein, 294 aa, Arabidopsis thaliana
  peptide (1)..(294): Ceres Seq. ID no. 12677995
  misc_feature (155)..(289): Pfam Name: Chromadorea ALT protein Pfam Description: Chromadorea ALT protein
  misc_feature (1)..(294): Homolog of NCBI NO: 15228587 NR Description: hypothetical protein; protein id: At3g29075.1
  misc_feature (1)..(242): Homolog of NCBI NO: 21928162 NR Description: AT3g29075/MXE2_1 [Arabidopsis thaliana]
  misc_feature (1)..(268): Homolog of NCBI NO: 9758332 NR Description: gene_id:MIJ24.6~ref|NP_013897.1~similar to protein [Arabidopsis thaliana] >gi|16604364|gb|AAL24188.1| [Arabidopsis thaliana] >gi|23308191|gb|AAN18065.1|
  misc_feature (1)..(268): Homolog of NCBI NO: 24417262 NR Description: unknown [Arabidopsis thaliana]
  misc_feature (138)..(291): Homolog of NCBI NO: 17558378 NR Description: Putative protein, with 4 coiled coil-4 domains, specific [Caenorhabditis elegans] >gi|7496941|pir||T34137
  misc_feature (139)..(294): Homolog of NCBI NO: 17558378 NR Description: Putative protein, with 4 coiled coil-4 domains, specific [Caenorhabditis elegans] >gi|7496941|pir||T34137
  misc_feature (90)..(294): Homolog of NCBI NO: 39594465 NR Description: Hypothetical protein CBG19125 [Caenorhabditis
  misc_feature (139)..(288): Homolog of NCBI NO: 39594465 NR Description: Hypothetical protein CBG19125 [Caenorhabditis
  misc_feature (110)..(294): Homolog of NCBI NO: 17558378 NR Description: Putative protein, with 4 coiled coil-4 domains, specific [Caenorhabditis elegans] >gi|7496941|pir||T34137
  misc_feature (79)..(294): Homolog of NCBI NO: 17558378 NR Description: Putative protein, with 4 coiled coil-4 domains, specific [Caenorhabditis elegans] >gi|7496941|pir||T34137
MPYYTNDDNDVDDFTEYDPMPYSGGYDITVTYGRSIPPSDETCYPLSSLSGDAFEYQRPNFSSNHDSSAYDDQALKTEYSSYARPGPVGSGSDFGRKPNSGYGGRTEVEYGRKTESEHGSGYGGRIESDYVKPSYGGHEDDGDDGHKKHSGKDYDDGDEKSKKKEKEKKKDKKKDGNNSEDDEFKKKKKKEQYKEHHDDDDYDEKKKKKKDYNDDDEKKKKKHYNDDDDEKKKKHNYNDDDDEKKKKKEYHDDEDKKKKKHYDNDDDEKKKKKDHRDDDDEKKKKKDKHHKGHD

SEQ ID NO: 84943 - protein, 275 aa, Arabidopsis thaliana
  peptide (1)..(275): Ceres Seq. ID no. 12677996
  misc_feature (136)..(270): Pfam Name: Chromadorea ALT protein Pfam Description: Chromadorea ALT protein
  misc_feature (1)..(275): Homolog of NCBI NO: 15228587 NR Description: hypothetical protein; protein id: At3g29075.1
  misc_feature (1)..(223): Homolog of NCBI NO: 21928162 NR Description: AT3g29075/MXE2_1 [Arabidopsis thaliana]
  misc_feature (1)..(249): Homolog of NCBI NO: 9758332 NR Description: gene_id:MIJ24.6~ref|NP_013897.1~similar to protein [Arabidopsis thaliana] >gi|16604364|gb|AAL24188.1| [Arabidopsis thaliana] >gi|23308191|gb|AAN18065.1|
  misc_feature (1)..(249): Homolog of NCBI NO: 24417262 NR Description: unknown [Arabidopsis thaliana]
  misc_feature (119)..(272): Homolog of NCBI NO: 17558378 NR Description: Putative protein, with 4 coiled coil-4 domains, specific [Caenorhabditis elegans] >gi|7496941|pir||T34137
  misc_feature (120)..(275): Homolog of NCBI NO: 17558378 NR Description: Putative protein, with 4 coiled coil-4 domains, specific [Caenorhabditis elegans] >gi|7496941|pir||T34137
  misc_feature (71)..(275): Homolog of NCBI NO: 39594465 NR Description: Hypothetical protein CBG19125 [Caenorhabditis
  misc_feature (120)..(269): Homolog of NCBI NO: 39594465 NR Description: Hypothetical protein CBG19125 [Caenorhabditis
  misc_feature (91)..(275): Homolog of NCBI NO: 17558378 NR Description: Putative protein, with 4 coiled coil-4 domains, specific [Caenorhabditis elegans] >gi|7496941|pir||T34137
  misc_feature (60)..(275): Homolog of NCBI NO: 17558378 NR Description: Putative protein, with 4 coiled coil-4 domains, specific [Caenorhabditis elegans] >gi|7496941|pir||T34137
MPYSGGYDITVTYGRSIPPSDETCYPLSSLSGDAFEYQRPNFSSNHDSSAYDDQALKTEYSSYARPGPVGSGSDFGRKPNSGYGGRTEVEYGRKTESEHGSGYGGRIESDYVKPSYGGHEDDGDDGHKKHSGKDYDDGDEKSKKKEKEKKKDKKKDGNNSEDDEFKKKKKKEQYKEHHDDDDYDEKKKKKKDYNDDDEKKKKKHYNDDDDEKKKKHNYNDDDDEKKKKKEYHDDEDKKKKKHYDNDDDEKKKKKDHRDDDDEKKKKKDKHHKGHD

SEQ ID NO: 84944 - DNA, 1793 bp, Arabidopsis thaliana
  misc_feature (1)..(1793): Ceres Seq. ID no. 12678017
  misc_feature: MA Experiment ID: 108461 Result: Up-regulated in Transcription
  misc_feature: MA Experiment 108461 PARAMETER Experiment Name: At_Germinating_Seeds_cDNA_P Parameter: Age (day) Value: 1 vs. 0
  misc_feature: MA Experiment 108461 PARAMETER Experiment Name: At_Germinating_Seeds_cDNA_P Parameter: Tissue Value: Germinating Seeds
  misc_feature: MA Experiment ID: 108462 Result: Up-regulated in Transcription
  misc_feature: MA Experiment 108462 PARAMETER Experiment Name: At_Germinating_Seeds_cDNA_P Parameter: Age (day) Value: 2 vs. 0
  misc_feature: MA Experiment 108462 PARAMETER Experiment Name: At_Germinating_Seeds_cDNA_P Parameter: Tissue Value: Germinating Seeds
  misc_feature: MA Experiment ID: 108501 Result: Up-regulated in Transcription
  misc_feature: MA Experiment 108501 PARAMETER Experiment Name: At_ap2_floral_buds_cDNA_P Parameter: Plant Line Value: ap2 (Ler.)
  misc_feature: MA Experiment 108501 PARAMETER Experiment Name: At_ap2_floral_buds_cDNA_P Parameter: Tissue Value: Closed Flower
  misc_feature: MA Experiment ID: 108569 Result: Up-regulated in Transcription
  misc_feature: MA Experiment 108569 PARAMETER Experiment Name: At_0.001%_MeJA__cDNA_P Parameter: Timepoint (hr) Value: 6
  misc_feature: MA Experiment 108569 PARAMETER Experiment Name: At_0.001%_MeJA__cDNA_P Parameter: Tissue Value: Aerial
  misc_feature: MA Experiment 108569 PARAMETER Experiment Name: At_0.001%_MeJA__cDNA_P Parameter: Treatment Value: 0.001% MeJA vs. No Treatment
  misc_feature: MA Experiment ID: 108573 Result: Up-regulated in Transcription
  misc_feature: MA Experiment 108573 PARAMETER Experiment Name: At_Drought_cDNA_P Parameter: Timepoint (hr) Value: 6
  misc_feature: MA Experiment 108573 PARAMETER Experiment Name: At_Drought_cDNA_P Parameter: Tissue Value: Aerial
  misc_feature: MA Experiment 108573 PARAMETER Experiment Name: At_Drought_cDNA_P Parameter: Treatment Value: Drought vs. No Drought
  misc_feature: MA Experiment ID: 108577 Result: Down-regulated in Transcription
  misc_feature: MA Experiment 108577 PARAMETER Experiment Name: At_42deg_Heat_cDNA_P Parameter: Temperature (deg C) Value: 42 vs. 22
  misc_feature: MA Experiment 108577 PARAMETER Experiment Name: At_42deg_Heat_cDNA_P Parameter: Timepoint (hr) Value: 6
  misc_feature: MA Experiment 108577 PARAMETER Experiment Name: At_42deg_Heat_cDNA_P Parameter: Tissue Value: Aerial
  misc_feature: MA Experiment ID: 108579 Result: Up-regulated in Transcription
  misc_feature: MA Experiment 108579 PARAMETER Experiment Name: At_4deg_Cold_cDNA_P Parameter: Temperature (deg C) Value: 4 vs. 22
  misc_feature: MA Experiment 108579 PARAMETER Experiment Name: At_4deg_Cold_cDNA_P Parameter: Timepoint (hr) Value: 6
  misc_feature: MA Experiment 108579 PARAMETER Experiment Name: At_4deg_Cold_cDNA_P Parameter: Tissue Value: Aerial
  misc_feature: MA Experiment ID: 20000113 Result: Down-regulated in Transcription
  misc_feature: MA Experiment 20000113 PARAMETER Experiment Name: At_42deg_Heat_cDNA_P Parameter: Temperature (deg C) Value: 42 vs. 22
  misc_feature: MA Experiment 20000113 PARAMETER Experiment Name: At_42deg_Heat_cDNA_P Parameter: Timepoint (hr) Value: 8
  misc_feature: MA Experiment 20000113 PARAMETER Experiment Name: At_42deg_Heat_cDNA_P Parameter: Tissue Value: Aerial
  misc_feature: MA Experiment ID: 20000173 Result: Down-regulated in Transcription
  misc_feature: MA Experiment 20000173 PARAMETER Experiment Name: At_42deg_Heat_P Parameter: Age (day) Value: 14
  misc_feature: MA Experiment 20000173 PARAMETER Experiment Name: At_42deg_Heat_P Parameter: Organism Value: A. thaliana
  misc_feature: MA Experiment 20000173 PARAMETER Experiment Name: At_42deg_Heat_P Parameter: Plant Line Value: WS
  misc_feature: MA Experiment 20000173 PARAMETER Experiment Name: At_42deg_Heat_P Parameter: Temperature (deg C) Value: 42 vs. 22
  misc_feature: MA Experiment 20000173 PARAMETER Experiment Name: At_42deg_Heat_P Parameter: Timepoint (hr) Value: 6
  misc_feature: MA Experiment 20000173 PARAMETER Experiment Name: At_42deg_Heat_P Parameter: Tissue Value: Aerial
  misc_feature: MA Experiment ID: 20000179 Result: Up-regulated in Transcription
  misc_feature: MA Experiment 20000179 PARAMETER Experiment Name: At_Germinating_Seeds_P Parameter: Age (hr) Value: 6 vs. 0
  misc_feature: MA Experiment 20000179 PARAMETER Experiment Name: At_Germinating_Seeds_P Parameter: Tissue Value: Germinating Seeds
  misc_feature: MA Experiment ID: 20000180 Result: Up-regulated in Transcription
  misc_feature: MA Experiment 20000180 PARAMETER Experiment Name: At_Germinating_Seeds_P Parameter: Age (hr) Value: 24 vs. 0
  misc_feature: MA Experiment 20000180 PARAMETER Experiment Name: At_Germinating_Seeds_P Parameter: Tissue Value: Germinating Seeds
  misc_feature: MA Experiment ID: 20000213 Result: Up-regulated in Transcription
  misc_feature: MA Experiment 20000213 PARAMETER Experiment Name: At_4deg_Cold_P Parameter: Timepoint (hr) Value: 2
  misc_feature: MA Experiment ID: 20000224 Result: Down-regulated in Transcription
  misc_feature: MA Experiment ID: 20000227 Result: Up-regulated in Transcription
  misc_feature: MA Experiment 20000227 PARAMETER Experiment Name: At_Root-Tips-vs-Tops_P Parameter: Tissue Value: Root Tips vs. Root Tops
  misc_feature: MA Experiment ID: 20000794 Result: Down-regulated in Transcription
  misc_feature: MA Experiment 20000794 PARAMETER Experiment Name: At_Petals_P Parameter: Age (day) Value: 23-25 days
  misc_feature: MA Experiment 20000794 PARAMETER Experiment Name: At_Petals_P Parameter: Plant Line Value: WS
  misc_feature: MA Experiment 20000794 PARAMETER Experiment Name: At_Petals_P Parameter: Tissue Value: Petals vs. Whole plant
atcattgtccctcagacaaatttcactcgctcatctctgtctgaatctcacaagaagaagtgaaagatggtgaagatatgttgtattggagctgggtatgttggtggaccaacaatggcagtgattgcattgaaatgtccagacgttgaagtagcggttgttgatatctctgtaccacgtatcaacgcttggaacagtgacacgcttccgatttacgagcctggtcttgatgatgttgtgaagcaatgccgtggcaagaaccttttctttagtactgatgttgagaaacatgttagggaagctgatattgtgtttgtttctgtcaacacaccgactaagactagaggtcttggtgctggtaaagctgcggatcttacgtactgggagagcgctgcgcgtatgatcgctgatgtttcggtatcggataagattgtcgttgagaaatcgactgttccggttaaaacagctgaagctattgagaagattttgacacataacagtaaagggattaagtttcagattctttcgaatcccgagtttttggcggaaggaaccgcgattaaggacctatttaatccggaccgtgttcttatcggagggcgggaaaccccagaagggtttaaagcggtgcagactctcaagaatgtgtatgcacactgggttcctgaaggccaaatcataacaaccaatctctggtctgctgagctgtccaagcttgcggcaaacgctttcttggctcaaaggatttcatcagtgaatgctatgtcggctctgtgtgaagccacaggcgcagatgtcacgcaagtgtcttacgcggttggtacagactcaaggattggtcccaagttcttgaactcgagtgttggattcggtggttcgtgtttccagaaggacattctgaatcttgtctacatctgtgagtgcaacggactcccggaagtggcagagtactggaagcaagtcatcaagatcaatgactaccagaagagccggttcgtgaaccgtgttgtttcctccatgttcaactctgtatcaaacaagaagattgcggttctcggtttcgcattcaagaaagacaccggtgacacaagggagactccagccatcgatgtgtgcaagggtcttttagaagacaaagcaaggctaagcatttacgacccacaagtgactgaggatcagatccagagggatttatccatgaacaagttcgactgggaccatcctctacatttgcagccaatgagcccaacaacagtgaaacaagtgaccgttacttgggacgcatacgaagcaactaaggacgctcacggtatctgcatcatgaccgagtgggatgagttcaagaaccttgatttccagaagatctttgacaacatgcagaaaccagctttcgtgttcgatggaagaaacattatgaatctgcaaaagctaagggagattggtttcattgtttactccattggtaagcctctcgacgactggctcaaggacatgcctgccgttgcctaatgatgttcattgctgactctttcgtcctccatcatttgtgcttttcttcttcttgtggtttgtctttaagacttgttatatttcttacaatatgtttgttatgttctctggtgtgtgttttgttttttttggtattactttcatatttttttggtcgaagaggacttgtattcgacaatgtcgcttcaattttgttgtttccttagaaactaaataaatattggtttatattggagtaaaatgtgtttgtactttgtagttaatcgttgaaagttttgccactt

SEQ ID NO: 84945 - protein, 480 aa, Arabidopsis thaliana
  peptide (1)..(480): Ceres Seq. ID no. 12678018
  misc_feature (2)..(200): Pfam Name: UDP-glucose/GDP-mannose dehydrogenase family, Pfam Description: UDP-glucose/GDP-mannose dehydrogenase family,
  misc_feature (1)..(480): Homolog of NCBI NO: 15228687 NR Description: UDP-glucose dehydrogenase, putative; protein id:
  misc_feature (1)..(480): Homolog of NCBI NO: 21618158 NR Description: UDP-glucose dehydrogenase, putative [Arabidopsis
  misc_feature (1)..(480): Homolog of NCBI NO: 15983404 NR Description: AT3g29360/MUO10_6 [Arabidopsis thaliana]
  misc_feature (1)..(478): Homolog of NCBI NO: 15241704 NR Description: UDP-glucose dehydrogenase-like protein; protein
  misc_feature (1)..(478): Homolog of NCBI NO: 30102540 NR Description: At5g39320 [Arabidopsis thaliana]
  misc_feature (1)..(480): Homolog of NCBI NO: 15242316 NR Description: UDP-glucose dehydrogenase-like protein; protein At5g15490.1, supported by cDNA: gi_15810322 [Arabidopsis
MVKICCIGAGYVGGPTMAVIALKCPDVEVAVVDISVPRINAWNSDTLPIYEPGLDDVVKQCRGKNLFFSTDVEKHVREADIVFVSVNTPTKTRGLGAGKAADLTYWESAARMIADVSVSDKIVVEKSTVPVKTAEAIEKILTHNSKGIKFQILSNPEFLAEGTAIKDLFNPDRVLIGGRETPEGFKAVQTLKNVYAHWVPEGQIITTNLWSAELSKLAANAFLAQRISSVNAMSALCEATGADVTQVSYAVGTDSRIGPKFLNSSVGFGGSCFQKDILNLVYICECNGLPEVAEYWKQVIKINDYQKSRFVNRVVSSMFNSVSNKKIAVLGFAFKKDTGDTRETPAIDVCKGLLEDKARLSIYDPQVTEDQIQRDLSMNKFDWDHPLHLQPMSPTTVKQVTVTWDAYEATKDAHGICIMTEWDEFKNLDFQKIFDNMQKPAFVFDGRNIMNLQKLREIGFIVYSIGKPLDDWLKDMPAVA

SEQ ID NO: 84946 - protein, 464 aa, Arabidopsis thaliana
  peptide (1)..(464): Ceres Seq. ID no. 12678019
  misc_feature (1)..(184): Pfam Name: UDP-glucose/GDP-mannose dehydrogenase family, Pfam Description: UDP-glucose/GDP-mannose dehydrogenase family,
  misc_feature (1)..(464): Homolog of NCBI NO: 15228687 NR Description: UDP-glucose dehydrogenase, putative; protein id:
  misc_feature (1)..(464): Homolog of NCBI NO: 21618158 NR Description: UDP-glucose dehydrogenase, putative [Arabidopsis
  misc_feature (1)..(464): Homolog of NCBI NO: 15983404 NR Description: AT3g29360/MUO10_6 [Arabidopsis thaliana]
  misc_feature (1)..(462): Homolog of NCBI NO: 15241704 NR Description: UDP-glucose dehydrogenase-like protein; protein
  misc_feature (1)..(462): Homolog of NCBI NO: 30102540 NR Description: At5g39320 [Arabidopsis thaliana]
  misc_feature (1)..(464): Homolog of NCBI NO: 15242316 NR Description: UDP-glucose dehydrogenase-like protein; protein At5g15490.1, supported by cDNA: gi_15810322 [Arabidopsis
MAVIALKCPDVEVAVVDISVPRINAWNSDTLPIYEPGLDDVVKQCRGKNLFFSTDVEKHVREADIVFVSVNTPTKTRGLGAGKAADLTYWESAARMIADVSVSDKIVVEKSTVPVKTAEAIEKILTHNSKGIKFQILSNPEFLAEGTAIKDLFNPDRVLIGGRETPEGFKAVQTLKNVYAHWVPEGQIITTNLWSAELSKLAANAFLAQRISSVNAMSALCEATGADVTQVSYAVGTDSRIGPKFLNSSVGFGGSCFQKDILNLVYICECNGLPEVAEYWKQVIKINDYQKSRFVNRVVSSMFNSVSNKKIAVLGFAFKKDTGDTRETPAIDVCKGLLEDKARLSIYDPQVTEDQIQRDLSMNKFDWDHPLHLQPMSPTTVKQVTVTWDAYEATKDAHGICIMTEWDEFKNLDFQKIFDNMQKPAFVFDGRNIMNLQKLREIGFIVYSIGKPLDDWLKDMPAVA

SEQ ID NO: 84947 - protein, 369 aa, Arabidopsis thaliana
  peptide (1)..(369): Ceres Seq. ID no. 12678020
  misc_feature (1)..(89): Pfam Name: UDP-glucose/GDP-mannose dehydrogenase family, Pfam Description: UDP-glucose/GDP-mannose dehydrogenase family,
  misc_feature (1)..(369): Homolog of NCBI NO: 15228687 NR Description: UDP-glucose dehydrogenase, putative; protein id:
  misc_feature (1)..(369): Homolog of NCBI NO: 21618158 NR Description: UDP-glucose dehydrogenase, putative [Arabidopsis
  misc_feature (1)..(369): Homolog of NCBI NO: 15983404 NR Description: AT3g29360/MUO10_6 [Arabidopsis thaliana]
  misc_feature (1)..(367): Homolog of NCBI NO: 15241704 NR Description: UDP-glucose dehydrogenase-like protein; protein
  misc_feature (1)..(367): Homolog of NCBI NO: 30102540 NR Description: At5g39320 [Arabidopsis thaliana]
  misc_feature (1)..(369): Homolog of NCBI NO: 15242316 NR Description: UDP-glucose dehydrogenase-like protein; protein At5g15490.1, supported by cDNA: gi_15810322 [Arabidopsis
MIADVSVSDKIVVEKSTVPVKTAEAIEKILTHNSKGIKFQILSNPEFLAEGTAIKDLFNPDRVLIGGRETPEGFKAVQTLKNVYAHWVPEGQIITTNLWSAELSKLAANAFLAQRISSVNAMSALCEATGADVTQVSYAVGTDSRIGPKFLNSSVGFGGSCFQKDILNLVYICECNGLPEVAEYWKQVIKINDYQKSRFVNRVVSSMFNSVSNKKIAVLGFAFKKDTGDTRETPAIDVCKGLLEDKARLSIYDPQVTEDQIQRDLSMNKFDWDHPLHLQPMSPTTVKQVTVTWDAYEATKDAHGICIMTEWDEFKNLDFQKIFDNMQKPAFVFDGRNIMNLQKLREIGFIVYSIGKPLDDWLKDMPAVA

SEQ ID NO: 84948 - DNA, 1934 bp, Arabidopsis thaliana
  misc_feature (1)..(1934): Ceres Seq. ID no. 12678032
  misc_feature: MA Experiment ID: 20000227 Result: Down-regulated in Transcription
  misc_feature: MA Experiment 20000227 PARAMETER Experiment Name: At_Root-Tips-vs-Tops_P Parameter: Tissue Value: Root Tips vs. Root Tops
  misc_feature: MA Experiment ID: 20000234 Result: Down-regulated in Transcription
  misc_feature: MA Experiment 20000234 PARAMETER Experiment Name: At_Siliques_P Parameter: Age (day) Value: 21
  misc_feature: MA Experiment 20000234 PARAMETER Experiment Name: At_Siliques_P Parameter: Organism Value: A. thaliana
  misc_feature: MA Experiment 20000234 PARAMETER Experiment Name: At_Siliques_P Parameter: Plant Line Value: WS
  misc_feature: MA Experiment 20000234 PARAMETER Experiment Name: At_Siliques_P Parameter: Tissue Value: Less Than 5mm Siliques vs. Whole Plant
  misc_feature: MA Experiment ID: 20001557 Result: Down-regulated in Transcription
  misc_feature: MA Experiment 20001557 PARAMETER Experiment Name: At_Drought_Soil_Dry_P Parameter: Age (day) Value: 27
  misc_feature: MA Experiment 20001557 PARAMETER Experiment Name: At_Drought_Soil_Dry_P Parameter: Organism Value: A. thaliana
  misc_feature: MA Experiment 20001557 PARAMETER Experiment Name: At_Drought_Soil_Dry_P Parameter: Plant Line Value: WS
  misc_feature: MA Experiment 20001557 PARAMETER Experiment Name: At_Drought_Soil_Dry_P Parameter: Post Timepoint (hr) Value: 3
  misc_feature: MA Experiment 20001557 PARAMETER Experiment Name: At_Drought_Soil_Dry_P Parameter: Post-Treatment Value: Re-Water vs. No Drought
  misc_feature: MA Experiment 20001557 PARAMETER Experiment Name: At_Drought_Soil_Dry_P Parameter: Timepoint (day) Value: 13
  misc_feature: MA Experiment 20001557 PARAMETER Experiment Name: At_Drought_Soil_Dry_P Parameter: Treatment Value: Drought vs. No Drought
  misc_feature: MA Experiment ID: 20001558 Result: Down-regulated in Transcription
  misc_feature: MA Experiment 20001558 PARAMETER Experiment Name: At_Drought_Soil_Dry_P Parameter: Age (day) Value: 27
  misc_feature: MA Experiment 20001558 PARAMETER Experiment Name: At_Drought_Soil_Dry_P Parameter: Organism Value: A. thaliana
  misc_feature: MA Experiment 20001558 PARAMETER Experiment Name: At_Drought_Soil_Dry_P Parameter: Plant Line Value: WS
  misc_feature: MA Experiment 20001558 PARAMETER Experiment Name: At_Drought_Soil_Dry_P Parameter: Post Timepoint (hr) Value: 6
  misc_feature: MA Experiment 20001558 PARAMETER Experiment Name: At_Drought_Soil_Dry_P Parameter: Post-Treatment Value: Re-Water vs. No Drought
  misc_feature: MA Experiment 20001558 PARAMETER Experiment Name: At_Drought_Soil_Dry_P Parameter: Timepoint (day) Value: 13
  misc_feature: MA Experiment 20001558 PARAMETER Experiment Name: At_Drought_Soil_Dry_P Parameter: Treatment Value: Drought vs. No Drought
  misc_feature: MA Experiment ID: 20001560 Result: Down-regulated in Transcription
  misc_feature: MA Experiment 20001560 PARAMETER Experiment Name: At_Drought_Soil_Dry_P Parameter: Age (day) Value: 28
  misc_feature: MA Experiment 20001560 PARAMETER Experiment Name: At_Drought_Soil_Dry_P Parameter: Organism Value: A. thaliana
  misc_feature: MA Experiment 20001560 PARAMETER Experiment Name: At_Drought_Soil_Dry_P Parameter: Plant Line Value: WS
  misc_feature: MA Experiment 20001560 PARAMETER Experiment Name: At_Drought_Soil_Dry_P Parameter: Post Timepoint (hr) Value: None
  misc_feature: MA Experiment 20001560 PARAMETER Experiment Name: At_Drought_Soil_Dry_P Parameter: Post-Treatment Value: None
  misc_feature: MA Experiment 20001560 PARAMETER Experiment Name: At_Drought_Soil_Dry_P Parameter: Timepoint (day) Value: 14
  misc_feature: MA Experiment 20001560 PARAMETER Experiment Name: At_Drought_Soil_Dry_P Parameter: Treatment Value: Drought vs. No Drought
atagtgtcgtacacaatcacaatttccatcgtcagcaaaaccaaaatcgtgaggcctataatttcccttcatctccaaaatcatttctcctcaaatttcttctttagaagattaaaaatcttctctctaatctctccactctttcataaatattttcctaattcttctaccttggtgtctgattctagcaccaaaccattttctcctaccaaaatctgggtttcgatcaattttaggtcttttgattcctacttgtctaatcgtcttgcaatttcaaagatgacagttgttggagatgttgctccaattccaaggaggaacagttctacttgctctaatgatatcgctgctccgttattaccagagtgtcatggagatgaagttgctcatgatgaattcaatggagcttcttttagtggcgcggtttttaacctcgccacgactataattggtgctggtatcatggctttgcctgctacaatgaagattcttggacttggacttggaatcacgatgattgttgttatggctttcttgactgatgcgtcgattgagttcttgcttaggtttagtaaagctgggaagaatcgatcttacggtggtttaatgggtggttcttttggtaatcctggaaggattttgcttcaagtcgcggttttagttaataacatcggtgttttgattgtatacatgatcattataggtgatgtgttggctggaaagacggaagatggtatccatcatttcggtgttctcgaaggatggtttggtcaccattggtggaatggaagagctgctattcttctgattactactcttggtgtgtttgctccattggcttgcttcaagcgaatcgattctttgaaatttacatcggccttatccgtggctctggcggttgtgtttctcattattactgcgggaatttcaattatgaagttgatcagtggcggtgtggcgatgccaagattgttaccagatgttactgacttaacatctttctggaatctcttcacagtcgtacctgttcttgtcacagcattcatttgccattacaatgttcacagtatacagaacgagctcgaagacccctctcagataagacctgttgttcgatcagcacttatgctctgctcatctgtttacataatgacaagtattttcgggttcctcttgtttggtgatgatactcttgatgatgtccttgcaaactttgacactgatcttggaatcccttttggttctatccttaatgatgcggttcgagttagctacgcgcttcatttgatgctcgtgttcccgattgttttctaccctcttcggattaacattgacgggctcttgttcccttccgctcgatcattatctacctcaaatgtgaggttcggttgcctcactgccggtctcatctctgtaatcttcttgggtgcaaacttcatcccaagcatttgggatgctttccaattcactggagcaaccgccgctgtttgtctcggcttcatcttcccagcttctatcatactaaaggatcgtcatgacaaagcaacaaacagggacacaaccttagctattttcatgattgttcttgcggtattgtccaatgcaatcgccatttacagcgatgcttatgcgctattcaagaagaacgctcctcgtgagtaaatcccggtatgagaaaatgtgcagtttggtgtttagcttttgctttttcttctatgtgaaatcaaataatgaagaagacaagacttctcttctcttatatgtttgtacttttgtcgttgagtgttctaagcggacttttgcttcggtgttatataccaccatgagtgttgtttgtaaaaaaactctgtataaaaattgtaatgcagatacatattttgccttttcatgactcttagctattgcttcatatctatatacatatttggttttaa

SEQ ID NO: 84949 - protein, 553 aa, Arabidopsis thaliana
  peptide (1)..(553): Ceres Seq. ID no. 12678033
  misc_feature (140)..(307): Pfam Name: Tryptophan/tyrosine permease family Pfam Description: Tryptophan/tyrosine permease family
  misc_feature (94)..(553): Homolog of NCBI NO: 18406463 NR Description: expressed protein; protein id: At3g30390.1, by cDNA: gi_15529154, supported by cDNA: gi_16226266 [Arabidopsis >gi|9294342|dbj|BAB02239.1|
  misc_feature (117)..(549): Homolog of NCBI NO: 9758059 NR Description: amino acid transporter-like protein [Arabidopsis
  misc_feature (117)..(549): Homolog of NCBI NO: 15241555 NR Description: transporter -like protein; protein id:
  misc_feature (135)..(551): Homolog of NCBI NO: 34898706 NR Description: hypothetical protein [Oryza sativa (japonica group)] >gi|11862972|dbj|BAB19353.1| hypothetical protein [Oryza
  misc_feature (115)..(545): Homolog of NCBI NO: 15228851 NR Description: putative protein; protein id: At3g56200.1, by cDNA: gi_20453044 [Arabidopsis thaliana]
  misc_feature (119)..(509): Homolog of NCBI NO: 34907894 NR Description: P0439E11.11 [Oryza sativa (japonica
  misc_feature (115)..(543): Homolog of NCBI NO: 30688270 NR Description: amino acid transporter family [Arabidopsis
  misc_feature (135)..(549): Homolog of NCBI NO: 18412864 NR Description: expressed protein; protein id: At1g80510.1, by cDNA: gi_16226718 [Arabidopsis thaliana]
  misc_feature (166)..(543): Homolog of NCBI NO: 25408697 NR Description: hypothetical protein At2g40420 [imported] - thaliana >gi|20198010|gb|AAM15348.1| unknown protein [Arabidopsis
  misc_feature (115)..(164): Homolog of NCBI NO: 25408697 NR Description: hypothetical protein At2g40420 [imported] - thaliana >gi|20198010|gb|AAM15348.1| unknown protein [Arabidopsis
IVSYTITISIVSKTKIVRPIISLHLQNHFSSNFFFRRLKIFSLISPLFHKYFPNSSTLVSDSSTKPFSPTKIWVSINFRSFDSYLSNRLAISKMTVVGDVAPIPRRNSSTCSNDIAAPLLPECHGDEVAHDEFNGASFSGAVFNLATTIIGAGIMALPATMKILGLGLGITMIVVMAFLTDASIEFLLRFSKAGKNRSYGGLMGGSFGNPGRILLQVAVLVNNIGVLIVYMIIIGDVLAGKTEDGIHHFGVLEGWFGHHWWNGRAAILLITTLGVFAPLACFKRIDSLKFTSALSVALAVVFLIITAGISIMKLISGGVAMPRLLPDVTDLTSFWNLFTVVPVLVTAFICHYNVHSIQNELEDPSQIRPVVRSALMLCSSVYIMTSIFGFLLFGDDTLDDVLANFDTDLGIPFGSILNDAVRVSYALHLMLVFPIVFYPLRINIDGLLFPSARSLSTSNVRFGCLTAGLISVIFLGANFIPSIWDAFQFTGATAAVCLGFIFPASIILKDRHDKATNRDTTLAIFMIVLAVLSNAIAIYSDAYALFKKNAPRE

SEQ ID NO: 84950 - protein, 460 aa, Arabidopsis thaliana
  peptide (1)..(460): Ceres Seq. ID no. 12678034
  misc_feature (47)..(214): Pfam Name: Tryptophan/tyrosine permease family Pfam Description: Tryptophan/tyrosine permease family
  misc_feature (1)..(460): Homolog of NCBI NO: 18406463 NR Description: expressed protein; protein id: At3g30390.1, by cDNA: gi_15529154, supported by cDNA: gi_16226266 [Arabidopsis >gi|9294342|dbj|BAB02239.1|
  misc_feature (24)..(456): Homolog of NCBI NO: 9758059 NR Description: amino acid transporter-like protein [Arabidopsis
  misc_feature (24)..(456): Homolog of NCBI NO: 15241555 NR Description: transporter -like protein; protein id:
  misc_feature (42)..(458): Homolog of NCBI NO: 34898706 NR Description: hypothetical protein [Oryza sativa (japonica group)] >gi|11862972|dbj|BAB19353.1| hypothetical protein [Oryza
  misc_feature (22)..(452): Homolog of NCBI NO: 15228851 NR Description: putative protein; protein id: At3g56200.1, by cDNA: gi_20453044 [Arabidopsis thaliana]
  misc_feature (26)..(416): Homolog of NCBI NO: 34907894 NR Description: P0439E11.11 [Oryza sativa (japonica
  misc_feature (22)..(450): Homolog of NCBI NO: 30688270 NR Description: amino acid transporter family [Arabidopsis
  misc_feature (42)..(456): Homolog of NCBI NO: 18412864 NR Description: expressed protein; protein id: At1g80510.1, by cDNA: gi_16226718 [Arabidopsis thaliana]
  misc_feature (73)..(450): Homolog of NCBI NO: 25408697 NR Description: hypothetical protein At2g40420 [imported] - thaliana >gi|20198010|gb|AAM15348.1| unknown protein [Arabidopsis
  misc_feature (22)..(71): Homolog of NCBI NO: 25408697 NR Description: hypothetical protein At2g40420 [imported] - thaliana >gi|20198010|gb|AAM15348.1| unknown protein [Arabidopsis
MTVVGDVAPIPRRNSSTCSNDIAAPLLPECHGDEVAHDEFNGASFSGAVFNLATTIIGAGIMALPATMKILGLGLGITMIVVMAFLTDASIEFLLRFSKAGKNRSYGGLMGGSFGNPGRILLQVAVLVNNIGVLIVYMIIIGDVLAGKTEDGIHHFGVLEGWFGHHWWNGRAAILLITTLGVFAPLACFKRIDSLKFTSALSVALAVVFLIITAGISIMKLISGGVAMPRLLPDVTDLTSFWNLFTVVPVLVTAFICHYNVHSIQNELEDPSQIRPVVRSALMLCSSVYIMTSIFGFLLFGDDTLDDVLANFDTDLGIPFGSILNDAVRVSYALHLMLVFPIVFYPLRINIDGLLFPSARSLSTSNVRFGCLTAGLISVIFLGANFIPSIWDAFQFTGATAAVCLGFIFPASIILKDRHDKATNRDTTLAIFMIVLAVLSNAIAIYSDAYALFKKNAPRE

SEQ ID NO: 84951 - protein, 399 aa, Arabidopsis thaliana
  peptide (1)..(399): Ceres Seq. ID no. 12678035
  misc_feature (1)..(153): Pfam Name: Tryptophan/tyrosine permease family Pfam Description: Tryptophan/tyrosine permease family
  misc_feature (1)..(399): Homolog of NCBI NO: 18406463 NR Description: expressed protein; protein id: At3g30390.1, by cDNA: gi_15529154, supported by cDNA: gi_16226266 [Arabidopsis >gi|9294342|dbj|BAB02239.1|
  misc_feature (1)..(395): Homolog of NCBI NO: 9758059 NR Description: amino acid transporter-like protein [Arabidopsis
  misc_feature (1)..(395): Homolog of NCBI NO: 15241555 NR Description: transporter -like protein; protein id:
  misc_feature (1)..(397): Homolog of NCBI NO: 34898706 NR Description: hypothetical protein [Oryza sativa (japonica group)] >gi|11862972|dbj|BAB19353.1| hypothetical protein [Oryza
  misc_feature (1)..(391): Homolog of NCBI NO: 15228851 NR Description: putative protein; protein id: At3g56200.1, by cDNA: gi_20453044 [Arabidopsis thaliana]
  misc_feature (1)..(355): Homolog of NCBI NO: 34907894 NR Description: P0439E11.11 [Oryza sativa (japonica
  misc_feature (1)..(389): Homolog of NCBI NO: 30688270 NR Description: amino acid transporter family [Arabidopsis
  misc_feature (1)..(395): Homolog of NCBI NO: 18412864 NR Description: expressed protein; protein id: At1g80510.1, by cDNA: gi_16226718 [Arabidopsis thaliana]
  misc_feature (12)..(389): Homolog of NCBI NO: 25408697 NR Description: hypothetical protein At2g40420 [imported] - thaliana >gi|20198010|gb|AAM15348.1| unknown protein [Arabidopsis
  misc_feature (1)..(273): Homolog of NCBI NO: 24461850 NR Description: CTV.3 [Poncirus trifoliata]
MALPATMKILGLGLGITMIVVMAFLTDASIEFLLRFSKAGKNRSYGGLMGGSFGNPGRILLQVAVLVNNIGVLIVYMIIIGDVLAGKTEDGIHHFGVLEGWFGHHWWNGRAAILLITTLGVFAPLACFKRIDSLKFTSALSVALAVVFLIITAGISIMKLISGGVAMPRLLPDVTDLTSFWNLFTVVPVLVTAFICHYNVHSIQNELEDPSQIRPVVRSALMLCSSVYIMTSIFGFLLFGDDTLDDVLANFDTDLGIPFGSILNDAVRVSYALHLMLVFPIVFYPLRINIDGLLFPSARSLSTSNVRFGCLTAGLISVIFLGANFIPSIWDAFQFTGATAAVCLGFIFPASIILKDRHDKATNRDTTLAIFMIVLAVLSNAIAIYSDAYALFKKNAPRE

SEQ ID NO: 84952 - DNA, 1718 bp, Arabidopsis thaliana
  misc_feature (1)..(1718): Ceres Seq. ID no. 12678036
  misc_feature: MA Experiment ID: 20000315 Result: Down-regulated in Transcription
  misc_feature: MA Experiment 20000315 PARAMETER Experiment Name: At_14day_Shoots-Roots_Sub_P Parameter: Age (day) Value: 14
  misc_feature: MA Experiment 20000315 PARAMETER Experiment Name: At_14day_Shoots-Roots_Sub_P Parameter: Organism Value: A. thaliana
  misc_feature: MA Experiment 20000315 PARAMETER Experiment Name: At_14day_Shoots-Roots_Sub_P Parameter: Plant Line Value: WS
  misc_feature: MA Experiment 20000315 PARAMETER Experiment Name: At_14day_Shoots-Roots_Sub_P Parameter: Tissue Value: Shoots vs. Whole Plant
  misc_feature: MA Experiment ID: 20000328 Result: Down-regulated in Transcription
  misc_feature: MA Experiment 20000328 PARAMETER Experiment Name: At_42deg_Heat_Sub_P Parameter: Age (day) Value: 14
  misc_feature: MA Experiment 20000328 PARAMETER Experiment Name: At_42deg_Heat_Sub_P Parameter: Organism Value: A. thaliana
  misc_feature: MA Experiment 20000328 PARAMETER Experiment Name: At_42deg_Heat_Sub_P Parameter: Plant Line Value: WS
  misc_feature: MA Experiment 20000328 PARAMETER Experiment Name: At_42deg_Heat_Sub_P Parameter: Temperature (deg C) Value: 42 vs. 22
  misc_feature: MA Experiment 20000328 PARAMETER Experiment Name: At_42deg_Heat_Sub_P Parameter: Timepoint (hr) Value: 6
  misc_feature: MA Experiment 20000328 PARAMETER Experiment Name: At_42deg_Heat_Sub_P Parameter: Tissue Value: Aerial
gattcttaaaaaaaaaaacaatctgtcattgatgctcaagagttacattctttgaattgaagatcatttctctgtttctcagattacccatttgatcaaagaaaaaaaatggaacaagatcatgtaaaagtcaaaaagagagtagcttttgttctaatcgatggtttaggagatgtaacaataccaaaactaggttacaaaactccattacaagcagcaaacatacctaatctcgacgcaattgcatcagctggtatcaacggtttaatggatccagtagaagttggtttaggttgtggtagtgacactgctcatctttctctcatgggttatgatccaagagtatattaccgtggacgtggtgcttttgagtctatgggtgcaggtttagctatgtcacctggtgatatagctttcaagtctaattttgcaactttggatgagaaatctggagttgttgttagtcgaagagctgatcgacatttcgaagaagaaggtcctatactttgtgcagctcttgatgggttaaagcttcaatctttccctgagtatgaagtgagagtcagatatgcgacggaacatcggtgtggtgttgttgttaaagggccaagacttagtgggaatatatctggcactgatccgttgaaagataatcgtttgcttcttgaagctaaacctttagatgaatcagaagaagctactcacactgctaaagttgttaacgaattatcaagagagatatcgcgtattcttgtttctcacccggttaacgcagagagagctgcacaaggcaagaatattgcaaatctcgttcttttacgtggttgtggtattcgaatcgaggtacctccttttcatgagaagcatggcttgtggccatgtatggtagcaccaacaaagattatagctggacttggtatgtcgctcggtattgacattttagaagctccgggagctactggagattaccggacgcttctgacatcgaaagcaactgctatagctaatgctctctcagctcctttgaatccctgccctaatgtctttgtaccgggagaggacgggcataaaccaggaaggtcagatggttatgatttcgggttccttcacataaaggctatagatgatgcaggtcatgataaggcgacaatgttcaaagttcgaggtttagaagctgttgataaggcgatacgtcagcttgctaagcttttatggcaagctgagtcttctacacattaccagtatttcttgtgtgtgaccggtgatcattcaactcctgttgagtatggagaccacagctttgagcctgtcccattcacaatgtgccggttaagggactttgtgagcgcggtgggaggagaatcagccgtactagagacgtctttggacccttttccacttccaacggttgtggaatcaggtgaagatgttaccaaacaagaggaagagagtgggaggagggaagctcctctggcaattggtggagatttagttgcagagttgaatgaggttgcagctgcaagaggatgtcttggccgtttccatggcggtgaaatgatgggagtcatcactaactttcttaatctagaggtatgagttacttaaaagttttgcatttttctttgagaatttggatattgaaaagtgtaataaaaataccaaaagctgaaagtgtaacacaaacctagttttcgtaacaaattgaataattgattatc

SEQ ID NO: 84953 - protein, 495 aa, Arabidopsis thaliana
  peptide (1)..(495): Ceres Seq. ID no. 12678037
  misc_feature (309)..(423): Pfam Name: Metalloenzyme superfamily Pfam Description: Metalloenzyme superfamily
  misc_feature (1)..(495): Homolog of NCBI NO: 30690068 NR Description: phosphonopyruvate decarboxylase -related
  misc_feature (7)..(495): Homolog of NCBI NO: 30681098 NR Description: expressed protein [Arabidopsis thaliana]
  misc_feature (7)..(495): Homolog of NCBI NO: 25407505 NR Description: hypothetical protein AT4g09520 [imported] - thaliana >gi|7267647|emb|CAB78075.1| putative protein
  misc_feature (11)..(302): Homolog of NCBI NO: 28828261 NR Description: similar to Arabidopsis thaliana (Mouse-ear cress).
  misc_feature (325)..(408): Homolog of NCBI NO: 28828261 NR Description: similar to Arabidopsis thaliana (Mouse-ear cress).
  misc_feature (403)..(492): Homolog of NCBI NO: 28828261 NR Description: similar to Arabidopsis thaliana (Mouse-ear cress).
  misc_feature (8)..(302): Homolog of NCBI NO: 20094629 NR Description: Predicted phosphoglycerate mutase [Methanopyrus
  misc_feature (326)..(402): Homolog of NCBI NO: 20094629 NR Description: Predicted phosphoglycerate mutase [Methanopyrus
  misc_feature (460)..(487): Homolog of NCBI NO: 20094629 NR Description: Predicted phosphoglycerate mutase [Methanopyrus
  misc_feature (11)..(302): Homolog of NCBI NO: 15897350 NR Description: Phosphonopyruvate decarboxylase [Sulfolobus
MEQDHVKVKKRVAFVLIDGLGDVTIPKLGYKTPLQAANIPNLDAIASAGINGLMDPVEVGLGCGSDTAHLSLMGYDPRVYYRGRGAFESMGAGLAMSPGDIAFKSNFATLDEKSGVVVSRRADRHFEEEGPILCAALDGLKLQSFPEYEVRVRYATEHRCGVVVKGPRLSGNISGTDPLKDNRLLLEAKPLDESEEATHTAKVVNELSREISRILVSHPVNAERAAQGKNIANLVLLRGCGIRIEVPPFHEKHGLWPCMVAPTKIIAGLGMSLGIDILEAPGATGDYRTLLTSKATAIANALSAPLNPCPNVFVPGEDGHKPGRSDGYDFGFLHIKAIDDAGHDKATMFKVRGLEAVDKAIRQLAKLLWQAESSTHYQYFLCVTGDHSTPVEYGDHSFEPVPFTMCRLRDFVSAVGGESAVLETSLDPFPLPTVVESGEDVTKQEEESGRREAPLAIGGDLVAELNEVAAARGCLGRFHGGEMMGVITNFLNLEV

SEQ ID NO: 84954 - protein, 442 aa, Arabidopsis thaliana
  peptide (1)..(442): Ceres Seq. ID no. 12678038
  misc_feature (256)..(370): Pfam Name: Metalloenzyme superfamily Pfam Description: Metalloenzyme superfamily
  misc_feature (1)..(442): Homolog of NCBI NO: 30690068 NR Description: phosphonopyruvate decarboxylase -related
  misc_feature (1)..(442): Homolog of NCBI NO: 30681098 NR Description: expressed protein [Arabidopsis thaliana]
  misc_feature (1)..(442): Homolog of NCBI NO: 25407505 NR Description: hypothetical protein AT4g09520 [imported] - thaliana >gi|7267647|emb|CAB78075.1| putative protein
  misc_feature (1)..(249): Homolog of NCBI NO: 28828261 NR Description: similar to Arabidopsis thaliana (Mouse-ear cress).
  misc_feature (272)..(355): Homolog of NCBI NO: 28828261 NR Description: similar to Arabidopsis thaliana (Mouse-ear cress).
  misc_feature (350)..(439): Homolog of NCBI NO: 28828261 NR Description: similar to Arabidopsis thaliana (Mouse-ear cress).
  misc_feature (1)..(249): Homolog of NCBI NO: 20094629 NR Description: Predicted phosphoglycerate mutase [Methanopyrus
  misc_feature (273)..(349): Homolog of NCBI NO: 20094629 NR Description: Predicted phosphoglycerate mutase [Methanopyrus
  misc_feature (407)..(434): Homolog of NCBI NO: 20094629 NR Description: Predicted phosphoglycerate mutase [Methanopyrus
  misc_feature (1)..(249): Homolog of NCBI NO: 15897350 NR Description: Phosphonopyruvate decarboxylase [Sulfolobus
MDPVEVGLGCGSDTAHLSLMGYDPRVYYRGRGAFESMGAGLAMSPGDIAFKSNFATLDEKSGVVVSRRADRHFEEEGPILCAALDGLKLQSFPEYEVRVRYATEHRCGVVVKGPRLSGNISGTDPLKDNRLLLEAKPLDESEEATHTAKVVNELSREISRILVSHPVNAERAAQGKNIANLVLLRGCGIRIEVPPFHEKHGLWPCMVAPTKIIAGLGMSLGIDILEAPGATGDYRTLLTSKATAIANALSAPLNPCPNVFVPGEDGHKPGRSDGYDFGFLHIKAIDDAGHDKATMFKVRGLEAVDKAIRQLAKLLWQAESSTHYQYFLCVTGDHSTPVEYGDHSFEPVPFTMCRLRDFVSAVGGESAVLETSLDPFPLPTVVESGEDVTKQEEESGRREAPLAIGGDLVAELNEVAAARGCLGRFHGGEMMGVITNFLNLEV

SEQ ID NO: 84955 - protein, 423 aa, Arabidopsis thaliana
  peptide (1)..(423): Ceres Seq. ID no. 12678039
  misc_feature (237)..(351): Pfam Name: Metalloenzyme superfamily Pfam Description: Metalloenzyme superfamily
  misc_feature (1)..(423): Homolog of NCBI NO: 30690068 NR Description: phosphonopyruvate decarboxylase -related
  misc_feature (1)..(423): Homolog of NCBI NO: 30681098 NR Description: expressed protein [Arabidopsis thaliana]
  misc_feature (1)..(423): Homolog of NCBI NO: 25407505 NR Description: hypothetical protein AT4g09520 [imported] - thaliana >gi|7267647|emb|CAB78075.1| putative protein
  misc_feature (1)..(230): Homolog of NCBI NO: 28828261 NR Description: similar to Arabidopsis thaliana (Mouse-ear cress).
  misc_feature (253)..(336): Homolog of NCBI NO: 28828261 NR Description: similar to Arabidopsis thaliana (Mouse-ear cress).
  misc_feature (331)..(420): Homolog of NCBI NO: 28828261 NR Description: similar to Arabidopsis thaliana (Mouse-ear cress).
  misc_feature (1)..(230): Homolog of NCBI NO: 20094629 NR Description: Predicted phosphoglycerate mutase [Methanopyrus
  misc_feature (254)..(330): Homolog of NCBI NO: 20094629 NR Description: Predicted phosphoglycerate mutase [Methanopyrus
  misc_feature (388)..(415): Homolog of NCBI NO: 20094629 NR Description: Predicted phosphoglycerate mutase [Methanopyrus
  misc_feature (1)..(230): Homolog of NCBI NO: 15897350 NR Description: Phosphonopyruvate decarboxylase [Sulfolobus
MGYDPRVYYRGRGAFESMGAGLAMSPGDIAFKSNFATLDEKSGVVVSRRADRHFEEEGPILCAALDGLKLQSFPEYEVRVRYATEHRCGVVVKGPRLSGNISGTDPLKDNRLLLEAKPLDESEEATHTAKVVNELSREISRILVSHPVNAERAAQGKNIANLVLLRGCGIRIEVPPFHEKHGLWPCMVAPTKIIAGLGMSLGIDILEAPGATGDYRTLLTSKATAIANALSAPLNPCPNVFVPGEDGHKPGRSDGYDFGFLHIKAIDDAGHDKATMFKVRGLEAVDKAIRQLAKLLWQAESSTHYQYFLCVTGDHSTPVEYGDHSFEPVPFTMCRLRDFVSAVGGESAVLETSLDPFPLPTVVESGEDVTKQEEESGRREAPLAIGGDLVAELNEVAAARGCLGRFHGGEMMGVITNFLNLEV

SEQ ID NO: 84956 - DNA, 1953 bp, Arabidopsis thaliana
  misc_feature (1)..(1953): Ceres Seq. ID no. 12678060
  misc_feature: MA Experiment ID: 20000171 Result: Down-regulated in Transcription
  misc_feature: MA Experiment 20000171 PARAMETER Experiment Name: At_42deg_Heat_P Parameter: Age (day) Value: 14
  misc_feature: MA Experiment 20000171 PARAMETER Experiment Name: At_42deg_Heat_P Parameter: Organism Value: A. thaliana
  misc_feature: MA Experiment 20000171 PARAMETER Experiment Name: At_42deg_Heat_P Parameter: Plant Line Value: WS
  misc_feature: MA Experiment 20000171 PARAMETER Experiment Name: At_42deg_Heat_P Parameter: Temperature (deg C) Value: 42 vs. 22
  misc_feature: MA Experiment 20000171 PARAMETER Experiment Name: At_42deg_Heat_P Parameter: Timepoint (hr) Value: 1
  misc_feature: MA Experiment 20000171 PARAMETER Experiment Name: At_42deg_Heat_P Parameter: Tissue Value: Aerial
  misc_feature: MA Experiment ID: 20000180 Result: Up-regulated in Transcription
  misc_feature: MA Experiment 20000180 PARAMETER Experiment Name: At_Germinating_Seeds_P Parameter: Age (hr) Value: 24 vs. 0
  misc_feature: MA Experiment 20000180 PARAMETER Experiment Name: At_Germinating_Seeds_P Parameter: Tissue Value: Germinating Seeds
  misc_feature: MA Experiment ID: 20000264 Result: Up-regulated in Transcription
  misc_feature: MA Experiment 20000264 PARAMETER Experiment Name: At_Open_Flower_P Parameter: Age (day) Value: 21
  misc_feature: MA Experiment 20000264 PARAMETER Experiment Name: At_Open_Flower_P Parameter: Plant Line Value: WS
  misc_feature: MA Experiment 20000264 PARAMETER Experiment Name: At_Open_Flower_P Parameter: Tissue Value: Open Flower vs. Whole Plant
  misc_feature: MA Experiment ID: 20000265 Result: Up-regulated in Transcription
  misc_feature: MA Experiment 20000265 PARAMETER Experiment Name: At_Open_Flower_P Parameter: Age (day) Value: 21
  misc_feature: MA Experiment 20000265 PARAMETER Experiment Name: At_Open_Flower_P Parameter: Plant Line Value: WS
  misc_feature: MA Experiment 20000265 PARAMETER Experiment Name: At_Open_Flower_P Parameter: Tissue Value: Closed Flower vs. Whole Plant
  misc_feature: MA Experiment ID: 20000286 Result: Up-regulated in Transcription
  misc_feature: MA Experiment 20000286 PARAMETER Experiment Name: At_Open_Flower_P Parameter: Age (day) Value: 21
  misc_feature: MA Experiment 20000286 PARAMETER Experiment Name: At_Open_Flower_P Parameter: Plant Line Value: WS
  misc_feature: MA Experiment 20000286 PARAMETER Experiment Name: At_Open_Flower_P Parameter: Tissue Value: Half Open vs. Whole Plant
  misc_feature: MA Experiment ID: 20000308 Result: Up-regulated in Transcription
  misc_feature: MA Experiment 20000308 PARAMETER Experiment Name: At_100mM_NaCl__P Parameter: Age (day) Value: 17
  misc_feature: MA Experiment 20000308 PARAMETER Experiment Name: At_100mM_NaCl__P Parameter: Organism Value: A. thaliana
  misc_feature: MA Experiment 20000308 PARAMETER Experiment Name: At_100mM_NaCl__P Parameter: Plant Line Value: WS
  misc_feature: MA Experiment 20000308 PARAMETER Experiment Name: At_100mM_NaCl__P Parameter: Timepoint (hr) Value: 72
  misc_feature: MA Experiment 20000308 PARAMETER Experiment Name: At_100mM_NaCl__P Parameter: Tissue Value: Whole Plant
  misc_feature: MA Experiment 20000308 PARAMETER Experiment Name: At_100mM_NaCl__P Parameter: Treatment Value: 100mM NaCl vs. No Treatment
  misc_feature: MA Experiment ID: 20000436 Result: Up-regulated in Transcription
  misc_feature: MA Experiment 20000436 PARAMETER Experiment Name: At_Drought_P Parameter: Age (day) Value: 7
  misc_feature: MA Experiment 20000436 PARAMETER Experiment Name: At_Drought_P Parameter: Organism Value: A. thaliana
  misc_feature: MA Experiment 20000436 PARAMETER Experiment Name: At_Drought_P Parameter: Plant Line Value: WS
  misc_feature: MA Experiment 20000436 PARAMETER Experiment Name: At_Drought_P Parameter: Timepoint (hr) Value: 12
  misc_feature: MA Experiment 20000436 PARAMETER Experiment Name: At_Drought_P Parameter: Tissue Value: Whole Plant
  misc_feature: MA Experiment 20000436 PARAMETER Experiment Name: At_Drought_P Parameter: Treatment Value: Drought vs. No Drought
  misc_feature: MA Experiment ID: 20000445 Result: Up-regulated in Transcription
  misc_feature: MA Experiment 20000445 PARAMETER Experiment Name: At_100uM_NAA__P Parameter: Age (day) Value: 14
  misc_feature: MA Experiment 20000445 PARAMETER Experiment Name: At_100uM_NAA__P Parameter: Organism Value: A. thaliana
  misc_feature: MA Experiment 20000445 PARAMETER Experiment Name: At_100uM_NAA__P Parameter: Plant Line Value: WS
  misc_feature: MA Experiment 20000445 PARAMETER Experiment Name: At_100uM_NAA__P Parameter: Timepoint (hr) Value: 6
  misc_feature: MA Experiment 20000445 PARAMETER Experiment Name: At_100uM_NAA__P Parameter: Tissue Value: Aerial
  misc_feature: MA Experiment 20000445 PARAMETER Experiment Name: At_100uM_NAA__P Parameter: Treatment Value: 100uM NAA vs. No Treatment
  misc_feature: MA Experiment ID: 20000794 Result: Up-regulated in Transcription
  misc_feature: MA Experiment 20000794 PARAMETER Experiment Name: At_Petals_P Parameter: Age (day) Value: 23-25 days
  misc_feature: MA Experiment 20000794 PARAMETER Experiment Name: At_Petals_P Parameter: Plant Line Value: WS
  misc_feature: MA Experiment 20000794 PARAMETER Experiment Name: At_Petals_P Parameter: Tissue Value: Petals vs. Whole plant
  misc_feature: MA Experiment ID: 20001557 Result: Down-regulated in Transcription
  misc_feature: MA Experiment 20001557 PARAMETER Experiment Name: At_Drought_Soil_Dry_P Parameter: Age (day) Value: 27
  misc_feature: MA Experiment 20001557 PARAMETER Experiment Name: At_Drought_Soil_Dry_P Parameter: Organism Value: A. thaliana
  misc_feature: MA Experiment 20001557 PARAMETER Experiment Name: At_Drought_Soil_Dry_P Parameter: Plant Line Value: WS
  misc_feature: MA Experiment 20001557 PARAMETER Experiment Name: At_Drought_Soil_Dry_P Parameter: Post Timepoint (hr) Value: 3
  misc_feature: MA Experiment 20001557 PARAMETER Experiment Name: At_Drought_Soil_Dry_P Parameter: Post-Treatment Value: Re-Water vs. No Drought
  misc_feature: MA Experiment 20001557 PARAMETER Experiment Name: At_Drought_Soil_Dry_P Parameter: Timepoint (day) Value: 13
  misc_feature: MA Experiment 20001557 PARAMETER Experiment Name: At_Drought_Soil_Dry_P Parameter: Treatment Value: Drought vs. No Drought
  misc_feature: MA Experiment ID: 20001905 Result: Down-regulated in Transcription
  misc_feature: MA Experiment 20001905 PARAMETER Experiment Name: At_Drought_Reproduction_P Parameter: Age (day) Value: 40
  misc_feature: MA Experiment 20001905 PARAMETER Experiment Name: At_Drought_Reproduction_P Parameter: Organism Value: A. thaliana
  misc_feature: MA Experiment 20001905 PARAMETER Experiment Name: At_Drought_Reproduction_P Parameter: Plant Line Value: WS
  misc_feature: MA Experiment 20001905 PARAMETER Experiment Name: At_Drought_Reproduction_P Parameter: Timepoint (day) Value: 10
  misc_feature: MA Experiment 20001905 PARAMETER Experiment Name: At_Drought_Reproduction_P Parameter: Tissue Value: Rosettes
  misc_feature: MA Experiment 20001905 PARAMETER Experiment Name: At_Drought_Reproduction_P Parameter: Treatment Value: Drought vs. No Drought
actcttcacaaagatattatagagtgtgagagagagacactcttgtttcatcttcaacttccactacctttgcaagattctacctgagatagatggcgaagttccgacaaatgggttcatcaatcttcttcctctttcttatcataatctcattatgttccgcccacaaagaagcgttttcttcaactgatcttgttcaaatggagtgcttgagagtcccaccgttagagtttgctgaagcggccaaaaccgtcgtcgacgctataacaaaagcggtagctatagtgtccaagttcgacaagaaagccgggaagtcgcgagtctccaatgcgattgttgattgtgttgatcttcttgattctgccgccgaagagctttcttggatcatctctgcctctcaatcccccaacggtaaagacaatagcacaggagacgtgggttcggatctaaggacatggataagcgccgcactttctaaccaggacacatgtcttgacggtttcgagggtactaatggaattatcaaaaagatagtggccggtggtcttagcaaggttggtacgaccgttcggaatttactaacgatggttcactctcctccctctaagcccaaacctaagcccattaaggcccagacaatgacgaaagctcatagtggcttcagtaagttcccctcatgggttaaacccggtgatcggaagttgttgcaaactgataacataacggttgctgacgcggttgtagccgcagacgggaccggaaatttcacgacgataagtgacgcggtgttggctgcaccggactatagtaccaaaagatatgtcatacatgtaaaaagaggtgtgtatgtagagaatgtggagattaaaaagaagaaatggaacattatgatggttggtgacggcatcgatgccaccgtgatcacgggtaaccggagtttcatcgacggctggactactttccgatctgctacatttgctgtgagcggtagaggatttattgcacgcgatatcaccttccaaaacacagcaggaccggaaaaacaccaagcggtcgcaatccgatccgatacggatctcggggtcttttatcgatgcgcgatgagaggttaccaagacactctctatgcccactcaatgcgtcaattctttagagaatgcattataacaggcactgtagactttatattcggagacgccacagcagtattccaaagctgccaaatcaaagccaaacaaggccttccaaaccagaagaatagcatcacggctcaaggacgtaaggatccaaatgagccaaccggtttcacaatccaattcagcaatatagcagctgataccgacctacttctaaacttaaatactacggctacttacttaggtcggccgtggaaactatattctaggacggtgttcatgcaaaactacatgagtgatgcaatcaaccccgtaggatggcttgaatggaatggaaattttgcgttggatacattatattatggtgagtatatgaatagcggaccgggggctagtcttgaccgccgtgttaagtggccaggataccatgtgttgaatacttcggccgaggctaataattttacagtatctcaactcatacaagggaacttgtggttaccatcaactggtatcacgttcattgctggtctagtctcgtaaattaatcatgtttgatcgaattctaatattatcatttgatatatcatttctattatactaaacgttataattatgtttcttgatgttttctattttgtatatggttttggttaaattattattattattattattttggtgatattgaactacaagttctctacgtttgatatgtatttaatgagttattttactcgtagaattaaagtcatatgtcaaccacatttttctaccattgatcttcaaacaatggattttatacataatattcttttcc

SEQ ID NO: 84957 - protein, 527 aa, Arabidopsis thaliana
  peptide (1)..(527): Ceres Seq. ID no. 12678061
  misc_feature (214)..(511): Pfam Name: Pectinesterase Pfam Description: Pectinesterase
  misc_feature (1)..(527): Homolog of NCBI NO: 30690925 NR Description: pectinesterase family [Arabidopsis thaliana]
  misc_feature (12)..(525): Homolog of NCBI NO: 14190429 NR Description: AT4g33220/F4I10_150 [Arabidopsis thaliana]
  misc_feature (10)..(525): Homolog of NCBI NO: 15081598 NR Description: pectin methylesterase PME1 [Vitis vinifera]
  misc_feature (16)..(523): Homolog of NCBI NO: 6093744 NR Description: Pectinesterase PPE8B precursor (Pectin
  misc_feature (72)..(525): Homolog of NCBI NO: 7447375 NR Description: pectinesterase homolog F4I10.150 - Arabidopsis
  misc_feature (1)..(524): Homolog of NCBI NO: 33520429 NR Description: pectinesterase [Fragaria x ananassa]
  misc_feature (1)..(298): Homolog of NCBI NO: 17529128 NR Description: putative pectinesterase [Arabidopsis thaliana]
  misc_feature (134)..(525): Homolog of NCBI NO: 18418172 NR Description: pectinesterase family; protein id: At4g33220.1,
  misc_feature (74)..(527): Homolog of NCBI NO: 15230020 NR Description: pectinesterase family; protein id: At3g05620.1 thaliana] >gi|6714448|gb|AAF26135.1|AC011620_11 putative
  misc_feature (76)..(525): Homolog of NCBI NO: 24250746 NR Description: putative thermostable pectinesterase [Citrus >gi|24250751|gb|AAK84486.1| putative thermostable pectinesterase
MAKFRQMGSSIFFLFLIIISLCSAHKEAFSSTDLVQMECLRVPPLEFAEAAKTVVDAITKAVAIVSKFDKKAGKSRVSNAIVDCVDLLDSAAEELSWIISASQSPNGKDNSTGDVGSDLRTWISAALSNQDTCLDGFEGTNGIIKKIVAGGLSKVGTTVRNLLTMVHSPPSKPKPKPIKAQTMTKAHSGFSKFPSWVKPGDRKLLQTDNITVADAVVAADGTGNFTTISDAVLAAPDYSTKRYVIHVKRGVYVENVEIKKKKWNIMMVGDGIDATVITGNRSFIDGWTTFRSATFAVSGRGFIARDITFQNTAGPEKHQAVAIRSDTDLGVFYRCAMRGYQDTLYAHSMRQFFRECIITGTVDFIFGDATAVFQSCQIKAKQGLPNQKNSITAQGRKDPNEPTGFTIQFSNIAADTDLLLNLNTTATYLGRPWKLYSRTVFMQNYMSDAINPVGWLEWNGNFALDTLYYGEYMNSGPGASLDRRVKWPGYHVLNTSAEANNFTVSQLIQGNLWLPSTGITFIAGLVS

SEQ ID NO: 84958 - protein, 521 aa, Arabidopsis thaliana
  peptide (1)..(521): Ceres Seq. ID no. 12678062
  misc_feature (208)..(505): Pfam Name: Pectinesterase Pfam Description: Pectinesterase
  misc_feature (1)..(521): Homolog of NCBI NO: 30690925 NR Description: pectinesterase family [Arabidopsis thaliana]
  misc_feature (6)..(519): Homolog of NCBI NO: 14190429 NR Description: AT4g33220/F4I10_150 [Arabidopsis thaliana]
  misc_feature (4)..(519): Homolog of NCBI NO: 15081598 NR Description: pectin methylesterase PME1 [Vitis vinifera]
  misc_feature (10)..(517): Homolog of NCBI NO: 6093744 NR Description: Pectinesterase PPE8B precursor (Pectin
  misc_feature (66)..(519): Homolog of NCBI NO: 7447375 NR Description: pectinesterase homolog F4I10.150 - Arabidopsis
  misc_feature (1)..(518): Homolog of NCBI NO: 33520429 NR Description: pectinesterase [Fragaria x ananassa]
  misc_feature (1)..(292): Homolog of NCBI NO: 17529128 NR Description: putative pectinesterase [Arabidopsis thaliana]
  misc_feature (128)..(519): Homolog of NCBI NO: 18418172 NR Description: pectinesterase family; protein id: At4g33220.1,
  misc_feature (68)..(521): Homolog of NCBI NO: 15230020 NR Description: pectinesterase family; protein id: At3g05620.1 thaliana] >gi|6714448|gb|AAF26135.1|AC011620_11 putative
  misc_feature (70)..(519): Homolog of NCBI NO: 24250746 NR Description: putative thermostable pectinesterase [Citrus >gi|24250751|gb|AAK84486.1| putative thermostable pectinesterase
MGSSIFFLFLIIISLCSAHKEAFSSTDLVQMECLRVPPLEFAEAAKTVVDAITKAVAIVSKFDKKAGKSRVSNAIVDCVDLLDSAAEELSWIISASQSPNGKDNSTGDVGSDLRTWISAALSNQDTCLDGFEGTNGIIKKIVAGGLSKVGTTVRNLLTMVHSPPSKPKPKPIKAQTMTKAHSGFSKFPSWVKPGDRKLLQTDNITVADAVVAADGTGNFTTISDAVLAAPDYSTKRYVIHVKRGVYVENVEIKKKKWNIMMVGDGIDATVITGNRSFIDGWTTFRSATFAVSGRGFIARDITFQNTAGPEKHQAVAIRSDTDLGVFYRCAMRGYQDTLYAHSMRQFFRECIITGTVDFIFGDATAVFQSCQIKAKQGLPNQKNSITAQGRKDPNEPTGFTIQFSNIAADTDLLLNLNTTATYLGRPWKLYSRTVFMQNYMSDAINPVGWLEWNGNFALDTLYYGEYMNSGPGASLDRRVKWPGYHVLNTSAEANNFTVSQLIQGNLWLPSTGITFIAGLVS

SEQ ID NO: 84959 - protein, 491 aa, Arabidopsis thaliana
  peptide (1)..(491): Ceres Seq. ID no. 12678063
  misc_feature (178)..(475): Pfam Name: Pectinesterase Pfam Description: Pectinesterase
  misc_feature (1)..(491): Homolog of NCBI NO: 30690925 NR Description: pectinesterase family [Arabidopsis thaliana]
  misc_feature (1)..(489): Homolog of NCBI NO: 14190429 NR Description: AT4g33220/F4I10_150 [Arabidopsis thaliana]
  misc_feature (1)..(489): Homolog of NCBI NO: 15081598 NR Description: pectin methylesterase PME1 [Vitis vinifera]
  misc_feature (1)..(487): Homolog of NCBI NO: 6093744 NR Description: Pectinesterase PPE8B precursor (Pectin
  misc_feature (36)..(489): Homolog of NCBI NO: 7447375 NR Description: pectinesterase homolog F4I10.150 - Arabidopsis
  misc_feature (1)..(488): Homolog of NCBI NO: 33520429 NR Description: pectinesterase [Fragaria x ananassa]
  misc_feature (1)..(262): Homolog of NCBI NO: 17529128 NR Description: putative pectinesterase [Arabidopsis thaliana]
  misc_feature (98)..(489): Homolog of NCBI NO: 18418172 NR Description: pectinesterase family; protein id: At4g33220.1,
  misc_feature (38)..(491): Homolog of NCBI NO: 15230020 NR Description: pectinesterase family; protein id: At3g05620.1 thaliana] >gi|6714448|gb|AAF26135.1|AC011620_11 putative
  misc_feature (40)..(489): Homolog of NCBI NO: 24250746 NR Description: putative thermostable pectinesterase [Citrus >gi|24250751|gb|AAK84486.1| putative thermostable pectinesterase
MECLRVPPLEFAEAAKTVVDAITKAVAIVSKFDKKAGKSRVSNAIVDCVDLLDSAAEELSWIISASQSPNGKDNSTGDVGSDLRTWISAALSNQDTCLDGFEGTNGIIKKIVAGGLSKVGTTVRNLLTMVHSPPSKPKPKPIKAQTMTKAHSGFSKFPSWVKPGDRKLLQTDNITVADAVVAADGTGNFTTISDAVLAAPDYSTKRYVIHVKRGVYVENVEIKKKKWNIMMVGDGIDATVITGNRSFIDGWTTFRSATFAVSGRGFIARDITFQNTAGPEKHQAVAIRSDTDLGVFYRCAMRGYQDTLYAHSMRQFFRECIITGTVDFIFGDATAVFQSCQIKAKQGLPNQKNSITAQGRKDPNEPTGFTIQFSNIAADTDLLLNLNTTATYLGRPWKLYSRTVFMQNYMSDAINPVGWLEWNGNFALDTLYYGEYMNSGPGASLDRRVKWPGYHVLNTSAEANNFTVSQLIQGNLWLPSTGITFIAGLVS

SEQ ID NO: 84960 - DNA, 3193 bp, Arabidopsis thaliana
  misc_feature (1)..(3193): Ceres Seq. ID no. 12678064
  misc_feature: MA Experiment ID: 20000315 Result: Down-regulated in Transcription
  misc_feature: MA Experiment 20000315 PARAMETER Experiment Name: At_14day_Shoots-Roots_Sub_P Parameter: Age (day) Value: 14
  misc_feature: MA Experiment 20000315 PARAMETER Experiment Name: At_14day_Shoots-Roots_Sub_P Parameter: Organism Value: A. thaliana
  misc_feature: MA Experiment 20000315 PARAMETER Experiment Name: At_14day_Shoots-Roots_Sub_P Parameter: Plant Line Value: WS
  misc_feature: MA Experiment 20000315 PARAMETER Experiment Name: At_14day_Shoots-Roots_Sub_P Parameter: Tissue Value: Shoots vs. Whole Plant
caaagtaaaaagaagaagaagacgaagaagaagaaagtagcaagaaaatagtttccgttacacattctctgctttcgattttgcctctgcgaaaacaaatccctaatcatctccaccatcttctcatcgatttgattttctccggcgaatcatccgtccgtcgtcgaccaccaccgccgcgttttctttctccgacgtgttccctctgttaagtcccttcttctctaagatgatgggacctccgagaactccgttaagtaagatagataagtccaatccttatactccatgtggttccaaagttacagaggagaagattcttgtcactgttcggatgagaccattaaattggagggaacatgccaaatatgatctcattgcttgggaatgtcccgatgatgagactatcgtctttaagaatccgaatcctgacaaggctccaacaaaatattcatttgataaagtttttgagccaacttgtgcaactcaagaggtgtatgaaggtggttctagggacgttgcactatctgcattagcaggaacaaatgcaactatttttgcttatggtcagactagtagtggcaagacgtttacaatgaggggggttactgaaagtgttgttaaagatatatacgaacatataagaaaaactcaagaaaggagctttgtcttgaaagtatctgctttggagatttataacgagaccgtggttgaccttttaaatcgtgatactgggccccttagactgttagatgatccagagaaaggaaccattgtggaaaatctggtggaggaagtggtagaaagcaggcaacatttacagcatttaattagcatttgtgaagatcaaaggcaagtaggtgaaactgctttaaacgacaaaagttcaagatcgcatcagattattcggctgaccatccatagcagtctcagggaaatagcaggctgtgtgcagtctttcatggcaactctgaatcttgttgatcttgctggaagcgaacgtgcttttcaaacaaacgcagatggtctaagattgaaggaaggaagccacattaaccgtagtttattgacacttactacagtgatcagaaaactgagttctggaagaaaaagggatcacgtgccgtatagagactcaaagctgacaagaattttgcaaaattcacttggcgggaatgctagaacagcaattatatgtacgattagtccggcactgagtcatgttgaacagacaaaaaagacactttcttttgccatgagtgcgaaggaagtcaccaattgcgctaaagtaaacatggttgtctcagaaaaaaagctgctgaaacatctgcagcaaaaagtagctaaactcgagtcagagttaagaagcccggagcccagttcatccacctgcttaaagtctctgttaattgagaaagagatgaaaatccaacagatggaatccgaaatgaaagagctaaagcgtcagagagacattgcacagtctgaacttgatctagaaagaaaagcaaaggagcggaagggatcaagtgagtgtgaacctttttctcaagtggcaaggtgtctctcataccatacaaaggaggaatccattccaagcaaatctgttccgtcaagccgcagaacagctcgtgataggagaaaggataatgtgaggcagtctttaacttcggcggatccaacagcgctagtccaagaaattcgtttgcttgaaaaacatcaaaagaagttgggtgaagaagcaaaccaagcactggatctaattcacaaagaagtgacatcccataaactgggtgatcaacaagctgcagaaaaagttgcgaaaatgctgtcagaaatcagggacatgcagaagagcaaccttttaactgaggaaattgtagttggtgataaagccaacctgaaggaagaaataaatcggttgaattctcaagaaattgcagctttggagaagaagctagagtgtgttcagaacactattgacatgcttgtctcgtcttttcagacagatgaacagactccagatttcaggacccaggtgaaaaagaagagacttcttcccttcggcttaagtaatagtcctaacctacagcatatgatccggggaccatgttcacctctttctgggactgaaaataaggatcctgagagcaatgttgtgtctgctaattcagccccagtgtcttttggagctactccaccaaagagggatgataaccgatgtcgtacacagtcaagggaaggaacgcctgtatcacgacaagcaaattcagtcgatattaagagaatgaatcgaatgtataagaatgctgccgaagagaatatacgtaatatcaaatcttatgttactggattgaaagaacgtgtggcgaagcttcaataccagaagcagctgcttgtttgccaggtgttagaactggaggcaaacgagacaggcgctgcttcggagtacgatgcaaccgatgaatctcagatggattggccattgtgttttgaagagcagagaaagcaaatcataatgttatggcatctgtgccacatttcaatcattcacagaacacaattctacatgttattcaaaggagacccagctgatcaaatctacatggaggttgagctccgcaggctgacatggctcgaacagcacttggctgagcttgggaatgcgagtcctgcattgcttggtgatgaaccagcaagctacgtagcatcgagtataagagctttgaagcaggagagagagtatttggcgaaacgggtaaacacaaagctaggagcagaggaaagagagatgctatacctgaaatgggatgtcccgccggtgggaaaacagaggagacaacagttcatcaacaaactctggacagatcctcacaacatgcaacacgtgagagagagtgcggagatcgtggctaagcttgtcggattctgtgactcgggagagaccataaggaaagaaatgtttgagctcaactttgcatctccttcagataagaagacttggatgatgggttggaacttcatatccaacttgttgcatctctagctgttgtaccctcctataaatcctacacgtctacttttctctgtttgtaaatcgttaacttcaaaactcttttgatgctgaatagagagtgtgattcacacgacctgtgaaaaccctctttttaaaatcctaaccatatgatcatct

SEQ ID NO: 84961 - protein, 938 aa, Arabidopsis thaliana
  peptide (1)..(938): Ceres Seq. ID no. 12678065
  misc_feature (367)..(751): Pfam Name: Myosin tail Pfam Description: Myosin tail
  misc_feature (1)..(938): Homolog of NCBI NO: 19570249 NR Description: kinesin-like protein NACK2 [Nicotiana tabacum]
  misc_feature (4)..(936): Homolog of NCBI NO: 34914660 NR Description: putative kinesin [Oryza sativa (japonica
  misc_feature (5)..(749): Homolog of NCBI NO: 19570247 NR Description: kinesin-like protein NACK1 [Nicotiana tabacum]
  misc_feature (188)..(928): Homolog of NCBI NO: 15208449 NR Description: kinesin heavy chain [Zea mays]
  misc_feature (5)..(722): Homolog of NCBI NO: 22329653 NR Description: kinesin heavy chain isolog, putative; protein id:
  misc_feature (22)..(466): Homolog of NCBI NO: 30698217 NR Description: kinesin heavy chain DNA binding protein-related
  misc_feature (746)..(924): Homolog of NCBI NO: 30698217 NR Description: kinesin heavy chain DNA binding protein-related
  misc_feature (22)..(425): Homolog of NCBI NO: 30693419 NR Description: expressed protein [Arabidopsis thaliana]
  misc_feature (749)..(924): Homolog of NCBI NO: 30693419 NR Description: expressed protein [Arabidopsis thaliana]
  misc_feature (27)..(697): Homolog of NCBI NO: 18416291 NR Description: putative protein; protein id: At4g24170.1
MMGPPRTPLSKIDKSNPYTPCGSKVTEEKILVTVRMRPLNWREHAKYDLIAWECPDDETIVFKNPNPDKAPTKYSFDKVFEPTCATQEVYEGGSRDVALSALAGTNATIFAYGQTSSGKTFTMRGVTESVVKDIYEHIRKTQERSFVLKVSALEIYNETVVDLLNRDTGPLRLLDDPEKGTIVENLVEEVVESRQHLQHLISICEDQRQVGETALNDKSSRSHQIIRLTIHSSLREIAGCVQSFMATLNLVDLAGSERAFQTNADGLRLKEGSHINRSLLTLTTVIRKLSSGRKRDHVPYRDSKLTRILQNSLGGNARTAIICTISPALSHVEQTKKTLSFAMSAKEVTNCAKVNMVVSEKKLLKHLQQKVAKLESELRSPEPSSSTCLKSLLIEKEMKIQQMESEMKELKRQRDIAQSELDLERKAKERKGSSECEPFSQVARCLSYHTKEESIPSKSVPSSRRTARDRRKDNVRQSLTSADPTALVQEIRLLEKHQKKLGEEANQALDLIHKEVTSHKLGDQQAAEKVAKMLSEIRDMQKSNLLTEEIVVGDKANLKEEINRLNSQEIAALEKKLECVQNTIDMLVSSFQTDEQTPDFRTQVKKKRLLPFGLSNSPNLQHMIRGPCSPLSGTENKDPESNVVSANSAPVSFGATPPKRDDNRCRTQSREGTPVSRQANSVDIKRMNRMYKNAAEENIRNIKSYVTGLKERVAKLQYQKQLLVCQVLELEANETGAASEYDATDESQMDWPLCFEEQRKQIIMLWHLCHISIIHRTQFYMLFKGDPADQIYMEVELRRLTWLEQHLAELGNASPALLGDEPASYVASSIRALKQEREYLAKRVNTKLGAEEREMLYLKWDVPPVGKQRRQQFINKLWTDPHNMQHVRESAEIVAKLVGFCDSGETIRKEMFELNFASPSDKKTWMMGWNFISNLLHL

SEQ ID NO: 84962 - protein, 937 aa, Arabidopsis thaliana
  peptide (1)..(937): Ceres Seq. ID no. 12678066
  misc_feature (366)..(750): Pfam Name: Myosin tail Pfam Description: Myosin tail
  misc_feature (1)..(937): Homolog of NCBI NO: 19570249 NR Description: kinesin-like protein NACK2 [Nicotiana tabacum]
  misc_feature (3)..(935): Homolog of NCBI NO: 34914660 NR Description: putative kinesin [Oryza sativa (japonica
  misc_feature (4)..(748): Homolog of NCBI NO: 19570247 NR Description: kinesin-like protein NACK1 [Nicotiana tabacum]
  misc_feature (187)..(927): Homolog of NCBI NO: 15208449 NR Description: kinesin heavy chain [Zea mays]
  misc_feature (4)..(721): Homolog of NCBI NO: 22329653 NR Description: kinesin heavy chain isolog, putative; protein id:
  misc_feature (21)..(465): Homolog of NCBI NO: 30698217 NR Description: kinesin heavy chain DNA binding protein-related
  misc_feature (745)..(923): Homolog of NCBI NO: 30698217 NR Description: kinesin heavy chain DNA binding protein-related
  misc_feature (21)..(424): Homolog of NCBI NO: 30693419 NR Description: expressed protein [Arabidopsis thaliana]
  misc_feature (748)..(923): Homolog of NCBI NO: 30693419 NR Description: expressed protein [Arabidopsis thaliana]
  misc_feature (26)..(696): Homolog of NCBI NO: 18416291 NR Description: putative protein; protein id: At4g24170.1
MGPPRTPLSKIDKSNPYTPCGSKVTEEKILVTVRMRPLNWREHAKYDLIAWECPDDETIVFKNPNPDKAPTKYSFDKVFEPTCATQEVYEGGSRDVALSALAGTNATIFAYGQTSSGKTFTMRGVTESVVKDIYEHIRKTQERSFVLKVSALEIYNETVVDLLNRDTGPLRLLDDPEKGTIVENLVEEVVESRQHLQHLISICEDQRQVGETALNDKSSRSHQIIRLTIHSSLREIAGCVQSFMATLNLVDLAGSERAFQTNADGLRLKEGSHINRSLLTLTTVIRKLSSGRKRDHVPYRDSKLTRILQNSLGGNARTAIICTISPALSHVEQTKKTLSFAMSAKEVTNCAKVNMVVSEKKLLKHLQQKVAKLESELRSPEPSSSTCLKSLLIEKEMKIQQMESEMKELKRQRDIAQSELDLERKAKERKGSSECEPFSQVARCLSYHTKEESIPSKSVPSSRRTARDRRKDNVRQSLTSADPTALVQEIRLLEKHQKKLGEEANQALDLIHKEVTSHKLGDQQAAEKVAKMLSEIRDMQKSNLLTEEIVVGDKANLKEEINRLNSQEIAALEKKLECVQNTIDMLVSSFQTDEQTPDFRTQVKKKRLLPFGLSNSPNLQHMIRGPCSPLSGTENKDPESNVVSANSAPVSFGATPPKRDDNRCRTQSREGTPVSRQANSVDIKRMNRMYKNAAEENIRNIKSYVTGLKERVAKLQYQKQLLVCQVLELEANETGAASEYDATDESQMDWPLCFEEQRKQIIMLWHLCHISIIHRTQFYMLFKGDPADQIYMEVELRRLTWLEQHLAELGNASPALLGDEPASYVASSIRALKQEREYLAKRVNTKLGAEEREMLYLKWDVPPVGKQRRQQFINKLWTDPHNMQHVRESAEIVAKLVGFCDSGETIRKEMFELNFASPSDKKTWMMGWNFISNLLHL

SEQ ID NO: 84963 - protein, 903 aa, Arabidopsis thaliana
  peptide (1)..(903): Ceres Seq. ID no. 12678067
  misc_feature (332)..(716): Pfam Name: Myosin tail Pfam Description: Myosin tail
  misc_feature (1)..(903): Homolog of NCBI NO: 19570249 NR Description: kinesin-like protein NACK2 [Nicotiana tabacum]
  misc_feature (1)..(901): Homolog of NCBI NO: 34914660 NR Description: putative kinesin [Oryza sativa (japonica
  misc_feature (1)..(714): Homolog of NCBI NO: 19570247 NR Description: kinesin-like protein NACK1 [Nicotiana tabacum]
  misc_feature (153)..(893): Homolog of NCBI NO: 15208449 NR Description: kinesin heavy chain [Zea mays]
  misc_feature (1)..(687): Homolog of NCBI NO: 22329653 NR Description: kinesin heavy chain isolog, putative; protein id:
  misc_feature (1)..(431): Homolog of NCBI NO: 30698217 NR Description: kinesin heavy chain DNA binding protein-related
  misc_feature (711)..(889): Homolog of NCBI NO: 30698217 NR Description: kinesin heavy chain DNA binding protein-related
  misc_feature (1)..(390): Homolog of NCBI NO: 30693419 NR Description: expressed protein [Arabidopsis thaliana]
  misc_feature (714)..(889): Homolog of NCBI NO: 30693419 NR Description: expressed protein [Arabidopsis thaliana]
  misc_feature (1)..(662): Homolog of NCBI NO: 18416291 NR Description: putative protein; protein id: At4g24170.1
MRPLNWREHAKYDLIAWECPDDETIVFKNPNPDKAPTKYSFDKVFEPTCATQEVYEGGSRDVALSALAGTNATIFAYGQTSSGKTFTMRGVTESVVKDIYEHIRKTQERSFVLKVSALEIYNETVVDLLNRDTGPLRLLDDPEKGTIVENLVEEVVESRQHLQHLISICEDQRQVGETALNDKSSRSHQIIRLTIHSSLREIAGCVQSFMATLNLVDLAGSERAFQTNADGLRLKEGSHINRSLLTLTTVIRKLSSGRKRDHVPYRDSKLTRILQNSLGGNARTAIICTISPALSHVEQTKKTLSFAMSAKEVTNCAKVNMVVSEKKLLKHLQQKVAKLESELRSPEPSSSTCLKSLLIEKEMKIQQMESEMKELKRQRDIAQSELDLERKAKERKGSSECEPFSQVARCLSYHTKEESIPSKSVPSSRRTARDRRKDNVRQSLTSADPTALVQEIRLLEKHQKKLGEEANQALDLIHKEVTSHKLGDQQAAEKVAKMLSEIRDMQKSNLLTEEIVVGDKANLKEEINRLNSQEIAALEKKLECVQNTIDMLVSSFQTDEQTPDFRTQVKKKRLLPFGLSNSPNLQHMIRGPCSPLSGTENKDPESNVVSANSAPVSFGATPPKRDDNRCRTQSREGTPVSRQANSVDIKRMNRMYKNAAEENIRNIKSYVTGLKERVAKLQYQKQLLVCQVLELEANETGAASEYDATDESQMDWPLCFEEQRKQIIMLWHLCHISIIHRTQFYMLFKGDPADQIYMEVELRRLTWLEQHLAELGNASPALLGDEPASYVASSIRALKQEREYLAKRVNTKLGAEEREMLYLKWDVPPVGKQRRQQFINKLWTDPHNMQHVRESAEIVAKLVGFCDSGETIRKEMFELNFASPSDKKTWMMGWNFISNLLHL

SEQ ID NO: 84964 - DNA, 2833 bp, Arabidopsis thaliana
  misc_feature (1)..(2833): Ceres Seq. ID no. 12678068
  misc_feature: MA Experiment ID: 20000315 Result: Down-regulated in Transcription
  misc_feature: MA Experiment 20000315 PARAMETER Experiment Name: At_14day_Shoots-Roots_Sub_P Parameter: Age (day) Value: 14
  misc_feature: MA Experiment 20000315 PARAMETER Experiment Name: At_14day_Shoots-Roots_Sub_P Parameter: Organism Value: A. thaliana
  misc_feature: MA Experiment 20000315 PARAMETER Experiment Name: At_14day_Shoots-Roots_Sub_P Parameter: Plant Line Value: WS
  misc_feature: MA Experiment 20000315 PARAMETER Experiment Name: At_14day_Shoots-Roots_Sub_P Parameter: Tissue Value: Shoots vs. Whole Plant
attttgtgtgtagaagatgatgggacctccgagaactccgttaagtaagatagataagtccaatccttatactccatgtggttccaaagttacagaggagaagattcttgtcactgttcggatgagaccattaaattggagggaacatgccaaatatgatctcattgcttgggaatgtcccgatgatgagactatcgtctttaagaatccgaatcctgacaaggctccaacaaaatattcatttgataaagtttttgagccaacttgtgcaactcaagaggtgtatgaaggtggttctagggacgttgcactatctgcattagcaggaacaaatgcaactatttttgcttatggtcagactagtagtggcaagacgtttacaatgaggggggttactgaaagtgttgttaaagatatatacgaacatataagaaaaactcaagaaaggagctttgtcttgaaagtatctgctttggagatttataacgagaccgtggttgaccttttaaatcgtgatactgggccccttagactgttagatgatccagagaaaggaaccattgtggaaaatctggtggaggaagtggtagaaagcaggcaacatttacagcatttaattagcatttgtgaagatcaaaggcaagtaggtgaaactgctttaaacgacaaaagttcaagatcgcatcagattattcggctgaccatccatagcagtctcagggaaatagcaggctgtgtgcagtctttcatggcaactctgaatcttgttgatcttgctggaagcgaacgtgcttttcaaacaaacgcagatggtctaagattgaaggaaggaagccacattaaccgtagtttattgacacttactacagtgatcagaaaactgagttctggaagaaaaagggatcacgtgccgtatagagactcaaagctgacaagaattttgcaaaattcacttggcgggaatgctagaacagcaattatatgtacgattagtccggcactgagtcatgttgaacagacaaaaaagacactttcttttgccatgagtgcgaaggaagtcaccaattgcgctaaagtaaacatggttgtctcagaaaaaaagctgctgaaacatctgcagcaaaaagtagctaaactcgagtcagagttaagaagcccggagcccagttcatccacctgcttaaagtctctgttaattgagaaagagatgaaaatccaacagatggaatccgaaatgaaagagctaaagcgtcagagagacattgcacagtctgaacttgatctagaaagaaaagcaaaggagcggaagggatcaagtgagtgtgaacctttttctcaagtggcaaggtgtctctcataccatacaaaggaggaatccattccaagcaaatctgttccgtcaagccgcagaacagctcgtgataggagaaaggataatgtgaggcagtctttaacttcggcggatccaacagcgctagtccaagaaattcgtttgcttgaaaaacatcaaaagaagttgggtgaagaagcaaaccaagcactggatctaattcacaaagaagtgacatcccataaactgggtgatcaacaagctgcagaaaaagttgcgaaaatgctgtcagaaatcagggacatgcagaagagcaaccttttaactgaggaaattgtagttggtgataaagccaacctgaaggaagaaataaatcggttgaattctcaagaaattgcagctttggagaagaagctagagtgtgttcagaacactattgacatgcttgtctcgtcttttcagacagatgaacagactccagatttcaggacccaggtgaaaaagaagagacttcttcccttcggcttaagtaatagtcctaacctacagcatatgatccggggaccatgttcacctctttctgggactgaaaataaggatcctgagagcaatgttgtgtctgctaattcagccccagtgtcttttggagctactccaccaaagagggatgataaccgatgtcgtacacagtcaagggaaggaacgcctgtatcacgacaagcaaattcagtcgatattaagagaatgaatcgaatgtataagaatgctgccgaagagaatatacgtaatatcaaatcttatgttactggattgaaagaacgtgtggcgaagcttcaataccagaagcagctgcttgtttgccaggtgttagaactggaggcaaacgagacaggcgctgcttcggagtacgatgcaaccgatgaatctcagatggattggccattgtgttttgaagagcagagaaagcaaatcataatgttatggcatctgtgccacatttcaatcattcacagaacacaattctacatgttattcaaaggagacccagctgatcaaatctacatggaggttgagctccgcaggctgacatggctcgaacagcacttggctgagcttgggaatgcgagtcctgcattgcttggtgatgaaccagcaagctacgtagcatcgagtataagagctttgaagcaggagagagagtatttggcgaaacgggtaaacacaaagctaggagcagaggaaagagagatgctatacctgaaatgggatgtcccgccggtgggaaaacagaggagacaacagttcatcaacaaactctggacagatcctcacaacatgcaacacgtgagagagagtgcggagatcgtggctaagcttgtcggattctgtgactcgggagagaccataaggaaagaaatgtttgagctcaactttgcatctccttcagataagaagacttggatgatgggttggaacttcatatccaacttgttgcatctctag

SEQ ID NO: 84965 - protein, 938 aa, Arabidopsis thaliana; identical to SEQ ID NO: 84961
  peptide (1)..(938): Ceres Seq. ID no. 12678069
  misc_feature (367)..(751): Pfam Name: Myosin tail Pfam Description: Myosin tail
  misc_feature (6)..(938): Homolog of NCBI NO: 19570249 NR Description: kinesin-like protein NACK2 [Nicotiana tabacum]
  misc_feature (4)..(936): Homolog of NCBI NO: 34914660 NR Description: putative kinesin [Oryza sativa (japonica
  misc_feature (5)..(749): Homolog of NCBI NO: 19570247 NR Description: kinesin-like protein NACK1 [Nicotiana tabacum]
  misc_feature (188)..(928): Homolog of NCBI NO: 15208449 NR Description: kinesin heavy chain [Zea mays]
  misc_feature (5)..(722): Homolog of NCBI NO: 22329653 NR Description: kinesin heavy chain isolog, putative; protein id:
  misc_feature (22)..(466): Homolog of NCBI NO: 30698217 NR Description: kinesin heavy chain DNA binding protein-related
  misc_feature (746)..(924): Homolog of NCBI NO: 30698217 NR Description: kinesin heavy chain DNA binding protein-related
  misc_feature (22)..(425): Homolog of NCBI NO: 30693419 NR Description: expressed protein [Arabidopsis thaliana]
  misc_feature (749)..(924): Homolog of NCBI NO: 30693419 NR Description: expressed protein [Arabidopsis thaliana]
  misc_feature (27)..(697): Homolog of NCBI NO: 18416291 NR Description: putative protein; protein id: At4g24170.1

SEQ ID NO: 84966 - protein, 937 aa, Arabidopsis thaliana; identical to SEQ ID NO: 84962
  peptide (1)..(937): Ceres Seq. ID no. 12678070
  misc_feature (366)..(750): Pfam Name: Myosin tail Pfam Description: Myosin tail
  misc_feature (5)..(937): Homolog of NCBI NO: 19570249 NR Description: kinesin-like protein NACK2 [Nicotiana tabacum]
  misc_feature (3)..(935): Homolog of NCBI NO: 34914660 NR Description: putative kinesin [Oryza sativa (japonica
  misc_feature (4)..(748): Homolog of NCBI NO: 19570247 NR Description: kinesin-like protein NACK1 [Nicotiana tabacum]
  misc_feature (187)..(927): Homolog of NCBI NO: 15208449 NR Description: kinesin heavy chain [Zea mays]
  misc_feature (4)..(721): Homolog of NCBI NO: 22329653 NR Description: kinesin heavy chain isolog, putative; protein id:
  misc_feature (21)..(465): Homolog of NCBI NO: 30698217 NR Description: kinesin heavy chain DNA binding protein-related
  misc_feature (745)..(923): Homolog of NCBI NO: 30698217 NR Description: kinesin heavy chain DNA binding protein-related
  misc_feature (21)..(424): Homolog of NCBI NO: 30693419 NR Description: expressed protein [Arabidopsis thaliana]
  misc_feature (748)..(923): Homolog of NCBI NO: 30693419 NR Description: expressed protein [Arabidopsis thaliana]
  misc_feature (26)..(696): Homolog of NCBI NO: 18416291 NR Description: putative protein; protein id: At4g24170.1

SEQ ID NO: 84967 - protein, 903 aa, Arabidopsis thaliana; identical to SEQ ID NO: 84963
  peptide (1)..(903): Ceres Seq. ID no. 12678071
  misc_feature (332)..(716): Pfam Name: Myosin tail Pfam Description: Myosin tail
  misc_feature (1)..(903): Homolog of NCBI NO: 19570249 NR Description: kinesin-like protein NACK2 [Nicotiana tabacum]
  misc_feature (1)..(901): Homolog of NCBI NO: 34914660 NR Description: putative kinesin [Oryza sativa (japonica
  misc_feature (1)..(714): Homolog of NCBI NO: 19570247 NR Description: kinesin-like protein NACK1 [Nicotiana tabacum]
  misc_feature (153)..(893): Homolog of NCBI NO: 15208449 NR Description: kinesin heavy chain [Zea mays]
  misc_feature (1)..(687): Homolog of NCBI NO: 22329653 NR Description: kinesin heavy chain isolog, putative; protein id:
  misc_feature (1)..(431): Homolog of NCBI NO: 30698217 NR Description: kinesin heavy chain DNA binding protein-related
  misc_feature (711)..(889): Homolog of NCBI NO: 30698217 NR Description: kinesin heavy chain DNA binding protein-related
  misc_feature (1)..(390): Homolog of NCBI NO: 30693419 NR Description: expressed protein [Arabidopsis thaliana]
  misc_feature (714)..(889): Homolog of NCBI NO: 30693419 NR Description: expressed protein [Arabidopsis thaliana]
  misc_feature (1)..(662): Homolog of NCBI NO: 18416291 NR Description: putative protein; protein id: At4g24170.1

SEQ ID NO: 84968 - DNA, 960 bp, Arabidopsis thaliana
  misc_feature (1)..(960): Ceres Seq. ID no. 12678121
  misc_feature: MA Experiment ID: 20000439 Result: Down-regulated in Transcription
  misc_feature: MA Experiment 20000439 PARAMETER Experiment Name: At_Roots__P Parameter: Age (day) Value: 14 vs. 21
  misc_feature: MA Experiment 20000439 PARAMETER Experiment Name: At_Roots__P Parameter: Organism Value: A. thaliana
  misc_feature: MA Experiment 20000439 PARAMETER Experiment Name: At_Roots__P Parameter: Tissue Value: Roots vs. Whole Plant
  misc_feature: MA Experiment ID: 20000495 Result: Down-regulated in Transcription
  misc_feature: MA Experiment 20000495 PARAMETER Experiment Name: At_Guard_Cells_P Parameter: Harvest Date Value: 8/2/2002
  misc_feature: MA Experiment 20000495 PARAMETER Experiment Name: At_Guard_Cells_P Parameter: Organism Value: A. thaliana
  misc_feature: MA Experiment 20000495 PARAMETER Experiment Name: At_Guard_Cells_P Parameter: Tissue Value: Guard Cells vs. Leaves
  misc_feature: MA Experiment ID: 20000496 Result: Up-regulated in Transcription
  misc_feature: MA Experiment 20000496 PARAMETER Experiment Name: At_Guard_Cells_P Parameter: Harvest Date Value: 7/19/2002
  misc_feature: MA Experiment 20000496 PARAMETER Experiment Name: At_Guard_Cells_P Parameter: Organism Value: Canola
  misc_feature: MA Experiment 20000496 PARAMETER Experiment Name: At_Guard_Cells_P Parameter: Tissue Value: Guard Cells vs. Leaves
  misc_feature: MA Experiment ID: 20001911 Result: Down-regulated in Transcription
  misc_feature: MA Experiment 20001911 PARAMETER Experiment Name: At_Drought_Reproduction_P Parameter: Age (day) Value: 40
  misc_feature: MA Experiment 20001911 PARAMETER Experiment Name: At_Drought_Reproduction_P Parameter: Organism Value: A. thaliana
  misc_feature: MA Experiment 20001911 PARAMETER Experiment Name: At_Drought_Reproduction_P Parameter: Plant Line Value: WS
  misc_feature: MA Experiment 20001911 PARAMETER Experiment Name: At_Drought_Reproduction_P Parameter: Timepoint (day) Value: 10
  misc_feature: MA Experiment 20001911 PARAMETER Experiment Name: At_Drought_Reproduction_P Parameter: Tissue Value: Flowers
  misc_feature: MA Experiment 20001911 PARAMETER Experiment Name: At_Drought_Reproduction_P Parameter: Treatment Value: Drought vs. No Drought
agaagtggaaagccaacggatgactcatatcgcggtcgaaagaaaccgtaggaagcaaatgaatgagcatcttcgtgtccttagatctctcatgcctggctcctacgttcaaaggggagaccaagcgtcaatcataggaggagcaatagagtttgtgagagagctcgagcaactcctacaatgtcttgaatcacagaagcgtcgaagaatcttaggagaaaccggtagggacatgacaacgacaacgacttcttcttcttctcccataactacggtagcgaaccaagcacaaccgctcattattacgggaaatgtaaccgagctagagggcggaggagggcttcgggaggagactgcggagaacaagtcgtgcttggctgacgtggaggtgaagctgctagggtttgacgccatgatcaagatactttcaagaagaaggccgggacagctgattaagactatagctgctttggaggatcttcatctctctattcttcacactaacatcactaccatggaacaaaccgtcctctactcctttaatgtcaagataacaagtgaaacgaggtttacggcagaagacatagcaagttccatccaacagatatttagtttcattcatgcaaataccaacatatctggaagctctaacctgggaaatattgtgtttacttgaaaatcatcacacggcgacaactttgtacactggtgaagattacagtacgtaataatctctacatattgggttttattctccaagcatttggaagagtgtttaagttaaagggagtgcttactttatttttttggggcttttttcatgcaatttaaattttagtgatgattgtgtcgcttgtaatgttagaactcgttgttgtgatttctgctgctttgatttgtaggttttgaacaagcggtttagaatgctaaaccacttatttacttgaaataacttttttc

SEQ ID NO: 84969 - protein, 224 aa, Arabidopsis thaliana
  peptide (1)..(224): Ceres Seq. ID no. 12678122
  misc_feature (5)..(56): Pfam Name: Helix-loop-helix DNA-binding domain Pfam Description: Helix-loop-helix DNA-binding domain
  misc_feature (1)..(224): Homolog of NCBI NO: 30687365 NR Description: bHLH protein family [Arabidopsis thaliana]
  misc_feature (1)..(183): Homolog of NCBI NO: 11994233 NR Description: contains similarity to helix-loop-helix
  misc_feature (5)..(203): Homolog of NCBI NO: 15238680 NR Description: bHLH protein; protein id: At5g53210.1
  misc_feature (109)..(183): Homolog of NCBI NO: 38346722 NR Description: OSJNBa0086O06.20 [Oryza sativa (japonica
  misc_feature (1)..(71): Homolog of NCBI NO: 38346722 NR Description: OSJNBa0086O06.20 [Oryza sativa (japonica
  misc_feature (1)..(206): Homolog of NCBI NO: 34902426 NR Description: Unknown protein [Oryza sativa (japonica
  misc_feature (1)..(190): Homolog of NCBI NO: 28558779 NR Description: helix-loop-helix-like protein [Cucumis melo]
  misc_feature (1)..(216): Homolog of NCBI NO: 15234187 NR Description: bHLH protein; protein id: At4g01460.1, supported cDNA: gi_20127053, supported by cDNA: gi_20466627 [Arabidopsis
  misc_feature (1)..(213): Homolog of NCBI NO: 15218391 NR Description: bHLH protein; protein id: At1g72210.1
  misc_feature (1)..(210): Homolog of NCBI NO: 18395124 NR Description: expressed protein; protein id: At1g22490.1,
EVESQRMTHIAVERNRRKQMNEHLRVLRSLMPGSYVQRGDQASIIGGAIEFVRELEQLLQCLESQKRRRILGETGRDMTTTTTSSSSPITTVANQAQPLIITGNVTELEGGGGLREETAENKSCLADVEVKLLGFDAMIKILSRRRPGQLIKTIAALEDLHLSILHTNITTMEQTVLYSFNVKITSETRFTAEDIASSIQQIFSFIHANTNISGSSNLGNIVFT

SEQ ID NO: 84970 - protein, 218 aa, Arabidopsis thaliana
  peptide (1)..(218): Ceres Seq. ID no. 12678123
  misc_feature (1)..(50): Pfam Name: Helix-loop-helix DNA-binding domain Pfam Description: Helix-loop-helix DNA-binding domain
  misc_feature (1)..(218): Homolog of NCBI NO: 30687365 NR Description: bHLH protein family [Arabidopsis thaliana]
  misc_feature (1)..(177): Homolog of NCBI NO: 11994233 NR Description: contains similarity to helix-loop-helix
  misc_feature (1)..(197): Homolog of NCBI NO: 15238680 NR Description: bHLH protein; protein id: At5g53210.1
  misc_feature (103)..(177): Homolog of NCBI NO: 38346722 NR Description: OSJNBa0086O06.20 [Oryza sativa (japonica
  misc_feature (1)..(65): Homolog of NCBI NO: 38346722 NR Description: OSJNBa0086O06.20 [Oryza sativa (japonica
  misc_feature (1)..(200): Homolog of NCBI NO: 34902426 NR Description: Unknown protein [Oryza sativa (japonica
  misc_feature (1)..(184): Homolog of NCBI NO: 28558779 NR Description: helix-loop-helix-like protein [Cucumis melo]
  misc_feature (1)..(210): Homolog of NCBI NO: 15234187 NR Description: bHLH protein; protein id: At4g01460.1, supported cDNA: gi_20127053, supported by cDNA: gi_20466627 [Arabidopsis
  misc_feature (1)..(207): Homolog of NCBI NO: 15218391 NR Description: bHLH protein; protein id: At1g72210.1
  misc_feature (1)..(204): Homolog of NCBI NO: 18395124 NR Description: expressed protein; protein id: At1g22490.1,
MTHIAVERNRRKQMNEHLRVLRSLMPGSYVQRGDQASIIGGAIEFVRELEQLLQCLESQKRRRILGETGRDMTTTTTSSSSPITTVANQAQPLIITGNVTELEGGGGLREETAENKSCLADVEVKLLGFDAMIKILSRRRPGQLIKTIAALEDLHLSILHTNITTMEQTVLYSFNVKITSETRFTAEDIASSIQQIFSFIHANTNISGSSNLGNIVFT

SEQ ID NO: 84971 - protein, 205 aa, Arabidopsis thaliana
  peptide (1)..(205): Ceres Seq. ID no. 12678124
  misc_feature (1)..(37): Pfam Name: Helix-loop-helix DNA-binding domain Pfam Description: Helix-loop-helix DNA-binding domain
  misc_feature (1)..(205): Homolog of NCBI NO: 30687365 NR Description: bHLH protein family [Arabidopsis thaliana]
  misc_feature (1)..(164): Homolog of NCBI NO: 11994233 NR Description: contains similarity to helix-loop-helix
  misc_feature (1)..(184): Homolog of NCBI NO: 15238680 NR Description: bHLH protein; protein id: At5g53210.1
  misc_feature (90)..(164): Homolog of NCBI NO: 38346722 NR Description: OSJNBa0086O06.20 [Oryza sativa (japonica
  misc_feature (1)..(52): Homolog of NCBI NO: 38346722 NR Description: OSJNBa0086O06.20 [Oryza sativa (japonica
  misc_feature (1)..(187): Homolog of NCBI NO: 34902426 NR Description: Unknown protein [Oryza sativa (japonica
  misc_feature (1)..(171): Homolog of NCBI NO: 28558779 NR Description: helix-loop-helix-like protein [Cucumis melo]
  misc_feature (1)..(197): Homolog of NCBI NO: 15234187 NR Description: bHLH protein; protein id: At4g01460.1, supported cDNA: gi_20127053, supported by cDNA: gi_20466627 [Arabidopsis
  misc_feature (1)..(194): Homolog of NCBI NO: 15218391 NR Description: bHLH protein; protein id: At1g72210.1
  misc_feature (1)..(191): Homolog of NCBI NO: 18395124 NR Description: expressed protein; protein id: At1g22490.1,
MNEHLRVLRSLMPGSYVQRGDQASIIGGAIEFVRELEQLLQCLESQKRRRILGETGRDMTTTTTSSSSPITTVANQAQPLIITGNVTELEGGGGLREETAENKSCLADVEVKLLGFDAMIKILSRRRPGQLIKTIAALEDLHLSILHTNITTMEQTVLYSFNVKITSETRFTAEDIASSIQQIFSFIHANTNISGSSNLGNIVFT

SEQ ID NO: 84972 - DNA, 1820 bp, Arabidopsis thaliana
  misc_feature (1)..(1820): Ceres Seq. ID no. 12678129
  misc_feature: MA Experiment ID: 108434 Result: Down-regulated in Transcription
  misc_feature: MA Experiment 108434 PARAMETER Experiment Name: At_Root_Tips_cDNA_P Parameter: Tissue Value: Root Tips
  misc_feature: MA Experiment ID: 108435 Result: Up-regulated in Transcription
  misc_feature: MA Experiment 108435 PARAMETER Experiment Name: At_stm_Mutants_cDNA_P Parameter: Plant Line Value: wt Landsburg vs stm
  misc_feature: MA Experiment 108435 PARAMETER Experiment Name: At_stm_Mutants_cDNA_P Parameter: Tissue Value: Shoot Apical Meristem Region
  misc_feature: MA Experiment ID: 108561 Result: Up-regulated in Transcription
  misc_feature: MA Experiment 108561 PARAMETER Experiment Name: At_100uM_ABA_cDNA_P Parameter: Timepoint (hr) Value: 6
  misc_feature: MA Experiment 108561 PARAMETER Experiment Name: At_100uM_ABA_cDNA_P Parameter: Tissue Value: Aerial
  misc_feature: MA Experiment 108561 PARAMETER Experiment Name: At_100uM_ABA_cDNA_P Parameter: Treatment Value: 100uM ABA vs. No Treatment
  misc_feature: MA Experiment ID: 108573 Result: Up-regulated in Transcription
  misc_feature: MA Experiment 108573 PARAMETER Experiment Name: At_Drought_cDNA_P Parameter: Timepoint (hr) Value: 6
  misc_feature: MA Experiment 108573 PARAMETER Experiment Name: At_Drought_cDNA_P Parameter: Tissue Value: Aerial
  misc_feature: MA Experiment 108573 PARAMETER Experiment Name: At_Drought_cDNA_P Parameter: Treatment Value: Drought vs. No Drought
  misc_feature: MA Experiment ID: 108577 Result: Up-regulated in Transcription
  misc_feature: MA Experiment 108577 PARAMETER Experiment Name: At_42deg_Heat_cDNA_P Parameter: Temperature (deg C) Value: 42 vs. 22
  misc_feature: MA Experiment 108577 PARAMETER Experiment Name: At_42deg_Heat_cDNA_P Parameter: Timepoint (hr) Value: 6
  misc_feature: MA Experiment 108577 PARAMETER Experiment Name: At_42deg_Heat_cDNA_P Parameter: Tissue Value: Aerial
  misc_feature: MA Experiment ID: 108579 Result: Up-regulated in Transcription
  misc_feature: MA Experiment 108579 PARAMETER Experiment Name: At_4deg_Cold_cDNA_P Parameter: Temperature (deg C) Value: 4 vs. 22
  misc_feature: MA Experiment 108579 PARAMETER Experiment Name: At_4deg_Cold_cDNA_P Parameter: Timepoint (hr) Value: 6
  misc_feature: MA Experiment 108579 PARAMETER Experiment Name: At_4deg_Cold_cDNA_P Parameter: Tissue Value: Aerial
  misc_feature: MA Experiment ID: 108585 Result: Up-regulated in Transcription
  misc_feature: MA Experiment 108585 PARAMETER Experiment Name: At_5mM_NaNP_cDNA_P Parameter: Timepoint (hr) Value: 6
  misc_feature: MA Experiment 108585 PARAMETER Experiment Name: At_5mM_NaNP_cDNA_P Parameter: Tissue Value: Aerial
  misc_feature: MA Experiment 108585 PARAMETER Experiment Name: At_5mM_NaNP_cDNA_P Parameter: Treatment Value: null
  misc_feature: MA Experiment ID: 108595 Result: Down-regulated in Transcription
  misc_feature: MA Experiment 108595 PARAMETER Experiment Name: At_Ler-pi_Ovule_cDNA_P Parameter: Plant Line Value: null
  misc_feature: MA Experiment ID: 108668 Result: Up-regulated in Transcription
  misc_feature: MA Experiment 108668 PARAMETER Experiment Name: At_2mM_SA_cDNA_P Parameter: Plant Line Value: WS
  misc_feature: MA Experiment 108668 PARAMETER Experiment Name: At_2mM_SA_cDNA_P Parameter: Timepoint (hr) Value: 6
  misc_feature: MA Experiment 108668 PARAMETER Experiment Name: At_2mM_SA_cDNA_P Parameter: Treatment Value: 2mM SA vs. No Treatment
  misc_feature: MA Experiment ID: 20000089 Result: Down-regulated in Transcription
  misc_feature: MA Experiment ID: 20000090 Result: Down-regulated in Transcription
  misc_feature: MA Experiment ID: 20000182 Result: Up-regulated in Transcription
  misc_feature: MA Experiment 20000182 PARAMETER Experiment Name: At_2mM_SA_P Parameter: Age (day) Value: 14
  misc_feature: MA Experiment 20000182 PARAMETER Experiment Name: At_2mM_SA_P Parameter: Organism Value: A. thaliana
  misc_feature: MA Experiment 20000182 PARAMETER Experiment Name: At_2mM_SA_P Parameter: Plant Line Value: WS
  misc_feature: MA Experiment 20000182 PARAMETER Experiment Name: At_2mM_SA_P Parameter: Timepoint (hr) Value: 6
  misc_feature: MA Experiment 20000182 PARAMETER Experiment Name: At_2mM_SA_P Parameter: Tissue Value: Aerial
  misc_feature: MA Experiment 20000182 PARAMETER Experiment Name: At_2mM_SA_P Parameter: Treatment Value: 2mM SA vs. No Treatment
  misc_feature: MA Experiment ID: 20000184 Result: Up-regulated in Transcription
  misc_feature: MA Experiment 20000184 PARAMETER Experiment Name: At_Shoots__P Parameter: Age (day) Value: 7
  misc_feature: MA Experiment 20000184 PARAMETER Experiment Name: At_Shoots__P Parameter: Tissue Value: Shoots vs. Whole Plant
  misc_feature: MA Experiment ID: 20000185 Result: Up-regulated in Transcription
  misc_feature: MA Experiment 20000185 PARAMETER Experiment Name: At_Roots__P Parameter: Age (day) Value: 7 vs. 21
  misc_feature: MA Experiment 20000185 PARAMETER Experiment Name: At_Roots__P Parameter: Organism Value: A. thaliana
  misc_feature: MA Experiment 20000185 PARAMETER Experiment Name: At_Roots__P Parameter: Tissue Value: Roots vs. Whole Plant
  misc_feature: MA Experiment ID: 20000224 Result: Up-regulated in Transcription
  misc_feature: MA Experiment ID: 20000235 Result: Up-regulated in Transcription
  misc_feature: MA Experiment 20000235 PARAMETER Experiment Name: At_Siliques_P Parameter: Age (day) Value: 21
  misc_feature: MA Experiment 20000235 PARAMETER Experiment Name: At_Siliques_P Parameter: Organism Value: A. thaliana
  misc_feature: MA Experiment 20000235 PARAMETER Experiment Name: At_Siliques_P Parameter: Plant Line Value: WS
  misc_feature: MA Experiment 20000235 PARAMETER Experiment Name: At_Siliques_P Parameter: Tissue Value: 5-10mm Siliques vs. Whole Plant
  misc_feature: MA Experiment ID: 20000264 Result: Up-regulated in Transcription
  misc_feature: MA Experiment 20000264 PARAMETER Experiment Name: At_Open_Flower_P Parameter: Age (day) Value: 21
  misc_feature: MA Experiment 20000264 PARAMETER Experiment Name: At_Open_Flower_P Parameter: Plant Line Value: WS
  misc_feature: MA Experiment 20000264 PARAMETER Experiment Name: At_Open_Flower_P Parameter: Tissue Value: Open Flower vs. Whole Plant
  misc_feature: MA Experiment ID: 20000286 Result: Up-regulated in Transcription
  misc_feature: MA Experiment 20000286 PARAMETER Experiment Name: At_Open_Flower_P Parameter: Age (day) Value: 21
  misc_feature: MA Experiment 20000286 PARAMETER Experiment Name: At_Open_Flower_P Parameter: Plant Line Value: WS
  misc_feature: MA Experiment 20000286 PARAMETER Experiment Name: At_Open_Flower_P Parameter: Tissue Value: Half Open vs. Whole Plant
  misc_feature: MA Experiment ID: 20000439 Result: Up-regulated in Transcription
  misc_feature: MA Experiment 20000439 PARAMETER Experiment Name: At_Roots__P Parameter: Age (day) Value: 14 vs. 21
  misc_feature: MA Experiment 20000439 PARAMETER Experiment Name: At_Roots__P Parameter: Organism Value: A. thaliana
  misc_feature: MA Experiment 20000439 PARAMETER Experiment Name: At_Roots__P Parameter: Tissue Value: Roots vs. Whole Plant
  misc_feature: MA Experiment ID: 20000794 Result: Up-regulated in Transcription
  misc_feature: MA Experiment 20000794 PARAMETER Experiment Name: At_Petals_P Parameter: Age (day) Value: 23-25 days
  misc_feature: MA Experiment 20000794 PARAMETER Experiment Name: At_Petals_P Parameter: Plant Line Value: WS
  misc_feature: MA Experiment 20000794 PARAMETER Experiment Name: At_Petals_P Parameter: Tissue Value: Petals vs. Whole plant
  misc_feature: MA Experiment ID: 20001248 Result: Down-regulated in Transcription
  misc_feature: MA Experiment 20001248 PARAMETER Experiment Name: At_Far-red-induction_P Parameter: Age (day) Value: 7
  misc_feature: MA Experiment 20001248 PARAMETER Experiment Name: At_Far-red-induction_P Parameter: Light Value: Far-red vs. White
  misc_feature: MA Experiment 20001248 PARAMETER Experiment Name: At_Far-red-induction_P Parameter: Organism Value: A. thaliana
  misc_feature: MA Experiment 20001248 PARAMETER Experiment Name: At_Far-red-induction_P Parameter: Plant Line Value: Columbia
  misc_feature: MA Experiment 20001248 PARAMETER Experiment Name: At_Far-red-induction_P Parameter: Timepoint (hr) Value: 4
  misc_feature: MA Experiment 20001248 PARAMETER Experiment Name: At_Far-red-induction_P Parameter: Tissue Value: Whole Plant
  misc_feature: MA Experiment ID: 20001757 Result: Down-regulated in Transcription
  misc_feature: MA Experiment 20001757 PARAMETER Experiment Name: At_50mM_NH4NO3_L-to-H_P Parameter: Timepoint (hr) Value: 6
  misc_feature: MA Experiment 20001757 PARAMETER Experiment Name: At_50mM_NH4NO3_L-to-H_P Parameter: Tissue Value: Leaf
  misc_feature: MA Experiment 20001757 PARAMETER Experiment Name: At_50mM_NH4NO3_L-to-H_P Parameter: Treatment Value: 50mM NH4NO3 vs 100mM Mannitol
acaatcatttgattatttcctcctctccgtatctgtgtctctcttctcttgatcttttagtgttcttgctttgtcgcttcaacgcttaagtttggatttgtgtgagtctgcataatcatggcgaggaagatgcttgttgatggtgagattgataaggtggcggctgatgaagccaacgcgacgcactatgattttgatttgtttgtcatcggtgccgggagtggcggtgttcgtgctgctaggttttcggctaatcatggcgctaaggttggtatttgtgagcttccatttcaccctattagctctgaggagattggaggcgttggtggaacctgtgttatccgtggttgtgttcctaaaaagattctcgtctatggagctacttacggtggtgaacttgaggatgctaaaaattatgggtgggaaataaatgagaaagtcgacttcacatggaagaagcttttgcaaaagaagactgatgagatactaagactgaataatatctacaagcggttattggcaaatgctgcggtgaaattgtatgaaggtgaaggaagagtagttggtcccaacgaagtggaggtgagacaaatagatggcacaaaaataagttataccgcaaagcacatattgattgccactggcagtcgggcgcaaaagcctaatattcctggacatgagctggctattacatctgatgaagctttgagcttggaagaatttcccaagcgtgctatagtgcttggaggagggtatattgctgtggagtttgcatcaatatggcgtggaatgggtgctactgtagatttattcttcaggaaggaacttccgctaaggggttttgatgacgaaatgagggcactagttgctagaaatcttgaaggaaggggcgttaatctgcatccacaaacaagtttgactcagttgacaaaaacagaccaggggatcaaagtcatatcgtcccatggggaggaattcgtggcagatgtcgtcctatttgctactggcagaagtcctaataccaaaagattgaatttagaagctgttggtgttgaacttgatcaggctggagctgtgaaggttgacgagtattcacgaactaatatacctagcatatgggctgtaggagatgccacaaaccgaattaaccttacacctgttgcgttaatggaggccacctgttttgcgaacactgcttttggtggaaagcctactaaagcagaatacagcaatgtcgcctgtgctgtattttgcataccaccactagctgtagtgggtctcagcgaagaagaagcagtagaacaagcaaccggtgatattctggtcttcacctcaggctttaatccaatgaagaacaccatttctggacgccaggaaaagacattgatgaagctaatagttgatgagaagagtgataaggttattggagcatccatgtgcggtcctgatgcagctgagatcatgcaggggattgcaattgcgctcaagtgtggagcaaccaaagcacaatttgatagcacggtaagttgggatacatccatcttctgcagaggaatttgtgacaatgcgcagtgtgaccagacgcattgcccacaaacccaaacctaagacaaatctatgaaccgcaaaatataaagagctatatagcatgaaaactcggtacacttaatttgatcaaagagtcagacaacgatgagtttaatcatactcgtgtcccaataaaggatttgtaatttttgtttgtttgtatgatgcttctcttcttacttacttgagaaaacatcaaggtttcttctcttattgcttagtggaactttatt

SEQ ID NO: 84973 - protein, 496 aa, Arabidopsis thaliana
  peptide (1)..(496): Ceres Seq. ID no. 12678130
  misc_feature (27)..(348): Pfam Name: Pyridine nucleotide-disulphide oxidoreductase Pfam Description: Pyridine nucleotide-disulphide oxidoreductase
  misc_feature (1)..(469): Homolog of NCBI NO: 15230074 NR Description: glutathione reductase, putative; protein id: supported by cDNA: gi_1022796, supported by cDNA: gi_13430631 thaliana] >gi|1346194|sp|P48641|GSHR_ARATH Glutathione reductase,
  misc_feature (1)..(469): Homolog of NCBI NO: 13430632 NR Description: putative glutathione reductase [Arabidopsis >gi|14532810|gb|AAK64087.1| putative glutathione reductase
  misc_feature (1)..(469): Homolog of NCBI NO: 21263645 NR Description: Glutathione reductase, cytosolic (GR) (GRase) glutathione reductase [Brassica rapa]
  misc_feature (1)..(469): Homolog of NCBI NO: 7431864 NR Description: glutathione-disulfide reductase (EC 1.8.1.7) -
  misc_feature (12)..(469): Homolog of NCBI NO: 2500115 NR Description: Glutathione reductase, chloroplast precursor (GR)
  misc_feature (1)..(469): Homolog of NCBI NO: 2500116 NR Description: Glutathione reductase, cytosolic (GR) (GRase)
  misc_feature (17)..(470): Homolog of NCBI NO: 10862871 NR Description: glutathione reductase [Mesembryanthemum
  misc_feature (1)..(469): Homolog of NCBI NO: 19860133 NR Description: Glutathione reductase, cytosolic (GR) (GRase)
  misc_feature (1)..(469): Homolog of NCBI NO: 7431855 NR Description: probable glutathione-disulfide reductase (EC - rice >gi|1841894|dbj|BAA11214.1| Glutathione Reductase [Oryza
  misc_feature (1)..(469): Homolog of NCBI NO: 34334010 NR Description: cytosolic glutathione reductase [Triticum
MARKMLVDGEIDKVAADEANATHYDFDLFVIGAGSGGVRAARFSANHGAKVGICELPFHPISSEEIGGVGGTCVIRGCVPKKILVYGATYGGELEDAKNYGWEINEKVDFTWKKLLQKKTDEILRLNNIYKRLLANAAVKLYEGEGRVVGPNEVEVRQIDGTKISYTAKHILIATGSRAQKPNIPGHELAITSDEALSLEEFPKRAIVLGGGYIAVEFASIWRGMGATVDLFFRKELPLRGFDDEMRALVARNLEGRGVNLHPQTSLTQLTKTDQGIKVISSHGEEFVADVVLFATGRSPNTKRLNLEAVGVELDQAGAVKVDEYSRTNIPSIWAVGDATNRINLTPVALMEATCFANTAFGGKPTKAEYSNVACAVFCIPPLAVVGLSEEEAVEQATGDILVFTSGFNPMKNTISGRQEKTLMKLIVDEKSDKVIGASMCGPDAAEIMQGIAIALKCGATKAQFDSTVSWDTSIFCRGICDNAQCDQTHCPQTQT

SEQ ID NO: 84974 - protein, 492 aa, Arabidopsis thaliana
  peptide (1)..(492): Ceres Seq. ID no. 12678131
  misc_feature (23)..(344): Pfam Name: Pyridine nucleotide-disulphide oxidoreductase Pfam Description: Pyridine nucleotide-disulphide oxidoreductase
  misc_feature (1)..(465): Homolog of NCBI NO: 15230074 NR Description: glutathione reductase, putative; protein id: supported by cDNA: gi_1022796, supported by cDNA: gi_13430631 thaliana] >gi|1346194|sp|P48641|GSHR_ARATH Glutathione reductase,
  misc_feature (1)..(465): Homolog of NCBI NO: 13430632 NR Description: putative glutathione reductase [Arabidopsis >gi|14532810|gb|AAK64087.1| putative glutathione reductase
  misc_feature (1)..(465): Homolog of NCBI NO: 21263645 NR Description: Glutathione reductase, cytosolic (GR) (GRase) glutathione reductase [Brassica rapa]
  misc_feature (1)..(465): Homolog of NCBI NO: 7431864 NR Description: glutathione-disulfide reductase (EC 1.8.1.7) -
  misc_feature (8)..(465): Homolog of NCBI NO: 2500115 NR Description: Glutathione reductase, chloroplast precursor (GR)
  misc_feature (1)..(465): Homolog of NCBI NO: 2500116 NR Description: Glutathione reductase, cytosolic (GR) (GRase)
  misc_feature (13)..(466): Homolog of NCBI NO: 10862871 NR Description: glutathione reductase [Mesembryanthemum
  misc_feature (1)..(465): Homolog of NCBI NO: 19860133 NR Description: Glutathione reductase, cytosolic (GR) (GRase)
  misc_feature (1)..(465): Homolog of NCBI NO: 7431855 NR Description: probable glutathione-disulfide reductase (EC - rice >gi|1841894|dbj|BAA11214.1| Glutathione Reductase [Oryza
  misc_feature (1)..(465): Homolog of NCBI NO: 34334010 NR Description: cytosolic glutathione reductase [Triticum
MLVDGEIDKVAADEANATHYDFDLFVIGAGSGGVRAARFSANHGAKVGICELPFHPISSEEIGGVGGTCVIRGCVPKKILVYGATYGGELEDAKNYGWEINEKVDFTWKKLLQKKTDEILRLNNIYKRLLANAAVKLYEGEGRVVGPNEVEVRQIDGTKISYTAKHILIATGSRAQKPNIPGHELAITSDEALSLEEFPKRAIVLGGGYIAVEFASIWRGMGATVDLFFRKELPLRGFDDEMRALVARNLEGRGVNLHPQTSLTQLTKTDQGIKVISSHGEEFVADVVLFATGRSPNTKRLNLEAVGVELDQAGAVKVDEYSRTNIPSIWAVGDATNRINLTPVALMEATCFANTAFGGKPTKAEYSNVACAVFCIPPLAVVGLSEEEAVEQATGDILVFTSGFNPMKNTISGRQEKTLMKLIVDEKSDKVIGASMCGPDAAEIMQGIAIALKCGATKAQFDSTVSWDTSIFCRGICDNAQCDQTHCPQTQT

SEQ ID NO: 84975 - protein, 272 aa, Arabidopsis thaliana
  peptide (1)..(272): Ceres Seq. ID no. 12678132
  misc_feature (1)..(124): Pfam Name: Pyridine nucleotide-disulphide oxidoreductase Pfam Description: Pyridine nucleotide-disulphide oxidoreductase
  misc_feature (1)..(245): Homolog of NCBI NO: 15230074 NR Description: glutathione reductase, putative; protein id: supported by cDNA: gi_1022796, supported by cDNA: gi_13430631 thaliana] >gi|1346194|sp|P48641|GSHR_ARATH Glutathione reductase,
  misc_feature (1)..(245): Homolog of NCBI NO: 13430632 NR Description: putative glutathione reductase [Arabidopsis >gi|14532810|gb|AAK64087.1| putative glutathione reductase
  misc_feature (1)..(245): Homolog of NCBI NO: 21263645 NR Description: Glutathione reductase, cytosolic (GR) (GRase) glutathione reductase [Brassica rapa]
  misc_feature (1)..(245): Homolog of NCBI NO: 7431864 NR Description: glutathione-disulfide reductase (EC 1.8.1.7) -
  misc_feature (1)..(245): Homolog of NCBI NO: 2500115 NR Description: Glutathione reductase, chloroplast precursor (GR)
  misc_feature (1)..(245): Homolog of NCBI NO: 2500116 NR Description: Glutathione reductase, cytosolic (GR) (GRase)
  misc_feature (1)..(246): Homolog of NCBI NO: 10862871 NR Description: glutathione reductase [Mesembryanthemum
  misc_feature (1)..(245): Homolog of NCBI NO: 19860133 NR Description: Glutathione reductase, cytosolic (GR) (GRase)
  misc_feature (1)..(245): Homolog of NCBI NO: 7431855 NR Description: probable glutathione-disulfide reductase (EC - rice >gi|1841894|dbj|BAA11214.1| Glutathione Reductase [Oryza
  misc_feature (1)..(245): Homolog of NCBI NO: 34334010 NR Description: cytosolic glutathione reductase [Triticum
MGATVDLFFRKELPLRGFDDEMRALVARNLEGRGVNLHPQTSLTQLTKTDQGIKVISSHGEEFVADVVLFATGRSPNTKRLNLEAVGVELDQAGAVKVDEYSRTNIPSIWAVGDATNRINLTPVALMEATCFANTAFGGKPTKAEYSNVACAVFCIPPLAVVGLSEEEAVEQATGDILVFTSGFNPMKNTISGRQEKTLMKLIVDEKSDKVIGASMCGPDAAEIMQGIAIALKCGATKAQFDSTVSWDTSIFCRGICDNAQCDQTHCPQTQT

SEQ ID NO: 84976 - DNA, 1531 bp, Arabidopsis thaliana
  misc_feature (1)..(1531): Ceres Seq. ID no. 12678133
  misc_feature: MA Experiment ID: 108434 Result: Down-regulated in Transcription
  misc_feature: MA Experiment 108434 PARAMETER Experiment Name: At_Root_Tips_cDNA_P Parameter: Tissue Value: Root Tips
  misc_feature: MA Experiment ID: 108435 Result: Up-regulated in Transcription
  misc_feature: MA Experiment 108435 PARAMETER Experiment Name: At_stm_Mutants_cDNA_P Parameter: Plant Line Value: wt Landsburg vs stm
  misc_feature: MA Experiment 108435 PARAMETER Experiment Name: At_stm_Mutants_cDNA_P Parameter: Tissue Value: Shoot Apical Meristem Region
  misc_feature: MA Experiment ID: 108561 Result: Up-regulated in Transcription
  misc_feature: MA Experiment 108561 PARAMETER Experiment Name: At_100uM_ABA_cDNA_P Parameter: Timepoint (hr) Value: 6
  misc_feature: MA Experiment 108561 PARAMETER Experiment Name: At_100uM_ABA_cDNA_P Parameter: Tissue Value: Aerial
  misc_feature: MA Experiment 108561 PARAMETER Experiment Name: At_100uM_ABA_cDNA_P Parameter: Treatment Value: 100uM ABA vs. No Treatment
  misc_feature: MA Experiment ID: 108573 Result: Up-regulated in Transcription
  misc_feature: MA Experiment 108573 PARAMETER Experiment Name: At_Drought_cDNA_P Parameter: Timepoint (hr) Value: 6
  misc_feature: MA Experiment 108573 PARAMETER Experiment Name: At_Drought_cDNA_P Parameter: Tissue Value: Aerial
  misc_feature: MA Experiment 108573 PARAMETER Experiment Name: At_Drought_cDNA_P Parameter: Treatment Value: Drought vs. No Drought
  misc_feature: MA Experiment ID: 108577 Result: Up-regulated in Transcription
  misc_feature: MA Experiment 108577 PARAMETER Experiment Name: At_42deg_Heat_cDNA_P Parameter: Temperature (deg C) Value: 42 vs. 22
  misc_feature: MA Experiment 108577 PARAMETER Experiment Name: At_42deg_Heat_cDNA_P Parameter: Timepoint (hr) Value: 6
  misc_feature: MA Experiment 108577 PARAMETER Experiment Name: At_42deg_Heat_cDNA_P Parameter: Tissue Value: Aerial
  misc_feature: MA Experiment ID: 108579 Result: Up-regulated in Transcription
  misc_feature: MA Experiment 108579 PARAMETER Experiment Name: At_4deg_Cold_cDNA_P Parameter: Temperature (deg C) Value: 4 vs. 22
  misc_feature: MA Experiment 108579 PARAMETER Experiment Name: At_4deg_Cold_cDNA_P Parameter: Timepoint (hr) Value: 6
  misc_feature: MA Experiment 108579 PARAMETER Experiment Name: At_4deg_Cold_cDNA_P Parameter: Tissue Value: Aerial
  misc_feature: MA Experiment ID: 108585 Result: Up-regulated in Transcription
  misc_feature: MA Experiment 108585 PARAMETER Experiment Name: At_5mM_NaNP_cDNA_P Parameter: Timepoint (hr) Value: 6
  misc_feature: MA Experiment 108585 PARAMETER Experiment Name: At_5mM_NaNP_cDNA_P Parameter: Tissue Value: Aerial
  misc_feature: MA Experiment 108585 PARAMETER Experiment Name: At_5mM_NaNP_cDNA_P Parameter: Treatment Value: null
  misc_feature: MA Experiment ID: 108595 Result: Down-regulated in Transcription
  misc_feature: MA Experiment 108595 PARAMETER Experiment Name: At_Ler-pi_Ovule_cDNA_P Parameter: Plant Line Value: null
  misc_feature: MA Experiment ID: 108668 Result: Up-regulated in Transcription
  misc_feature: MA Experiment 108668 PARAMETER Experiment Name: At_2mM_SA_cDNA_P Parameter: Plant Line Value: WS
  misc_feature: MA Experiment 108668 PARAMETER Experiment Name: At_2mM_SA_cDNA_P Parameter: Timepoint (hr) Value: 6
  misc_feature: MA Experiment 108668 PARAMETER Experiment Name: At_2mM_SA_cDNA_P Parameter: Treatment Value: 2mM SA vs. No Treatment
  misc_feature: MA Experiment ID: 20000089 Result: Down-regulated in Transcription
  misc_feature: MA Experiment ID: 20000090 Result: Down-regulated in Transcription
  misc_feature: MA Experiment ID: 20000224 Result: Up-regulated in Transcription
atggcgaggaagatgcttgttgatggtgagattgataaggtggcggctgatgaagccaacgcgacgcactatgattttgatttgtttgtcatcggtgccgggagtggcggtgttcgtgctgctaggttttcggctaatcatggcgctaaggttggtatttgtgagcttccatttcaccctattagctctgaggagattggaggcgttggtggaacctgtgttatccgtggttgtgttcctaaaaagattctcgtctatggagctacttacggtggtgaacttgaggatgctaaaaattatgggtgggaaataaatgagaaagtcgacttcacatggaagaagcttttgcaaaagaagactgatgagatactaagactgaataatatctacaagcggttattggcaaatgctgcggtgaaattgtatgaaggtgaaggaagagtagttggtcccaacgaagtggaggtgagacaaatagatggcacaaaaataagttataccgcaaagcacatattgattgccactggcagtcgggcgcaaaagcctaatattcctggacatgagctggctattacatctgatgaagctttgagcttggaagaatttcccaagcgtgctatagtgcttggaggagggtatattgctgtggagtttgcatcaatatggcgtggaatgggtgctactgtagatttattcttcaggaaggaacttccgctaaggggttttgatgacgaaatgagggcactagttgctagaaatcttgaaggaaggggcgttaatctgcatccacaaacaagtttgactcagttgacaaaaacagaccaggggatcaaagtcatatcgtcccatggggaggaattcgtggcagatgtcgtcctatttgctactggcagaagtcctaataccaaaagattgaatttagaagctgttggtgttgaacttgatcaggctggagctgtgaaggttgacgagtattcacgaactaatatacctagcatatgggctgtaggagatgccacaaaccgaattaaccttacacctgttgcgttaatggaggccacctgttttgcgaacactgcttttggtggaaagcctactaaagcagaatacagcaatgtcgcctgtgctgtattttgcataccaccactagctgtagtgggtctcagcgaagaagaagcagtagaacaagcaaccggtgatattctggtcttcacctcaggctttaatccaatgaagaacaccatttctggacgccaggaaaagacattgatgaagctaatagttgatgagaagagtgataaggttattggagcatccatgtgcggtcctgatgcagctgagatcatgcaggggattgcaattgcgctcaagtgtggagcaaccaaagcacaatttgatagcacggttgggatacatccatcttctgcagaggaatttgtgacaatgcgcagtgtgaccagacgcattgcccacaaacccaaacctaagacaaatctatgaaccgcaaaatataaagagctatatagcatga

SEQ ID NO: 84977 - protein, 499 aa, Arabidopsis thaliana; identical to SEQ ID NO: 24219
  peptide (1)..(499): Ceres Seq. ID no. 12678134
  misc_feature (27)..(348): Pfam Name: Pyridine nucleotide-disulphide oxidoreductase Pfam Description: Pyridine nucleotide-disulphide oxidoreductase
  misc_feature (1)..(499): Homolog of NCBI NO: 15230074 NR Description: glutathione reductase, putative; protein id: supported by cDNA: gi_1022796, supported by cDNA: gi_13430631 thaliana] >gi|1346194|sp|P48641|GSHR_ARATH Glutathione reductase,
  misc_feature (1)..(499): Homolog of NCBI NO: 13430632 NR Description: putative glutathione reductase [Arabidopsis >gi|14532810|gb|AAK64087.1| putative glutathione reductase
  misc_feature (1)..(499): Homolog of NCBI NO: 21263645 NR Description: Glutathione reductase, cytosolic (GR) (GRase) glutathione reductase [Brassica rapa]
  misc_feature (1)..(499): Homolog of NCBI NO: 7431864 NR Description: glutathione-disulfide reductase (EC 1.8.1.7) -
  misc_feature (12)..(499): Homolog of NCBI NO: 2500115 NR Description: Glutathione reductase, chloroplast precursor (GR)
  misc_feature (1)..(499): Homolog of NCBI NO: 2500116 NR Description: Glutathione reductase, cytosolic (GR) (GRase)
  misc_feature (17)..(469): Homolog of NCBI NO: 10862871 NR Description: glutathione reductase [Mesembryanthemum
  misc_feature (1)..(499): Homolog of NCBI NO: 19860133 NR Description: Glutathione reductase, cytosolic (GR) (GRase)
  misc_feature (1)..(499): Homolog of NCBI NO: 7431855 NR Description: probable glutathione-disulfide reductase (EC - rice >gi|1841894|dbj|BAA11214.1| Glutathione Reductase [Oryza
  misc_feature (1)..(499): Homolog of NCBI NO: 34334010 NR Description: cytosolic glutathione reductase [Triticum

SEQ ID NO: 84978 - protein, 495 aa, Arabidopsis thaliana; identical to SEQ ID NO: 24220
  peptide (1)..(495): Ceres Seq. ID no. 12678135
  misc_feature (23)..(344): Pfam Name: Pyridine nucleotide-disulphide oxidoreductase Pfam Description: Pyridine nucleotide-disulphide oxidoreductase
  misc_feature (1)..(495): Homolog of NCBI NO: 15230074 NR Description: glutathione reductase, putative; protein id: supported by cDNA: gi_1022796, supported by cDNA: gi_13430631 thaliana] >gi|1346194|sp|P48641|GSHR_ARATH Glutathione reductase,
  misc_feature (1)..(495): Homolog of NCBI NO: 13430632 NR Description: putative glutathione reductase [Arabidopsis >gi|14532810|gb|AAK64087.1| putative glutathione reductase
  misc_feature (1)..(495): Homolog of NCBI NO: 21263645 NR Description: Glutathione reductase, cytosolic (GR) (GRase) glutathione reductase [Brassica rapa]
  misc_feature (1)..(495): Homolog of NCBI NO: 7431864 NR Description: glutathione-disulfide reductase (EC 1.8.1.7) -
  misc_feature (8)..(495): Homolog of NCBI NO: 2500115 NR Description: Glutathione reductase, chloroplast precursor (GR)
  misc_feature (1)..(495): Homolog of NCBI NO: 2500116 NR Description: Glutathione reductase, cytosolic (GR) (GRase)
  misc_feature (13)..(465): Homolog of NCBI NO: 10862871 NR Description: glutathione reductase [Mesembryanthemum
  misc_feature (1)..(495): Homolog of NCBI NO: 19860133 NR Description: Glutathione reductase, cytosolic (GR) (GRase)
  misc_feature (1)..(495): Homolog of NCBI NO: 7431855 NR Description: probable glutathione-disulfide reductase (EC - rice >gi|1841894|dbj|BAA11214.1| Glutathione Reductase [Oryza
  misc_feature (1)..(495): Homolog of NCBI NO: 34334010 NR Description: cytosolic glutathione reductase [Triticum

SEQ ID NO: 84979 - protein, 275 aa, Arabidopsis thaliana; identical to SEQ ID NO: 24221
  peptide (1)..(275): Ceres Seq. ID no. 12678136
  misc_feature (1)..(124): Pfam Name: Pyridine nucleotide-disulphide oxidoreductase Pfam Description: Pyridine nucleotide-disulphide oxidoreductase
  misc_feature (1)..(275): Homolog of NCBI NO: 15230074 NR Description: glutathione reductase, putative; protein id: supported by cDNA: gi_1022796, supported by cDNA: gi_13430631 thaliana] >gi|1346194|sp|P48641|GSHR_ARATH Glutathione reductase,
  misc_feature (1)..(275): Homolog of NCBI NO: 13430632 NR Description: putative glutathione reductase [Arabidopsis >gi|14532810|gb|AAK64087.1| putative glutathione reductase
  misc_feature (1)..(275): Homolog of NCBI NO: 21263645 NR Description: Glutathione reductase, cytosolic (GR) (GRase) glutathione reductase [Brassica rapa]
  misc_feature (1)..(275): Homolog of NCBI NO: 7431864 NR Description: glutathione-disulfide reductase (EC 1.8.1.7) -
  misc_feature (1)..(275): Homolog of NCBI NO: 2500115 NR Description: Glutathione reductase, chloroplast precursor (GR)
  misc_feature (1)..(275): Homolog of NCBI NO: 2500116 NR Description: Glutathione reductase, cytosolic (GR) (GRase)
  misc_feature (1)..(245): Homolog of NCBI NO: 10862871 NR Description: glutathione reductase [Mesembryanthemum
  misc_feature (1)..(275): Homolog of NCBI NO: 19860133 NR Description: Glutathione reductase, cytosolic (GR) (GRase)
  misc_feature (1)..(275): Homolog of NCBI NO: 7431855 NR Description: probable glutathione-disulfide reductase (EC - rice >gi|1841894|dbj|BAA11214.1| Glutathione Reductase [Oryza
  misc_feature (1)..(275): Homolog of NCBI NO: 34334010 NR Description: cytosolic glutathione reductase [Triticum

SEQ ID NO: 84980 - DNA, 1945 bp, Arabidopsis thaliana
  misc_feature (1)..(1945): Ceres Seq. ID no. 12678139
  misc_feature: MA Experiment ID: 108573 Result: Up-regulated in Transcription
  misc_feature: MA Experiment 108573 PARAMETER Experiment Name: At_Drought_cDNA_P Parameter: Timepoint (hr) Value: 6
  misc_feature: MA Experiment 108573 PARAMETER Experiment Name: At_Drought_cDNA_P Parameter: Tissue Value: Aerial
  misc_feature: MA Experiment 108573 PARAMETER Experiment Name: At_Drought_cDNA_P Parameter: Treatment Value: Drought vs. No Drought
  misc_feature: MA Experiment ID: 108577 Result: Down-regulated in Transcription
  misc_feature: MA Experiment 108577 PARAMETER Experiment Name: At_42deg_Heat_cDNA_P Parameter: Temperature (deg C) Value: 42 vs. 22
  misc_feature: MA Experiment 108577 PARAMETER Experiment Name: At_42deg_Heat_cDNA_P Parameter: Timepoint (hr) Value: 6
  misc_feature: MA Experiment 108577 PARAMETER Experiment Name: At_42deg_Heat_cDNA_P Parameter: Tissue Value: Aerial
  misc_feature: MA Experiment ID: 108595 Result: Up-regulated in Transcription
  misc_feature: MA Experiment 108595 PARAMETER Experiment Name: At_Ler-pi_Ovule_cDNA_P Parameter: Plant Line Value: null
  misc_feature: MA Experiment ID: 20000111 Result: Down-regulated in Transcription
  misc_feature: MA Experiment 20000111 PARAMETER Experiment Name: At_42deg_Heat_cDNA_P Parameter: Temperature (deg C) Value: 42 vs. 22
  misc_feature: MA Experiment 20000111 PARAMETER Experiment Name: At_42deg_Heat_cDNA_P Parameter: Timepoint (hr) Value: 6
  misc_feature: MA Experiment 20000111 PARAMETER Experiment Name: At_42deg_Heat_cDNA_P Parameter: Tissue Value: Aerial
  misc_feature: MA Experiment ID: 20000113 Result: Down-regulated in Transcription
  misc_feature: MA Experiment 20000113 PARAMETER Experiment Name: At_42deg_Heat_cDNA_P Parameter: Temperature (deg C) Value: 42 vs. 22
  misc_feature: MA Experiment 20000113 PARAMETER Experiment Name: At_42deg_Heat_cDNA_P Parameter: Timepoint (hr) Value: 8
  misc_feature: MA Experiment 20000113 PARAMETER Experiment Name: At_42deg_Heat_cDNA_P Parameter: Tissue Value: Aerial
  misc_feature: MA Experiment ID: 20000214 Result: Down-regulated in Transcription
  misc_feature: MA Experiment 20000214 PARAMETER Experiment Name: At_4deg_Cold_P Parameter: Timepoint (hr) Value: 6
  misc_feature: MA Experiment ID: 20000495 Result: Up-regulated in Transcription
  misc_feature: MA Experiment 20000495 PARAMETER Experiment Name: At_Guard_Cells_P Parameter: Harvest Date Value: 8/2/2002
  misc_feature: MA Experiment 20000495 PARAMETER Experiment Name: At_Guard_Cells_P Parameter: Organism Value: A. thaliana
  misc_feature: MA Experiment 20000495 PARAMETER Experiment Name: At_Guard_Cells_P Parameter: Tissue Value: Guard Cells vs. Leaves
aaagattcccactcggaatgttttaataatcttttatcatacaatttgttctctctctctctctctctctctctaccataaagcaaatgtgatcagagacaaagcatacaaagaagttcctcattcaaaaaagatttctcagccatcaaaattctctttctcttcatccaacaaaaaaaaagcatacctctttttcttccatatagataagttaattaagaaaacgaattatcaggttttgtttcggctgatctgaggaagttcatctatggatacggctcagtggccacaggtactatacacaaacatttacatatttatatattcgtacaattcaatatgtatgtgttgatgtagtttagatcatctgatttatctatctactagatcttgacttagaattttaatgttttcggatcttcttctttttgatgttactcttctcttcaacagtttttagatcttctcctttaattttaaatatatggttttttttttcactttaccctttattaatttgctttttcttttatgtttttagttaaagcttctctcaaatatctcaattatcattttgatcttgatgaaaatccattaatttgttgatagacagtacatatatatgtcaattatgtcttctatacttgtatataggcaaaggtttttgtgctaacgtttggaagagatgtatttttttattttgatgatcaggagattgtagtgaagcccttggaagaaatagtaacaaacacatgcccaaagccgcaaccgcaaccgcttcaaccgcagcagccaccgtcggtgggtggagagaggaaggcaaggccagaaaaggatcaagctgtaaactgtccgagatgtaactcaaccaacacaaagttttgttactacaacaattatagtttgacgcagccaagatacttctgcaaaggttgtagaaggtattggaccgaaggcggttcgcttaggaacattcctgttggcggtggctcaagaaagaacaagagatctcactcttcttcttctgatattagtaacaatcactcggattctacacaaccagctacaaagaagcatctctctgatcatcaccaccacctcatgagcatgtctcaacaaggtttgaccggtcaaaaccctaaattccttgagacgacccaacaagatctcaatttaggtttttcaccacatgggatgattaggaccaacttcactgacctcatccacaacattggcaacaacaccaacaagagcaacaacaataacaatccattgattgtttcttcatgttctgccatggctacttcttctctggatctcataagaaacaatagtaacaatgggaattcttcaaattcttccttcatgggatttccagttcataatcaagatccagcatcaggagggttttcaatgcaagatcattacaagccttgcaacacaaacaccacactgctagggttttcattagatcatcatcataataatggatttcatggagggtttcaaggaggagaagaaggtggagaaggtggtgatgatgtgaatggaaggcacttgtttccttttgaggatttgaaattgccagtttcttcttcatcagcaacaattaatgtcgacattaatgaacatcagaagcgaggaagcggtagtgatgcagctgctacgtctggtgggtattggactgggatgttgagtggaggatcatggtgctaattaatttctcggtttggttgatgaagatagtactattagtggttaattattgctatttatttaattaatcaatatgttcttaatttcactttgaattttcttattggtgggtttttcctttttttttgttaacttggatttttaaggatactattgggggtgcatgcatattgaatgactttaatttgttatccctaacacagattataaatgatacattggttggtct

SEQ ID NO: 84981 - protein, 204 aa, Arabidopsis thaliana
  peptide (1)..(204): Ceres Seq. ID no. 12678140
  misc_feature (1)..(204): Homolog of NCBI NO: 7487175 NR Description: hypothetical protein T19F6.50 - Arabidopsis >gi|5668634|emb|CAB51649.1| putative protein [Arabidopsis >gi|7269255|emb|CAB81324.1| putative protein [Arabidopsis
  misc_feature (1)..(204): Homolog of NCBI NO: 18416267 NR Description: Dof zinc finger protein; protein id: At4g24060.1, by cDNA: 37663. [Arabidopsis thaliana] >gi|2262110|gb|AAB63618.1|
  misc_feature (1)..(204): Homolog of NCBI NO: 21593274 NR Description: unknown [Arabidopsis thaliana]
  misc_feature (1)..(204): Homolog of NCBI NO: 14335082 NR Description: AT4g24060/T19F6_50 [Arabidopsis thaliana]
  misc_feature (1)..(202): Homolog of NCBI NO: 18408092 NR Description: Dof zinc finger protein; protein id: At1g64620.1, by cDNA: 120488. [Arabidopsis thaliana] putative Dof zinc finger protein [Arabidopsis thaliana]
  misc_feature (1)..(202): Homolog of NCBI NO: 21537120 NR Description: zinc finger protein, putative [Arabidopsis
  misc_feature (1)..(202): Homolog of NCBI NO: 25404940 NR Description: protein F1N19.19 [imported] - Arabidopsis >gi|6633819|gb|AAF19678.1|AC009519_12 F1N19.19 [Arabidopsis
  misc_feature (1)..(202): Homolog of NCBI NO: 4996640 NR Description: Dof zinc finger protein [Oryza sativa]
  misc_feature (1)..(202): Homolog of NCBI NO: 38344272 NR Description: OSJNBa0005N02.10 [Oryza sativa (japonica
  misc_feature (1)..(203): Homolog of NCBI NO: 24211633 NR Description: DOF zinc finger protein DAG2 (Dof affecting thaliana] >gi|13624641|emb|CAC36940.1| putative DNA binding
MSMSQQGLTGQNPKFLETTQQDLNLGFSPHGMIRTNFTDLIHNIGNNTNKSNNNNNPLIVSSCSAMATSSLDLIRNNSNNGNSSNSSFMGFPVHNQDPASGGFSMQDHYKPCNTNTTLLGFSLDHHHNNGFHGGFQGGEEGGEGGDDVNGRHLFPFEDLKLPVSSSSATINVDINEHQKRGSGSDAAATSGGYWTGMLSGGSWC

SEQ ID NO: 84982 - protein, 202 aa, Arabidopsis thaliana
  peptide (1)..(202): Ceres Seq. ID no. 12678141
  misc_feature (1)..(202): Homolog of NCBI NO: 7487175 NR Description: hypothetical protein T19F6.50 - Arabidopsis >gi|5668634|emb|CAB51649.1| putative protein [Arabidopsis >gi|7269255|emb|CAB81324.1| putative protein [Arabidopsis
  misc_feature (1)..(202): Homolog of NCBI NO: 18416267 NR Description: Dof zinc finger protein; protein id: At4g24060.1, by cDNA: 37663. [Arabidopsis thaliana] >gi|2262110|gb|AAB63618.1|
  misc_feature (1)..(202): Homolog of NCBI NO: 21593274 NR Description: unknown [Arabidopsis thaliana]
  misc_feature (1)..(202): Homolog of NCBI NO: 14335082 NR Description: AT4g24060/T19F6_50 [Arabidopsis thaliana]
  misc_feature (1)..(200): Homolog of NCBI NO: 18408092 NR Description: Dof zinc finger protein; protein id: At1g64620.1, by cDNA: 120488. [Arabidopsis thaliana] putative Dof zinc finger protein [Arabidopsis thaliana]
  misc_feature (1)..(200): Homolog of NCBI NO: 21537120 NR Description: zinc finger protein, putative [Arabidopsis
  misc_feature (1)..(200): Homolog of NCBI NO: 25404940 NR Description: protein F1N19.19 [imported] - Arabidopsis >gi|6633819|gb|AAF19678.1|AC009519_12 F1N19.19 [Arabidopsis
  misc_feature (1)..(200): Homolog of NCBI NO: 4996640 NR Description: Dof zinc finger protein [Oryza sativa]
  misc_feature (1)..(200): Homolog of NCBI NO: 38344272 NR Description: OSJNBa0005N02.10 [Oryza sativa (japonica
  misc_feature (1)..(201): Homolog of NCBI NO: 24211633 NR Description: DOF zinc finger protein DAG2 (Dof affecting thaliana] >gi|13624641|emb|CAC36940.1| putative DNA binding
MSQQGLTGQNPKFLETTQQDLNLGFSPHGMIRTNFTDLIHNIGNNTNKSNNNNNPLIVSSCSAMATSSLDLIRNNSNNGNSSNSSFMGFPVHNQDPASGGFSMQDHYKPCNTNTTLLGFSLDHHHNNGFHGGFQGGEEGGEGGDDVNGRHLFPFEDLKLPVSSSSATINVDINEHQKRGSGSDAAATSGGYWTGMLSGGSWC

SEQ ID NO: 84983 - protein, 173 aa, Arabidopsis thaliana
  peptide (1)..(173): Ceres Seq. ID no. 12678142
  misc_feature (1)..(173): Homolog of NCBI NO: 7487175 NR Description: hypothetical protein T19F6.50 - Arabidopsis >gi|5668634|emb|CAB51649.1| putative protein [Arabidopsis >gi|7269255|emb|CAB81324.1| putative protein [Arabidopsis
  misc_feature (1)..(173): Homolog of NCBI NO: 18416267 NR Description: Dof zinc finger protein; protein id: At4g24060.1, by cDNA: 37663. [Arabidopsis thaliana] >gi|2262110|gb|AAB63618.1|
  misc_feature (1)..(173): Homolog of NCBI NO: 21593274 NR Description: unknown [Arabidopsis thaliana]
  misc_feature (1)..(173): Homolog of NCBI NO: 14335082 NR Description: AT4g24060/T19F6_50 [Arabidopsis thaliana]
  misc_feature (1)..(171): Homolog of NCBI NO: 18408092 NR Description: Dof zinc finger protein; protein id: At1g64620.1, by cDNA: 120488. [Arabidopsis thaliana] putative Dof zinc finger protein [Arabidopsis thaliana]
  misc_feature (1)..(171): Homolog of NCBI NO: 21537120 NR Description: zinc finger protein, putative [Arabidopsis
  misc_feature (1)..(171): Homolog of NCBI NO: 25404940 NR Description: protein F1N19.19 [imported] - Arabidopsis >gi|6633819|gb|AAF19678.1|AC009519_12 F1N19.19 [Arabidopsis
  misc_feature (1)..(171): Homolog of NCBI NO: 4996640 NR Description: Dof zinc finger protein [Oryza sativa]
  misc_feature (1)..(171): Homolog of NCBI NO: 38344272 NR Description: OSJNBa0005N02.10 [Oryza sativa (japonica
  misc_feature (1)..(172): Homolog of NCBI NO: 24211633 NR Description: DOF zinc finger protein DAG2 (Dof affecting thaliana] >gi|13624641|emb|CAC36940.1| putative DNA binding
MIRTNFTDLIHNIGNNTNKSNNNNNPLIVSSCSAMATSSLDLIRNNSNNGNSSNSSFMGFPVHNQDPASGGFSMQDHYKPCNTNTTLLGFSLDHHHNNGFHGGFQGGEEGGEGGDDVNGRHLFPFEDLKLPVSSSSATINVDINEHQKRGSGSDAAATSGGYWTGMLSGGSWC

SEQ ID NO: 84984 - DNA, 2407 bp, Arabidopsis thaliana
  misc_feature (1)..(2407): Ceres Seq. ID no. 12678151
  misc_feature: MA Experiment ID: 108473 Result: Up-regulated in Transcription
  misc_feature: MA Experiment 108473 PARAMETER Experiment Name: At_Drought_Flowers_cDNA_P Parameter: Timepoint (hr) Value: 7 d
  misc_feature: MA Experiment 108473 PARAMETER Experiment Name: At_Drought_Flowers_cDNA_P Parameter: Tissue Value: Flower
  misc_feature: MA Experiment 108473 PARAMETER Experiment Name: At_Drought_Flowers_cDNA_P Parameter: Treatment Value: Drought vs. No Drought
  misc_feature: MA Experiment ID: 108488 Result: Down-regulated in Transcription
  misc_feature: MA Experiment ID: 108501 Result: Up-regulated in Transcription
  misc_feature: MA Experiment 108501 PARAMETER Experiment Name: At_ap2_floral_buds_cDNA_P Parameter: Plant Line Value: ap2 (Ler.)
  misc_feature: MA Experiment 108501 PARAMETER Experiment Name: At_ap2_floral_buds_cDNA_P Parameter: Tissue Value: Closed Flower
  misc_feature: MA Experiment ID: 108561 Result: Up-regulated in Transcription
  misc_feature: MA Experiment 108561 PARAMETER Experiment Name: At_100uM_ABA_cDNA_P Parameter: Timepoint (hr) Value: 6
  misc_feature: MA Experiment 108561 PARAMETER Experiment Name: At_100uM_ABA_cDNA_P Parameter: Tissue Value: Aerial
  misc_feature: MA Experiment 108561 PARAMETER Experiment Name: At_100uM_ABA_cDNA_P Parameter: Treatment Value: 100uM ABA vs. No Treatment
  misc_feature: MA Experiment ID: 108572 Result: Up-regulated in Transcription
  misc_feature: MA Experiment 108572 PARAMETER Experiment Name: At_Drought_cDNA_P Parameter: Timepoint (hr) Value: 1
  misc_feature: MA Experiment 108572 PARAMETER Experiment Name: At_Drought_cDNA_P Parameter: Tissue Value: Aerial
  misc_feature: MA Experiment 108572 PARAMETER Experiment Name: At_Drought_cDNA_P Parameter: Treatment Value: Drought vs. No Drought
  misc_feature: MA Experiment ID: 108573 Result: Up-regulated in Transcription
  misc_feature: MA Experiment 108573 PARAMETER Experiment Name: At_Drought_cDNA_P Parameter: Timepoint (hr) Value: 6
  misc_feature: MA Experiment 108573 PARAMETER Experiment Name: At_Drought_cDNA_P Parameter: Tissue Value: Aerial
  misc_feature: MA Experiment 108573 PARAMETER Experiment Name: At_Drought_cDNA_P Parameter: Treatment Value: Drought vs. No Drought
  misc_feature: MA Experiment ID: 108605 Result: Up-regulated in Transcription
  misc_feature: MA Experiment 108605 PARAMETER Experiment Name: At_100uM_ABA_cDNA_P Parameter: Timepoint (hr) Value: 6
  misc_feature: MA Experiment 108605 PARAMETER Experiment Name: At_100uM_ABA_cDNA_P Parameter: Tissue Value: Aerial
  misc_feature: MA Experiment 108605 PARAMETER Experiment Name: At_100uM_ABA_cDNA_P Parameter: Treatment Value: 100uM ABA vs. No Treatment
  misc_feature: MA Experiment ID: 108607 Result: Up-regulated in Transcription
  misc_feature: MA Experiment 108607 PARAMETER Experiment Name: At_100uM_ABA_cDNA_P Parameter: Timepoint (hr) Value: 4
  misc_feature: MA Experiment 108607 PARAMETER Experiment Name: At_100uM_ABA_cDNA_P Parameter: Tissue Value: Aerial
  misc_feature: MA Experiment 108607 PARAMETER Experiment Name: At_100uM_ABA_cDNA_P Parameter: Treatment Value: 100uM ABA vs. No Treatment
  misc_feature: MA Experiment ID: 108608 Result: Up-regulated in Transcription
  misc_feature: MA Experiment 108608 PARAMETER Experiment Name: At_100uM_ABA_cDNA_P Parameter: Timepoint (hr) Value: 1
  misc_feature: MA Experiment 108608 PARAMETER Experiment Name: At_100uM_ABA_cDNA_P Parameter: Tissue Value: Aerial
  misc_feature: MA Experiment 108608 PARAMETER Experiment Name: At_100uM_ABA_cDNA_P Parameter: Treatment Value: 100uM ABA vs. No Treatment
  misc_feature: MA Experiment ID: 108609 Result: Up-regulated in Transcription
  misc_feature: MA Experiment 108609 PARAMETER Experiment Name: At_100uM_ABA_cDNA_P Parameter: Timepoint (hr) Value: 24
  misc_feature: MA Experiment 108609 PARAMETER Experiment Name: At_100uM_ABA_cDNA_P Parameter: Tissue Value: Aerial
  misc_feature: MA Experiment 108609 PARAMETER Experiment Name: At_100uM_ABA_cDNA_P Parameter: Treatment Value: 100uM ABA vs. No Treatment
  misc_feature: MA Experiment ID: 20000086 Result: Up-regulated in Transcription
  misc_feature: MA Experiment 20000086 PARAMETER Experiment Name: At_100uM_ABA_Mutants_cDNA_P Parameter: Plant Line Value: CS22
  misc_feature: MA Experiment 20000086 PARAMETER Experiment Name: At_100uM_ABA_Mutants_cDNA_P Parameter: Timepoint (hr) Value: 6
  misc_feature: MA Experiment 20000086 PARAMETER Experiment Name: At_100uM_ABA_Mutants_cDNA_P Parameter: Tissue Value: Aerial
  misc_feature: MA Experiment 20000086 PARAMETER Experiment Name: At_100uM_ABA_Mutants_cDNA_P Parameter: Treatment Value: 100uM ABA vs. No Treatment
  misc_feature: MA Experiment ID: 20000087 Result: Up-regulated in Transcription
  misc_feature: MA Experiment 20000087 PARAMETER Experiment Name: At_100uM_ABA_Mutants_cDNA_P Parameter: Plant Line Value: WS
  misc_feature: MA Experiment 20000087 PARAMETER Experiment Name: At_100uM_ABA_Mutants_cDNA_P Parameter: Timepoint (hr) Value: 6
  misc_feature: MA Experiment 20000087 PARAMETER Experiment Name: At_100uM_ABA_Mutants_cDNA_P Parameter: Tissue Value: Aerial
  misc_feature: MA Experiment 20000087 PARAMETER Experiment Name: At_100uM_ABA_Mutants_cDNA_P Parameter: Treatment Value: 100uM ABA vs. No Treatment
  misc_feature: MA Experiment ID: 20000088 Result: Up-regulated in Transcription
  misc_feature: MA Experiment 20000088 PARAMETER Experiment Name: At_100uM_ABA_Mutants_cDNA_P Parameter: Plant Line Value: Landsberg
  misc_feature: MA Experiment 20000088 PARAMETER Experiment Name: At_100uM_ABA_Mutants_cDNA_P Parameter: Timepoint (hr) Value: 6
  misc_feature: MA Experiment 20000088 PARAMETER Experiment Name: At_100uM_ABA_Mutants_cDNA_P Parameter: Tissue Value: Aerial
  misc_feature: MA Experiment 20000088 PARAMETER Experiment Name: At_100uM_ABA_Mutants_cDNA_P Parameter: Treatment Value: 100uM ABA vs. No Treatment
  misc_feature: MA Experiment ID: 20000113 Result: Down-regulated in Transcription
  misc_feature: MA Experiment 20000113 PARAMETER Experiment Name: At_42deg_Heat_cDNA_P Parameter: Temperature (deg C) Value: 42 vs. 22
  misc_feature: MA Experiment 20000113 PARAMETER Experiment Name: At_42deg_Heat_cDNA_P Parameter: Timepoint (hr) Value: 8
  misc_feature: MA Experiment 20000113 PARAMETER Experiment Name: At_42deg_Heat_cDNA_P Parameter: Tissue Value: Aerial
  misc_feature: MA Experiment ID: 20000117 Result: Up-regulated in Transcription
  misc_feature: MA Experiment 20000117 PARAMETER Experiment Name: At_100uM_ABA_Mutants_cDNA_P Parameter: Plant Line Value: Columbia
  misc_feature: MA Experiment 20000117 PARAMETER Experiment Name: At_100uM_ABA_Mutants_cDNA_P Parameter: Timepoint (hr) Value: 6
  misc_feature: MA Experiment 20000117 PARAMETER Experiment Name: At_100uM_ABA_Mutants_cDNA_P Parameter: Tissue Value: Aerial
  misc_feature: MA Experiment 20000117 PARAMETER Experiment Name: At_100uM_ABA_Mutants_cDNA_P Parameter: Treatment Value: 100uM ABA vs. No Treatment
  misc_feature: MA Experiment ID: 20000144 Result: Up-regulated in Transcription
  misc_feature: MA Experiment 20000144 PARAMETER Experiment Name: At_42deg_Heat_cDNA_P Parameter: Temperature (deg C) Value: 42 vs. 22
  misc_feature: MA Experiment 20000144 PARAMETER Experiment Name: At_42deg_Heat_cDNA_P Parameter: Timepoint (hr) Value: 1
  misc_feature: MA Experiment 20000144 PARAMETER Experiment Name: At_42deg_Heat_cDNA_P Parameter: Tissue Value: Aerial
atcaatagttcaatactaagaaaccggcctatatatatatatttgtggtcactaatttctccaaaaaccagttgccttccgtaaaaagatggaacctcagagaaaacactcgacagccctccacacgtgtcatccctgccggcgaaccattccatacagaatctacgccgtatttcacacgtgtggcatcatagctctcatgtatcaccatgtacactcaattgtcaacgcaaacaacactctaataacatgtcttcttctcctctccgatattgttctcgccttcatgtgggcaaccacaacttccctccggttaaacccgattcatcggaccgagtaccctgaaaaatatgctgctaaaccggaggactttccaaagctggacgtttttatatgcacggctgatccgtacaaggagcctccgatgatggtggttaacaccgctttatcggtgatggcttacgagtatccgtctcataagatctcagtgtacgtatcggacgatggaggatcttccttgactttgtttgctcttatggaggctgccaagttctctaagcattggttgcccttttgcaagaataacaatgttcaagatcgctctcctgaagtttatttttcttcaaagtcacattcttcgagtgatgaagctgaaaatcttaagatgatgtacgaagacatgaagagtagagtcgaacatgtggtcgagagcggaaaagttgagactgcgtttatcgcatgcgatcaatttagttgtgtgttcgatctgtggacagataaattcactcgtcatgaccatcctaccattattatggtgctacaacataacgaaacagagatgatgccaaaccttatatatgtttcaagagaaaagagtaaagtttcaccacatcatttcaaagccggtgctcttaatactttgttacgtgtatctgccgtgatgacaaactcaccaatcattctaacactagattgtgacatgtactcaaacaatcctacaacaccacttcatgctctgtgctatttgtcagaccctaaaatcaattttgatttaggatttgtgcaatttcctcaaaaatttcaaggagtaaacaaaaatgatatttatgcatccgagctcaaacgcccatttgacatcaacacggttgggtttgatggacttatgggaccagttcatatgggaactgggtgtttcttcaatcgacgggcgttttatgggcctccgactactttgattttgcctgagatagaaacatttgggccaaatcggattgccgataagcccattaaagcccaagatattttggcgttggcacacgatgtagcaggatgtaactacgagtgcaacaccaattggggatccaagataggtttcagatatgggtcattagtagaagactacttcacaggatttatgctccattgtgaaggatggagatcaattttttgcagcccgacaaaagctgcattttatggagactccccaaaatgcctaacggatgtaataggccaacaaatccgatggtccgttggacttcttgaagtagctttttcaagatacaatccacttacctatggaatcaagccattgagcctattaatgagcttaggttattgccactatgcattttggccattttggtgtattcctctcgttgtctatggaattttaccccaagttgccctcatacatggagttagcgtctttcccaaggcatcggatccatggttttggctttacattatcttgtttctcggtgggtacgcgcaagatctatcagactttttattagaaggaggaacttatcggaaatggtggaacgatcaaagaatgtggatggtgagaggactctcttctttcttctttggttttacagagttcactctcaaaaccctaaacctctccactcaaggatataatgtcacgagtaaatccaacgacgataatgaacaaatgaagcggtatgagcaagagatcttcgattttgggccctcttcgtccatgttcttgcccattactacggtcgccatcatgaatctgctagcttttatgcgtggcctatatggtattttcacttggggagaaggacccgtccttgaactgatgctagcgagtttcgcggtggtgaattgcttaccgatctatgaagccatggtgttgaggatcgatgacggaaaattaccaaaaaggatttgtttcttagctgggctcctcagttttgttcttaccgggtcaggctacttcttcctcaagtaacttcaccattaggccattgtaaaaaaaaaaaaaacacttcaccatgagggttaattttcaacaagaatgatatgaattaatgcatcttgctcaagctgaagcaagagagaataatgtaatgaatccttcttaatatttacttttttatct

SEQ ID NO: 84985 - protein, 722 aa, Arabidopsis thaliana
  peptide (1)..(722): Ceres Seq. ID no. 12678152
  misc_feature (279)..(722): Homolog of NCBI NO: 15233649 NR Description: cellulose synthase catalytic subunit - like protein id: At4g23990.1 [Arabidopsis thaliana]
  misc_feature (1)..(243): Homolog of NCBI NO: 15233649 NR Description: cellulose synthase catalytic subunit - like protein id: At4g23990.1 [Arabidopsis thaliana]
  misc_feature (279)..(709): Homolog of NCBI NO: 15233653 NR Description: putative protein; protein id: At4g24010.1
  misc_feature (1)..(243): Homolog of NCBI NO: 15233653 NR Description: putative protein; protein id: At4g24010.1
  misc_feature (1)..(427): Homolog of NCBI NO: 21536834 NR Description: unknown [Arabidopsis thaliana]
  misc_feature (251)..(722): Homolog of NCBI NO: 2262116 NR Description: cellulose synthase isolog [Arabidopsis thaliana]
  misc_feature (1)..(435): Homolog of NCBI NO: 2262116 NR Description: cellulose synthase isolog [Arabidopsis thaliana]
  misc_feature (19)..(702): Homolog of NCBI NO: 22330270 NR Description: cellulose synthase catalytic subunit, putative; id: At1g55850.1, supported by cDNA: gi_17381167 [Arabidopsis >gi|17381168|gb|AAL36396.1| putative cellulose synthase catalytic
  misc_feature (16)..(379): Homolog of NCBI NO: 9622882 NR Description: cellulose synthase-5 [Zea mays]
  misc_feature (403)..(714): Homolog of NCBI NO: 9622882 NR Description: cellulose synthase-5 [Zea mays]
MEPQRKHSTALHTCHPCRRTIPYRIYAVFHTCGIIALMYHHVHSIVNANNTLITCLLLLSDIVLAFMWATTTSLRLNPIHRTEYPEKYAAKPEDFPKLDVFICTADPYKEPPMMVVNTALSVMAYEYPSHKISVYVSDDGGSSLTLFALMEAAKFSKHWLPFCKNNNVQDRSPEVYFSSKSHSSSDEAENLKMMYEDMKSRVEHVVESGKVETAFIACDQFSCVFDLWTDKFTRHDHPTIIMVLQHNETEMMPNLIYVSREKSKVSPHHFKAGALNTLLRVSAVMTNSPIILTLDCDMYSNNPTTPLHALCYLSDPKINFDLGFVQFPQKFQGVNKNDIYASELKRPFDINTVGFDGLMGPVHMGTGCFFNRRAFYGPPTTLILPEIETFGPNRIADKPIKAQDILALAHDVAGCNYECNTNWGSKIGFRYGSLVEDYFTGFMLHCEGWRSIFCSPTKAAFYGDSPKCLTDVIGQQIRWSVGLLEVAFSRYNPLTYGIKPLSLLMSLGYCHYAFWPFWCIPLVVYGILPQVALIHGVSVFPKASDPWFWLYIILFLGGYAQDLSDFLLEGGTYRKWWNDQRMWMVRGLSSFFFGFTEFTLKTLNLSTQGYNVTSKSNDDNEQMKRYEQEIFDFGPSSSMFLPITTVAIMNLLAFMRGLYGIFTWGEGPVLELMLASFAVVNCLPIYEAMVLRIDDGKLPKRICFLAGLLSFVLTGSGYFFLK

SEQ ID NO: 84986 - protein, 685 aa, Arabidopsis thaliana
  peptide (1)..(685): Ceres Seq. ID no. 12678153
  misc_feature (242)..(685): Homolog of NCBI NO: 15233649 NR Description: cellulose synthase catalytic subunit - like protein id: At4g23990.1 [Arabidopsis thaliana]
  misc_feature (1)..(206): Homolog of NCBI NO: 15233649 NR Description: cellulose synthase catalytic subunit - like protein id: At4g23990.1 [Arabidopsis thaliana]
  misc_feature (242)..(672): Homolog of NCBI NO: 15233653 NR Description: putative protein; protein id: At4g24010.1
  misc_feature (1)..(206): Homolog of NCBI NO: 15233653 NR Description: putative protein; protein id: At4g24010.1
  misc_feature (1)..(390): Homolog of NCBI NO: 21536834 NR Description: unknown [Arabidopsis thaliana]
  misc_feature (214)..(685): Homolog of NCBI NO: 2262116 NR Description: cellulose synthase isolog [Arabidopsis thaliana]
  misc_feature (1)..(398): Homolog of NCBI NO: 2262116 NR Description: cellulose synthase isolog [Arabidopsis thaliana]
  misc_feature (1)..(665): Homolog of NCBI NO: 22330270 NR Description: cellulose synthase catalytic subunit, putative; id: At1g55850.1, supported by cDNA: gi_17381167 [Arabidopsis >gi|17381168|gb|AAL36396.1| putative cellulose synthase catalytic
  misc_feature (1)..(342): Homolog of NCBI NO: 9622882 NR Description: cellulose synthase-5 [Zea mays]
  misc_feature (366)..(677): Homolog of NCBI NO: 9622882 NR Description: cellulose synthase-5 [Zea mays]
MYHHVHSIVNANNTLITCLLLLSDIVLAFMWATTTSLRLNPIHRTEYPEKYAAKPEDFPKLDVFICTADPYKEPPMMVVNTALSVMAYEYPSHKISVYVSDDGGSSLTLFALMEAAKFSKHWLPFCKNNNVQDRSPEVYFSSKSHSSSDEAENLKMMYEDMKSRVEHVVESGKVETAFIACDQFSCVFDLWTDKFTRHDHPTIIMVLQHNETEMMPNLIYVSREKSKVSPHHFKAGALNTLLRVSAVMTNSPIILTLDCDMYSNNPTTPLHALCYLSDPKINFDLGFVQFPQKFQGVNKNDIYASELKRPFDINTVGFDGLMGPVHMGTGCFFNRRAFYGPPTTLILPEIETFGPNRIADKPIKAQDILALAHDVAGCNYECNTNWGSKIGFRYGSLVEDYFTGFMLHCEGWRSIFCSPTKAAFYGDSPKCLTDVIGQQIRWSVGLLEVAFSRYNPLTYGIKPLSLLMSLGYCHYAFWPFWCIPLVVYGILPQVALIHGVSVFPKASDPWFWLYIILFLGGYAQDLSDFLLEGGTYRKWWNDQRMWMVRGLSSFFFGFTEFTLKTLNLSTQGYNVTSKSNDDNEQMKRYEQEIFDFGPSSSMFLPITTVAIMNLLAFMRGLYGIFTWGEGPVLELMLASFAVVNCLPIYEAMVLRIDDGKLPKRICFLAGLLSFVLTGSGYFFLK

SEQ ID NO: 84987 - protein, 656 aa, Arabidopsis thaliana
  peptide (1)..(656): Ceres Seq. ID no. 12678154
  misc_feature (213)..(656): Homolog of NCBI NO: 15233649 NR Description: cellulose synthase catalytic subunit - like protein id: At4g23990.1 [Arabidopsis thaliana]
  misc_feature (1)..(177): Homolog of NCBI NO: 15233649 NR Description: cellulose synthase catalytic subunit - like protein id: At4g23990.1 [Arabidopsis thaliana]
  misc_feature (213)..(643): Homolog of NCBI NO: 15233653 NR Description: putative protein; protein id: At4g24010.1
  misc_feature (1)..(177): Homolog of NCBI NO: 15233653 NR Description: putative protein; protein id: At4g24010.1
  misc_feature (1)..(361): Homolog of NCBI NO: 21536834 NR Description: unknown [Arabidopsis thaliana]
  misc_feature (185)..(656): Homolog of NCBI NO: 2262116 NR Description: cellulose synthase isolog [Arabidopsis thaliana]
  misc_feature (1)..(369): Homolog of NCBI NO: 2262116 NR Description: cellulose synthase isolog [Arabidopsis thaliana]
  misc_feature (1)..(636): Homolog of NCBI NO: 22330270 NR Description: cellulose synthase catalytic subunit, putative; id: At1g55850.1, supported by cDNA: gi_17381167 [Arabidopsis >gi|17381168|gb|AAL36396.1| putative cellulose synthase catalytic
  misc_feature (1)..(313): Homolog of NCBI NO: 9622882 NR Description: cellulose synthase-5 [Zea mays]
  misc_feature (337)..(648): Homolog of NCBI NO: 9622882 NR Description: cellulose synthase-5 [Zea mays]
MWATTTSLRLNPIHRTEYPEKYAAKPEDFPKLDVFICTADPYKEPPMMVVNTALSVMAYEYPSHKISVYVSDDGGSSLTLFALMEAAKFSKHWLPFCKNNNVQDRSPEVYFSSKSHSSSDEAENLKMMYEDMKSRVEHVVESGKVETAFIACDQFSCVFDLWTDKFTRHDHPTIIMVLQHNETEMMPNLIYVSREKSKVSPHHFKAGALNTLLRVSAVMTNSPIILTLDCDMYSNNPTTPLHALCYLSDPKINFDLGFVQFPQKFQGVNKNDIYASELKRPFDINTVGFDGLMGPVHMGTGCFFNRRAFYGPPTTLILPEIETFGPNRIADKPIKAQDILALAHDVAGCNYECNTNWGSKIGFRYGSLVEDYFTGFMLHCEGWRSIFCSPTKAAFYGDSPKCLTDVIGQQIRWSVGLLEVAFSRYNPLTYGIKPLSLLMSLGYCHYAFWPFWCIPLVVYGILPQVALIHGVSVFPKASDPWFWLYIILFLGGYAQDLSDFLLEGGTYRKWWNDQRMWMVRGLSSFFFGFTEFTLKTLNLSTQGYNVTSKSNDDNEQMKRYEQEIFDFGPSSSMFLPITTVAIMNLLAFMRGLYGIFTWGEGPVLELMLASFAVVNCLPIYEAMVLRIDDGKLPKRICFLAGLLSFVLTGSGYFFLK

SEQ ID NO: 84988 - DNA, 1484 bp, Arabidopsis thaliana
  misc_feature (1)..(1484): Ceres Seq. ID no. 12678155
  misc_feature: MA Experiment ID: 108473 Result: Up-regulated in Transcription
  misc_feature: MA Experiment 108473 PARAMETER Experiment Name: At_Drought_Flowers_cDNA_P Parameter: Timepoint (hr) Value: 7 d
  misc_feature: MA Experiment 108473 PARAMETER Experiment Name: At_Drought_Flowers_cDNA_P Parameter: Tissue Value: Flower
  misc_feature: MA Experiment 108473 PARAMETER Experiment Name: At_Drought_Flowers_cDNA_P Parameter: Treatment Value: Drought vs. No Drought
  misc_feature: MA Experiment ID: 108488 Result: Down-regulated in Transcription
  misc_feature: MA Experiment ID: 108501 Result: Up-regulated in Transcription
  misc_feature: MA Experiment 108501 PARAMETER Experiment Name: At_ap2_floral_buds_cDNA_P Parameter: Plant Line Value: ap2 (Ler.)
  misc_feature: MA Experiment 108501 PARAMETER Experiment Name: At_ap2_floral_buds_cDNA_P Parameter: Tissue Value: Closed Flower
  misc_feature: MA Experiment ID: 108561 Result: Up-regulated in Transcription
  misc_feature: MA Experiment 108561 PARAMETER Experiment Name: At_100uM_ABA_cDNA_P Parameter: Timepoint (hr) Value: 6
  misc_feature: MA Experiment 108561 PARAMETER Experiment Name: At_100uM_ABA_cDNA_P Parameter: Tissue Value: Aerial
  misc_feature: MA Experiment 108561 PARAMETER Experiment Name: At_100uM_ABA_cDNA_P Parameter: Treatment Value: 100uM ABA vs. No Treatment
  misc_feature: MA Experiment ID: 108572 Result: Up-regulated in Transcription
  misc_feature: MA Experiment 108572 PARAMETER Experiment Name: At_Drought_cDNA_P Parameter: Timepoint (hr) Value: 1
  misc_feature: MA Experiment 108572 PARAMETER Experiment Name: At_Drought_cDNA_P Parameter: Tissue Value: Aerial
  misc_feature: MA Experiment 108572 PARAMETER Experiment Name: At_Drought_cDNA_P Parameter: Treatment Value: Drought vs. No Drought
  misc_feature: MA Experiment ID: 108573 Result: Up-regulated in Transcription
  misc_feature: MA Experiment 108573 PARAMETER Experiment Name: At_Drought_cDNA_P Parameter: Timepoint (hr) Value: 6
  misc_feature: MA Experiment 108573 PARAMETER Experiment Name: At_Drought_cDNA_P Parameter: Tissue Value: Aerial
  misc_feature: MA Experiment 108573 PARAMETER Experiment Name: At_Drought_cDNA_P Parameter: Treatment Value: Drought vs. No Drought
  misc_feature: MA Experiment ID: 108605 Result: Up-regulated in Transcription
  misc_feature: MA Experiment 108605 PARAMETER Experiment Name: At_100uM_ABA_cDNA_P Parameter: Timepoint (hr) Value: 6
  misc_feature: MA Experiment 108605 PARAMETER Experiment Name: At_100uM_ABA_cDNA_P Parameter: Tissue Value: Aerial
  misc_feature: MA Experiment 108605 PARAMETER Experiment Name: At_100uM_ABA_cDNA_P Parameter: Treatment Value: 100uM ABA vs. No Treatment
  misc_feature: MA Experiment ID: 108607 Result: Up-regulated in Transcription
  misc_feature: MA Experiment 108607 PARAMETER Experiment Name: At_100uM_ABA_cDNA_P Parameter: Timepoint (hr) Value: 4
  misc_feature: MA Experiment 108607 PARAMETER Experiment Name: At_100uM_ABA_cDNA_P Parameter: Tissue Value: Aerial
  misc_feature: MA Experiment 108607 PARAMETER Experiment Name: At_100uM_ABA_cDNA_P Parameter: Treatment Value: 100uM ABA vs. No Treatment
  misc_feature: MA Experiment ID: 108608 Result: Up-regulated in Transcription
  misc_feature: MA Experiment 108608 PARAMETER Experiment Name: At_100uM_ABA_cDNA_P Parameter: Timepoint (hr) Value: 1
  misc_feature: MA Experiment 108608 PARAMETER Experiment Name: At_100uM_ABA_cDNA_P Parameter: Tissue Value: Aerial
  misc_feature: MA Experiment 108608 PARAMETER Experiment Name: At_100uM_ABA_cDNA_P Parameter: Treatment Value: 100uM ABA vs. No Treatment
  misc_feature: MA Experiment ID: 108609 Result: Up-regulated in Transcription
  misc_feature: MA Experiment 108609 PARAMETER Experiment Name: At_100uM_ABA_cDNA_P Parameter: Timepoint (hr) Value: 24
  misc_feature: MA Experiment 108609 PARAMETER Experiment Name: At_100uM_ABA_cDNA_P Parameter: Tissue Value: Aerial
  misc_feature: MA Experiment 108609 PARAMETER Experiment Name: At_100uM_ABA_cDNA_P Parameter: Treatment Value: 100uM ABA vs. No Treatment
  misc_feature: MA Experiment ID: 20000086 Result: Up-regulated in Transcription
  misc_feature: MA Experiment 20000086 PARAMETER Experiment Name: At_100uM_ABA_Mutants_cDNA_P Parameter: Plant Line Value: CS22
  misc_feature: MA Experiment 20000086 PARAMETER Experiment Name: At_100uM_ABA_Mutants_cDNA_P Parameter: Timepoint (hr) Value: 6
  misc_feature: MA Experiment 20000086 PARAMETER Experiment Name: At_100uM_ABA_Mutants_cDNA_P Parameter: Tissue Value: Aerial
  misc_feature: MA Experiment 20000086 PARAMETER Experiment Name: At_100uM_ABA_Mutants_cDNA_P Parameter: Treatment Value: 100uM ABA vs. No Treatment
  misc_feature: MA Experiment ID: 20000087 Result: Up-regulated in Transcription
  misc_feature: MA Experiment 20000087 PARAMETER Experiment Name: At_100uM_ABA_Mutants_cDNA_P Parameter: Plant Line Value: WS
  misc_feature: MA Experiment 20000087 PARAMETER Experiment Name: At_100uM_ABA_Mutants_cDNA_P Parameter: Timepoint (hr) Value: 6
  misc_feature: MA Experiment 20000087 PARAMETER Experiment Name: At_100uM_ABA_Mutants_cDNA_P Parameter: Tissue Value: Aerial
  misc_feature: MA Experiment 20000087 PARAMETER Experiment Name: At_100uM_ABA_Mutants_cDNA_P Parameter: Treatment Value: 100uM ABA vs. No Treatment
  misc_feature: MA Experiment ID: 20000088 Result: Up-regulated in Transcription
  misc_feature: MA Experiment 20000088 PARAMETER Experiment Name: At_100uM_ABA_Mutants_cDNA_P Parameter: Plant Line Value: Landsberg
  misc_feature: MA Experiment 20000088 PARAMETER Experiment Name: At_100uM_ABA_Mutants_cDNA_P Parameter: Timepoint (hr) Value: 6
  misc_feature: MA Experiment 20000088 PARAMETER Experiment Name: At_100uM_ABA_Mutants_cDNA_P Parameter: Tissue Value: Aerial
  misc_feature: MA Experiment 20000088 PARAMETER Experiment Name: At_100uM_ABA_Mutants_cDNA_P Parameter: Treatment Value: 100uM ABA vs. No Treatment
  misc_feature: MA Experiment ID: 20000113 Result: Down-regulated in Transcription
  misc_feature: MA Experiment 20000113 PARAMETER Experiment Name: At_42deg_Heat_cDNA_P Parameter: Temperature (deg C) Value: 42 vs. 22
  misc_feature: MA Experiment 20000113 PARAMETER Experiment Name: At_42deg_Heat_cDNA_P Parameter: Timepoint (hr) Value: 8
  misc_feature: MA Experiment 20000113 PARAMETER Experiment Name: At_42deg_Heat_cDNA_P Parameter: Tissue Value: Aerial
  misc_feature: MA Experiment ID: 20000117 Result: Up-regulated in Transcription
  misc_feature: MA Experiment 20000117 PARAMETER Experiment Name: At_100uM_ABA_Mutants_cDNA_P Parameter: Plant Line Value: Columbia
  misc_feature: MA Experiment 20000117 PARAMETER Experiment Name: At_100uM_ABA_Mutants_cDNA_P Parameter: Timepoint (hr) Value: 6
  misc_feature: MA Experiment 20000117 PARAMETER Experiment Name: At_100uM_ABA_Mutants_cDNA_P Parameter: Tissue Value: Aerial
  misc_feature: MA Experiment 20000117 PARAMETER Experiment Name: At_100uM_ABA_Mutants_cDNA_P Parameter: Treatment Value: 100uM ABA vs. No Treatment
  misc_feature: MA Experiment ID: 20000144 Result: Up-regulated in Transcription
  misc_feature: MA Experiment 20000144 PARAMETER Experiment Name: At_42deg_Heat_cDNA_P Parameter: Temperature (deg C) Value: 42 vs. 22
  misc_feature: MA Experiment 20000144 PARAMETER Experiment Name: At_42deg_Heat_cDNA_P Parameter: Timepoint (hr) Value: 1
  misc_feature: MA Experiment 20000144 PARAMETER Experiment Name: At_42deg_Heat_cDNA_P Parameter: Tissue Value: Aerial
  misc_feature: MA Experiment ID: 20000264 Result: Up-regulated in Transcription
  misc_feature: MA Experiment 20000264 PARAMETER Experiment Name: At_Open_Flower_P Parameter: Age (day) Value: 21
  misc_feature: MA Experiment 20000264 PARAMETER Experiment Name: At_Open_Flower_P Parameter: Plant Line Value: WS
  misc_feature: MA Experiment 20000264 PARAMETER Experiment Name: At_Open_Flower_P Parameter: Tissue Value: Open Flower vs. Whole Plant
  misc_feature: MA Experiment ID: 20000265 Result: Up-regulated in Transcription
  misc_feature: MA Experiment 20000265 PARAMETER Experiment Name: At_Open_Flower_P Parameter: Age (day) Value: 21
  misc_feature: MA Experiment 20000265 PARAMETER Experiment Name: At_Open_Flower_P Parameter: Plant Line Value: WS
  misc_feature: MA Experiment 20000265 PARAMETER Experiment Name: At_Open_Flower_P Parameter: Tissue Value: Closed Flower vs. Whole Plant
  misc_feature: MA Experiment ID: 20000286 Result: Up-regulated in Transcription
  misc_feature: MA Experiment 20000286 PARAMETER Experiment Name: At_Open_Flower_P Parameter: Age (day) Value: 21
  misc_feature: MA Experiment 20000286 PARAMETER Experiment Name: At_Open_Flower_P Parameter: Plant Line Value: WS
  misc_feature: MA Experiment 20000286 PARAMETER Experiment Name: At_Open_Flower_P Parameter: Tissue Value: Half Open vs. Whole Plant
  misc_feature: MA Experiment ID: 20000794 Result: Up-regulated in Transcription
  misc_feature: MA Experiment 20000794 PARAMETER Experiment Name: At_Petals_P Parameter: Age (day) Value: 23-25 days
  misc_feature: MA Experiment 20000794 PARAMETER Experiment Name: At_Petals_P Parameter: Plant Line Value: WS
  misc_feature: MA Experiment 20000794 PARAMETER Experiment Name: At_Petals_P Parameter: Tissue Value: Petals vs. Whole plant
  misc_feature: MA Experiment ID: 20001556 Result: Up-regulated in Transcription
  misc_feature: MA Experiment 20001556 PARAMETER Experiment Name: At_Drought_Soil_Dry_P Parameter: Age (day) Value: 26
  misc_feature: MA Experiment 20001556 PARAMETER Experiment Name: At_Drought_Soil_Dry_P Parameter: Organism Value: A. thaliana
  misc_feature: MA Experiment 20001556 PARAMETER Experiment Name: At_Drought_Soil_Dry_P Parameter: Plant Line Value: WS
  misc_feature: MA Experiment 20001556 PARAMETER Experiment Name: At_Drought_Soil_Dry_P Parameter: Post Timepoint (hr) Value: None
  misc_feature: MA Experiment 20001556 PARAMETER Experiment Name: At_Drought_Soil_Dry_P Parameter: Post-Treatment Value: None
  misc_feature: MA Experiment 20001556 PARAMETER Experiment Name: At_Drought_Soil_Dry_P Parameter: Timepoint (day) Value: 12
  misc_feature: MA Experiment 20001556 PARAMETER Experiment Name: At_Drought_Soil_Dry_P Parameter: Treatment Value: Drought vs. No Drought
  misc_feature: MA Experiment ID: 20001904 Result: Up-regulated in Transcription
  misc_feature: MA Experiment 20001904 PARAMETER Experiment Name: At_Drought_Reproduction_P Parameter: Age (day) Value: 37
  misc_feature: MA Experiment 20001904 PARAMETER Experiment Name: At_Drought_Reproduction_P Parameter: Organism Value: A. thaliana
  misc_feature: MA Experiment 20001904 PARAMETER Experiment Name: At_Drought_Reproduction_P Parameter: Plant Line Value: WS
  misc_feature: MA Experiment 20001904 PARAMETER Experiment Name: At_Drought_Reproduction_P Parameter: Timepoint (day) Value: 7
  misc_feature: MA Experiment 20001904 PARAMETER Experiment Name: At_Drought_Reproduction_P Parameter: Tissue Value: Rosettes
  misc_feature: MA Experiment 20001904 PARAMETER Experiment Name: At_Drought_Reproduction_P Parameter: Treatment Value: Drought vs. No Drought
  misc_feature: MA Experiment ID: 20001905 Result: Up-regulated in Transcription
  misc_feature: MA Experiment 20001905 PARAMETER Experiment Name: At_Drought_Reproduction_P Parameter: Age (day) Value: 40
  misc_feature: MA Experiment 20001905 PARAMETER Experiment Name: At_Drought_Reproduction_P Parameter: Organism Value: A. thaliana
  misc_feature: MA Experiment 20001905 PARAMETER Experiment Name: At_Drought_Reproduction_P Parameter: Plant Line Value: WS
  misc_feature: MA Experiment 20001905 PARAMETER Experiment Name: At_Drought_Reproduction_P Parameter: Timepoint (day) Value: 10
  misc_feature: MA Experiment 20001905 PARAMETER Experiment Name: At_Drought_Reproduction_P Parameter: Tissue Value: Rosettes
  misc_feature: MA Experiment 20001905 PARAMETER Experiment Name: At_Drought_Reproduction_P Parameter: Treatment Value: Drought vs. No Drought
  misc_feature: MA Experiment ID: 20001906 Result: Up-regulated in Transcription
  misc_feature: MA Experiment 20001906 PARAMETER Experiment Name: At_Drought_Reproduction_P Parameter: Age (day) Value: 35
  misc_feature: MA Experiment 20001906 PARAMETER Experiment Name: At_Drought_Reproduction_P Parameter: Organism Value: A. thaliana
  misc_feature: MA Experiment 20001906 PARAMETER Experiment Name: At_Drought_Reproduction_P Parameter: Plant Line Value: WS
  misc_feature: MA Experiment 20001906 PARAMETER Experiment Name: At_Drought_Reproduction_P Parameter: Timepoint (day) Value: 5
  misc_feature: MA Experiment 20001906 PARAMETER Experiment Name: At_Drought_Reproduction_P Parameter: Tissue Value: Siliques
  misc_feature: MA Experiment 20001906 PARAMETER Experiment Name: At_Drought_Reproduction_P Parameter: Treatment Value: Drought vs. No Drought
  misc_feature: MA Experiment ID: 20001910 Result: Up-regulated in Transcription
  misc_feature: MA Experiment 20001910 PARAMETER Experiment Name: At_Drought_Reproduction_P Parameter: Age (day) Value: 37
  misc_feature: MA Experiment 20001910 PARAMETER Experiment Name: At_Drought_Reproduction_P Parameter: Organism Value: A. thaliana
  misc_feature: MA Experiment 20001910 PARAMETER Experiment Name: At_Drought_Reproduction_P Parameter: Plant Line Value: WS
  misc_feature: MA Experiment 20001910 PARAMETER Experiment Name: At_Drought_Reproduction_P Parameter: Timepoint (day) Value: 7
  misc_feature: MA Experiment 20001910 PARAMETER Experiment Name: At_Drought_Reproduction_P Parameter: Tissue Value: Flowers
  misc_feature: MA Experiment 20001910 PARAMETER Experiment Name: At_Drought_Reproduction_P Parameter: Treatment Value: Drought vs. No Drought
  misc_feature: MA Experiment ID: 20001911 Result: Up-regulated in Transcription
  misc_feature: MA Experiment 20001911 PARAMETER Experiment Name: At_Drought_Reproduction_P Parameter: Age (day) Value: 40
  misc_feature: MA Experiment 20001911 PARAMETER Experiment Name: At_Drought_Reproduction_P Parameter: Organism Value: A. thaliana
  misc_feature: MA Experiment 20001911 PARAMETER Experiment Name: At_Drought_Reproduction_P Parameter: Plant Line Value: WS
  misc_feature: MA Experiment 20001911 PARAMETER Experiment Name: At_Drought_Reproduction_P Parameter: Timepoint (day) Value: 10
  misc_feature: MA Experiment 20001911 PARAMETER Experiment Name: At_Drought_Reproduction_P Parameter: Tissue Value: Flowers
  misc_feature: MA Experiment 20001911 PARAMETER Experiment Name: At_Drought_Reproduction_P Parameter: Treatment Value: Drought vs. No Drought
atagtgtgtatattcagaaaagttatcaatagttcaatactaagaaaccggcctatatatatatatttgtggtcactaatttctccaaaaaccagttgccttccgtaaaaagatggaacctcagagaaaacactcgacagccctccacacgtgtcatccctgccggcgaaccattccatacagaatctacgccgtatttcacacgtgtggcatcatagctctcatgtatcaccatgtacactcaattgtcaacgcaaacaacactctaataacatgtcttcttctcctctccgatattgttctcgccttcatgtgggcaaccacaacttccctccggttaaacccgattcatcggaccgagtaccctgaaaaatatgctgctaaaccggaggactttccaaagctggacgtttttatatgcacggctgatccgtacaaggagcctccgatgatggtggttaacaccgctttatcggtgatggcttacgagtatccgtctcataagatctcagtgtacgtatcggacgatggaggatcttccttgactttgtttgctcttatggaggctgccaagttctctaagcattggttgcccttttgcaagaataacaatgttcaagatcgctctcctgaagtttatttttcttcaaagtcacattcttcgagtgatgaagctgaaaatcttaagatgatgtacgaagacatgaagagtagagtcgaacatgtggtcgagagcggaaaagttgagactgcgtttatcgcatgcgatcaatttagttgtgtgttcgatctgtggacagataaattcactcgtcatgaccatcctaccattattatggtgctacaacataacgaaacagagatgatgccaaaccttatatatgtttcaagagaaaagagtaaagtttcaccacatcatttcaaagccggtgctcttaatactttgttacgtgtatctgccgtgatgacaaactcaccaatcattctaacactagattgtgacatgtactcaaacaatcctacaacaccacttcatgctctgtgctatttgtcagaccctaaaatcaattttgatttaggatttgtgcaatttcctcaaaaatttcaaggagtaaacaaaaatgatatttatgcatccgagctcaaacgcccatttgacatcaacacggttgggtttgatggacttatgggaccagttcatatgggaactgggtgtttcttcaatcgacgggcgttttatgggcctccgactactttgattttgcctgagatagaaacatttgggccaaatcggattgccgataagcccattaaagcccaagatattttggcgttggcacacgatgtagcaggatgtaactacgagtgcaacaccaattggggatccaaggtaagattaaaatgaactttagctttcttttatgtatgttgattttttggttatgtttacagattttgtttcttttacatcaactagtcttctc

SEQ ID NO: 84989 - protein, 430 aa, Arabidopsis thaliana; identical to SEQ ID NO: 40164
  peptide (1)..(430): Ceres Seq. ID no. 12678156
  misc_feature (10)..(427): Pfam Name: Cellulose synthase Pfam Description: Cellulose synthase
  misc_feature (1)..(430): Homolog of NCBI NO: 17380774 NR Description: unknown protein [Arabidopsis thaliana]
  misc_feature (1)..(427): Homolog of NCBI NO: 30686386 NR Description: cellulose synthase - related [Arabidopsis >gi|17979143|gb|AAL49829.1| unknown protein [Arabidopsis >gi|20465365|gb|AAM20086.1| unknown protein [Arabidopsis
  misc_feature (1)..(427): Homolog of NCBI NO: 2262115 NR Description: cellulose synthase isolog [Arabidopsis thaliana]
  misc_feature (1)..(430): Homolog of NCBI NO: 21536834 NR Description: unknown [Arabidopsis thaliana]
  misc_feature (1)..(243): Homolog of NCBI NO: 7487588 NR Description: hypothetical protein T32A16.170 - Arabidopsis >gi|4972104|emb|CAB43900.1| putative protein [Arabidopsis >gi|7269249|emb|CAB81318.1| putative protein [Arabidopsis
  misc_feature (278)..(427): Homolog of NCBI NO: 7487588 NR Description: hypothetical protein T32A16.170 - Arabidopsis >gi|4972104|emb|CAB43900.1| putative protein [Arabidopsis >gi|7269249|emb|CAB81318.1| putative protein [Arabidopsis
  misc_feature (1)..(426): Homolog of NCBI NO: 2262116 NR Description: cellulose synthase isolog [Arabidopsis thaliana]
  misc_feature (1)..(243): Homolog of NCBI NO: 15233649 NR Description: cellulose synthase catalytic subunit - like protein id: At4g23990.1 [Arabidopsis thaliana]
  misc_feature (279)..(427): Homolog of NCBI NO: 15233649 NR Description: cellulose synthase catalytic subunit - like protein id: At4g23990.1 [Arabidopsis thaliana]
  misc_feature (1)..(243): Homolog of NCBI NO: 15233653 NR Description: putative protein; protein id: At4g24010.1

SEQ ID NO: 84990 - protein, 393 aa, Arabidopsis thaliana; identical to SEQ ID NO: 40165
  peptide (1)..(393): Ceres Seq. ID no. 12678157
  misc_feature (1)..(390): Pfam Name: Cellulose synthase Pfam Description: Cellulose synthase
  misc_feature (1)..(393): Homolog of NCBI NO: 17380774 NR Description: unknown protein [Arabidopsis thaliana]
  misc_feature (1)..(390): Homolog of NCBI NO: 30686386 NR Description: cellulose synthase - related [Arabidopsis >gi|17979143|gb|AAL49829.1| unknown protein [Arabidopsis >gi|20465365|gb|AAM20086.1| unknown protein [Arabidopsis
  misc_feature (1)..(390): Homolog of NCBI NO: 2262115 NR Description: cellulose synthase isolog [Arabidopsis thaliana]
  misc_feature (1)..(393): Homolog of NCBI NO: 21536834 NR Description: unknown [Arabidopsis thaliana]
  misc_feature (1)..(206): Homolog of NCBI NO: 7487588 NR Description: hypothetical protein T32A16.170 - Arabidopsis >gi|4972104|emb|CAB43900.1| putative protein [Arabidopsis >gi|7269249|emb|CAB81318.1| putative protein [Arabidopsis
  misc_feature (241)..(390): Homolog of NCBI NO: 7487588 NR Description: hypothetical protein T32A16.170 - Arabidopsis >gi|4972104|emb|CAB43900.1| putative protein [Arabidopsis >gi|7269249|emb|CAB81318.1| putative protein [Arabidopsis
  misc_feature (1)..(389): Homolog of NCBI NO: 2262116 NR Description: cellulose synthase isolog [Arabidopsis thaliana]
  misc_feature (1)..(206): Homolog of NCBI NO: 15233649 NR Description: cellulose synthase catalytic subunit - like protein id: At4g23990.1 [Arabidopsis thaliana]
  misc_feature (242)..(390): Homolog of NCBI NO: 15233649 NR Description: cellulose synthase catalytic subunit - like protein id: At4g23990.1 [Arabidopsis thaliana]
  misc_feature (1)..(206): Homolog of NCBI NO: 15233653 NR Description: putative protein; protein id: At4g24010.1

SEQ ID NO: 84991 - protein, 364 aa, Arabidopsis thaliana; identical to SEQ ID NO: 40166
  peptide (1)..(364): Ceres Seq. ID no. 12678158
  misc_feature (1)..(361): Pfam Name: Cellulose synthase Pfam Description: Cellulose synthase
  misc_feature (1)..(364): Homolog of NCBI NO: 17380774 NR Description: unknown protein [Arabidopsis thaliana]
  misc_feature (1)..(361): Homolog of NCBI NO: 30686386 NR Description: cellulose synthase - related [Arabidopsis >gi|17979143|gb|AAL49829.1| unknown protein [Arabidopsis >gi|20465365|gb|AAM20086.1| unknown protein [Arabidopsis
  misc_feature (1)..(361): Homolog of NCBI NO: 2262115 NR Description: cellulose synthase isolog [Arabidopsis thaliana]
  misc_feature (1)..(364): Homolog of NCBI NO: 21536834 NR Description: unknown [Arabidopsis thaliana]
  misc_feature (1)..(177): Homolog of NCBI NO: 7487588 NR Description: hypothetical protein T32A16.170 - Arabidopsis >gi|4972104|emb|CAB43900.1| putative protein [Arabidopsis >gi|7269249|emb|CAB81318.1| putative protein [Arabidopsis
  misc_feature (212)..(361): Homolog of NCBI NO: 7487588 NR Description: hypothetical protein T32A16.170 - Arabidopsis >gi|4972104|emb|CAB43900.1| putative protein [Arabidopsis >gi|7269249|emb|CAB81318.1| putative protein [Arabidopsis
  misc_feature (1)..(360): Homolog of NCBI NO: 2262116 NR Description: cellulose synthase isolog [Arabidopsis thaliana]
  misc_feature (1)..(177): Homolog of NCBI NO: 15233649 NR Description: cellulose synthase catalytic subunit - like protein id: At4g23990.1 [Arabidopsis thaliana]
  misc_feature (213)..(361): Homolog of NCBI NO: 15233649 NR Description: cellulose synthase catalytic subunit - like protein id: At4g23990.1 [Arabidopsis thaliana]
  misc_feature (1)..(177): Homolog of NCBI NO: 15233653 NR Description: putative protein; protein id: At4g24010.1

SEQ ID NO: 84992 - DNA, 1837 bp, Arabidopsis thaliana
  misc_feature (1)..(1837): Ceres Seq. ID no. 12678249
  misc_feature: MA Experiment ID: 20000794 Result: Up-regulated in Transcription
  misc_feature: MA Experiment 20000794 PARAMETER Experiment Name: At_Petals_P Parameter: Age (day) Value: 23-25 days
  misc_feature: MA Experiment 20000794 PARAMETER Experiment Name: At_Petals_P Parameter: Plant Line Value: WS
  misc_feature: MA Experiment 20000794 PARAMETER Experiment Name: At_Petals_P Parameter: Tissue Value: Petals vs. Whole plant
  misc_feature: MA Experiment ID: 20001557 Result: Down-regulated in Transcription
  misc_feature: MA Experiment 20001557 PARAMETER Experiment Name: At_Drought_Soil_Dry_P Parameter: Age (day) Value: 27
  misc_feature: MA Experiment 20001557 PARAMETER Experiment Name: At_Drought_Soil_Dry_P Parameter: Organism Value: A. thaliana
  misc_feature: MA Experiment 20001557 PARAMETER Experiment Name: At_Drought_Soil_Dry_P Parameter: Plant Line Value: WS
  misc_feature: MA Experiment 20001557 PARAMETER Experiment Name: At_Drought_Soil_Dry_P Parameter: Post Timepoint (hr) Value: 3
  misc_feature: MA Experiment 20001557 PARAMETER Experiment Name: At_Drought_Soil_Dry_P Parameter: Post-Treatment Value: Re-Water vs. No Drought
  misc_feature: MA Experiment 20001557 PARAMETER Experiment Name: At_Drought_Soil_Dry_P Parameter: Timepoint (day) Value: 13
  misc_feature: MA Experiment 20001557 PARAMETER Experiment Name: At_Drought_Soil_Dry_P Parameter: Treatment Value: Drought vs. No Drought
  misc_feature: MA Experiment ID: 20001560 Result: Down-regulated in Transcription
  misc_feature: MA Experiment 20001560 PARAMETER Experiment Name: At_Drought_Soil_Dry_P Parameter: Age (day) Value: 28
  misc_feature: MA Experiment 20001560 PARAMETER Experiment Name: At_Drought_Soil_Dry_P Parameter: Organism Value: A. thaliana
  misc_feature: MA Experiment 20001560 PARAMETER Experiment Name: At_Drought_Soil_Dry_P Parameter: Plant Line Value: WS
  misc_feature: MA Experiment 20001560 PARAMETER Experiment Name: At_Drought_Soil_Dry_P Parameter: Post Timepoint (hr) Value: None
  misc_feature: MA Experiment 20001560 PARAMETER Experiment Name: At_Drought_Soil_Dry_P Parameter: Post-Treatment Value: None
  misc_feature: MA Experiment 20001560 PARAMETER Experiment Name: At_Drought_Soil_Dry_P Parameter: Timepoint (day) Value: 14
  misc_feature: MA Experiment 20001560 PARAMETER Experiment Name: At_Drought_Soil_Dry_P Parameter: Treatment Value: Drought vs. No Drought
  misc_feature: MA Experiment ID: 20001911 Result: Up-regulated in Transcription
  misc_feature: MA Experiment 20001911 PARAMETER Experiment Name: At_Drought_Reproduction_P Parameter: Age (day) Value: 40
  misc_feature: MA Experiment 20001911 PARAMETER Experiment Name: At_Drought_Reproduction_P Parameter: Organism Value: A. thaliana
  misc_feature: MA Experiment 20001911 PARAMETER Experiment Name: At_Drought_Reproduction_P Parameter: Plant Line Value: WS
  misc_feature: MA Experiment 20001911 PARAMETER Experiment Name: At_Drought_Reproduction_P Parameter: Timepoint (day) Value: 10
  misc_feature: MA Experiment 20001911 PARAMETER Experiment Name: At_Drought_Reproduction_P Parameter: Tissue Value: Flowers
  misc_feature: MA Experiment 20001911 PARAMETER Experiment Name: At_Drought_Reproduction_P Parameter: Treatment Value: Drought vs. No Drought
tttcatttgcttcgtctctccggttgttaccaccacacaacgccatggaagctgctcttgctgcatgcgctcttccatcgctccgaattctcaatacgaaacctcgtttcagatgttccttctccaatccaagcctacccatttctcctaattcccttatcacccgcaaatcaagtcgattcacaaccgcagtatcatcaccaccatcatcatcagccgctacgtcaacgaattctccaccggaacctgaagccctattcgaacccgggtcggataagttcgattggtacgctaattggtacccagtgatgccaatttgcgatcttgacaagaaggttcctcatgggaagaaagttatggggattgatttggttgtttggtgggataggaacgagaagcaatggaaagtgatggatgacacgtgtcctcatcgtcttgctcctttgtctgatggaaggattgatcaatgggggaggttgcaatgtgtttatcatggatggtgctttaatggttccggtgactgtaaactcattcctcaagctcctcctgatggtcctccggtccacactttcaagcaagcttgtgtagctgtttacccgagtactgtgcagcatgagatcatttggttttggccaaacagtgatccaaagtacaaaaacattattgaaaccaacaagcctccttacattccagagttagaagacccatcattcactaagttgatggggaatcgtgatattccttacgggtacgatgtcttggtggaaaacctcatggacccggctcatgttccttatgcacattatggactgatgcggtttcctaaaccaaaaggcaaatacataatttgtatttcaaatagttgttttaatccttttaccaaccttcagattcttcttgcagagaagattgacagagaaggggggaaaccactcgaaatcaacgttaaaaaactagacaacaaagggttcttttcaaaacaagaatggggttattctaattttattgcaccatgtgtgtatcgctcttccacagaccctctaccagagcaggaacatgagtatcccgcaccagctgcttctgacaaggcggcattgtcaaagcggagattgtctttgatctttatatgtattccggtcagtccaggtcgtagtaggctgatatggacgttcccgaggaattttggtgtatttattgataagattgtccctagatgggtgtttcacattggtcaaaatacgattctagactcagatttgcacctccttcatgtagaggagcggaagatactggagagaggccctgaaaactggcaaaaagcttgctttatcccaacaaaatcagacgctaatgtggttacattcaggagatggtttaacaagtacagcgaggctcgagtcgattggagaggaaagtttgatccatttcttcttcctcctacgcctccccgagaacagctcttcgacaggtattggtcgcatgttgagaactgcagcagctgcaagaaagctcacaaatatctcaatgcgctagaggtgatcttacaaatcgcatccgttgctatgatcggagtcatggcggtgttgaagcaaacgacaatgtcgaatgtggctagaattgcagtgcttgtggcggctgttttaagttttgcagcttcaaagtggctatcacacttcatctacaagacattccattaccatgactacaaccatgctgttgtttgaaatgtatattggtgtttgtacttcgtatatatactcatcggatgtattcagtccacatggtgttgtacataacagttatacagaaactaattcttgaatctataccgtttact

SEQ ID NO: 84993 - protein, 573 aa, Arabidopsis thaliana
  peptide (1)..(573): Ceres Seq. ID no. 12678250
  misc_feature (98)..(205): Pfam Name: Rieske [2Fe-2S] domain Pfam Description: Rieske [2Fe-2S] domain
  misc_feature (301)..(573): Homolog of NCBI NO: 18416592 NR Description: putative protein; protein id: At4g25650.1, by cDNA: gi_15810258, supported by cDNA: gi_15983401 [Arabidopsis >gi|15810259|gb|AAL07017.1| unknown protein [Arabidopsis
  misc_feature (15)..(279): Homolog of NCBI NO: 18416592 NR Description: putative protein; protein id: At4g25650.1, by cDNA: gi_15810258, supported by cDNA: gi_15983401 [Arabidopsis >gi|15810259|gb|AAL07017.1| unknown protein [Arabidopsis
  misc_feature (15)..(573): Homolog of NCBI NO: 7488178 NR Description: probable Rieske iron-sulfur protein L73G19.30 - thaliana >gi|4914457|emb|CAB43696.1| putative protein thaliana] >gi|7269415|emb|CAB81375.1| putative protein
  misc_feature (66)..(571): Homolog of NCBI NO: 30102998 NR Description: putative cell death suppressor protein [Oryza
  misc_feature (217)..(568): Homolog of NCBI NO: 30102995 NR Description: putative cell death suppressor protein [Oryza
  misc_feature (19)..(250): Homolog of NCBI NO: 30102995 NR Description: putative cell death suppressor protein [Oryza
  misc_feature (19)..(268): Homolog of NCBI NO: 16973465 NR Description: lethal leaf spot 1-like protein [Lycopersicon
  misc_feature (372)..(573): Homolog of NCBI NO: 16973465 NR Description: lethal leaf spot 1-like protein [Lycopersicon
  misc_feature (305)..(573): Homolog of NCBI NO: 15451611 NR Description: Putative cell death suppressor protein [Oryza
  misc_feature (29)..(268): Homolog of NCBI NO: 15451611 NR Description: Putative cell death suppressor protein [Oryza
SFASSLRLLPPHNAMEAALAACALPSLRILNTKPRFRCSFSNPSLPISPNSLITRKSSRFTTAVSSPPSSSAATSTNSPPEPEALFEPGSDKFDWYANWYPVMPICDLDKKVPHGKKVMGIDLVVWWDRNEKQWKVMDDTCPHRLAPLSDGRIDQWGRLQCVYHGWCFNGSGDCKLIPQAPPDGPPVHTFKQACVAVYPSTVQHEIIWFWPNSDPKYKNIIETNKPPYIPELEDPSFTKLMGNRDIPYGYDVLVENLMDPAHVPYAHYGLMRFPKPKGKYIICISNSCFNPFTNLQILLAEKIDREGGKPLEINVKKLDNKGFFSKQEWGYSNFIAPCVYRSSTDPLPEQEHEYPAPAASDKAALSKRRLSLIFICIPVSPGRSRLIWTFPRNFGVFIDKIVPRWVFHIGQNTILDSDLHLLHVEERKILERGPENWQKACFIPTKSDANVVTFRRWFNKYSEARVDWRGKFDPFLLPPTPPREQLFDRYWSHVENCSSCKKAHKYLNALEVILQIASVAMIGVMAVLKQTTMSNVARIAVLVAAVLSFAASKWLSHFIYKTFHYHDYNHAVV

SEQ ID NO: 84994 - protein, 559 aa, Arabidopsis thaliana
  peptide (1)..(559): Ceres Seq. ID no. 12678251
  misc_feature (84)..(191): Pfam Name: Rieske [2Fe-2S] domain Pfam Description: Rieske [2Fe-2S] domain
  misc_feature (287)..(559): Homolog of NCBI NO: 18416592 NR Description: putative protein; protein id: At4g25650.1, by cDNA: gi_15810258, supported by cDNA: gi_15983401 [Arabidopsis >gi|15810259|gb|AAL07017.1| unknown protein [Arabidopsis
  misc_feature (1)..(265): Homolog of NCBI NO: 18416592 NR Description: putative protein; protein id: At4g25650.1, by cDNA: gi_15810258, supported by cDNA: gi_15983401 [Arabidopsis >gi|15810259|gb|AAL07017.1| unknown protein [Arabidopsis
  misc_feature (1)..(559): Homolog of NCBI NO: 7488178 NR Description: probable Rieske iron-sulfur protein L73G19.30 - thaliana >gi|4914457|emb|CAB43696.1| putative protein thaliana] >gi|7269415|emb|CAB81375.1| putative protein
  misc_feature (52)..(557): Homolog of NCBI NO: 30102998 NR Description: putative cell death suppressor protein [Oryza
  misc_feature (203)..(554): Homolog of NCBI NO: 30102995 NR Description: putative cell death suppressor protein [Oryza
  misc_feature (5)..(236): Homolog of NCBI NO: 30102995 NR Description: putative cell death suppressor protein [Oryza
  misc_feature (5)..(254): Homolog of NCBI NO: 16973465 NR Description: lethal leaf spot 1-like protein [Lycopersicon
  misc_feature (358)..(559): Homolog of NCBI NO: 16973465 NR Description: lethal leaf spot 1-like protein [Lycopersicon
  misc_feature (291)..(559): Homolog of NCBI NO: 15451611 NR Description: Putative cell death suppressor protein [Oryza
  misc_feature (15)..(254): Homolog of NCBI NO: 15451611 NR Description: Putative cell death suppressor protein [Oryza
MEAALAACALPSLRILNTKPRFRCSFSNPSLPISPNSLITRKSSRFTTAVSSPPSSSAATSTNSPPEPEALFEPGSDKFDWYANWYPVMPICDLDKKVPHGKKVMGIDLVVWWDRNEKQWKVMDDTCPHRLAPLSDGRIDQWGRLQCVYHGWCFNGSGDCKLIPQAPPDGPPVHTFKQACVAVYPSTVQHEIIWFWPNSDPKYKNIIETNKPPYIPELEDPSFTKLMGNRDIPYGYDVLVENLMDPAHVPYAHYGLMRFPKPKGKYIICISNSCFNPFTNLQILLAEKIDREGGKPLEINVKKLDNKGFFSKQEWGYSNFIAPCVYRSSTDPLPEQEHEYPAPAASDKAALSKRRLSLIFICIPVSPGRSRLIWTFPRNFGVFIDKIVPRWVFHIGQNTILDSDLHLLHVEERKILERGPENWQKACFIPTKSDANVVTFRRWFNKYSEARVDWRGKFDPFLLPPTPPREQLFDRYWSHVENCSSCKKAHKYLNALEVILQIASVAMIGVMAVLKQTTMSNVARIAVLVAAVLSFAASKWLSHFIYKTFHYHDYNHAVV

SEQ ID NO: 84995 - protein, 471 aa, Arabidopsis thaliana
  peptide (1)..(471): Ceres Seq. ID no. 12678252
  misc_feature (1)..(103): Pfam Name: Rieske [2Fe-2S] domain Pfam Description: Rieske [2Fe-2S] domain
  misc_feature (199)..(471): Homolog of NCBI NO: 18416592 NR Description: putative protein; protein id: At4g25650.1, by cDNA: gi_15810258, supported by cDNA: gi_15983401 [Arabidopsis >gi|15810259|gb|AAL07017.1| unknown protein [Arabidopsis
  misc_feature (1)..(177): Homolog of NCBI NO: 18416592 NR Description: putative protein; protein id: At4g25650.1, by cDNA: gi_15810258, supported by cDNA: gi_15983401 [Arabidopsis >gi|15810259|gb|AAL07017.1| unknown protein [Arabidopsis
  misc_feature (1)..(471): Homolog of NCBI NO: 7488178 NR Description: probable Rieske iron-sulfur protein L73G19.30 - thaliana >gi|4914457|emb|CAB43696.1| putative protein thaliana] >gi|7269415|emb|CAB81375.1| putative protein
  misc_feature (1)..(469): Homolog of NCBI NO: 30102998 NR Description: putative cell death suppressor protein [Oryza
  misc_feature (115)..(466): Homolog of NCBI NO: 30102995 NR Description: putative cell death suppressor protein [Oryza
  misc_feature (1)..(148): Homolog of NCBI NO: 30102995 NR Description: putative cell death suppressor protein [Oryza
  misc_feature (1)..(166): Homolog of NCBI NO: 16973465 NR Description: lethal leaf spot 1-like protein [Lycopersicon
  misc_feature (270)..(471): Homolog of NCBI NO: 16973465 NR Description: lethal leaf spot 1-like protein [Lycopersicon
  misc_feature (203)..(471): Homolog of NCBI NO: 15451611 NR Description: Putative cell death suppressor protein [Oryza
  misc_feature (1)..(166): Homolog of NCBI NO: 15451611 NR Description: Putative cell death suppressor protein [Oryza
MPICDLDKKVPHGKKVMGIDLVVWWDRNEKQWKVMDDTCPHRLAPLSDGRIDQWGRLQCVYHGWCFNGSGDCKLIPQAPPDGPPVHTFKQACVAVYPSTVQHEIIWFWPNSDPKYKNIIETNKPPYIPELEDPSFTKLMGNRDIPYGYDVLVENLMDPAHVPYAHYGLMRFPKPKGKYIICISNSCFNPFTNLQILLAEKIDREGGKPLEINVKKLDNKGFFSKQEWGYSNFIAPCVYRSSTDPLPEQEHEYPAPAASDKAALSKRRLSLIFICIPVSPGRSRLIWTFPRNFGVFIDKIVPRWVFHIGQNTILDSDLHLLHVEERKILERGPENWQKACFIPTKSDANVVTFRRWFNKYSEARVDWRGKFDPFLLPPTPPREQLFDRYWSHVENCSSCKKAHKYLNALEVILQIASVAMIGVMAVLKQTTMSNVARIAVLVAAVLSFAASKWLSHFIYKTFHYHDYNHAVV

SEQ ID NO: 84996 - DNA, 1516 bp, Arabidopsis thaliana
  misc_feature (1)..(1516): Ceres Seq. ID no. 12678266
  misc_feature: MA Experiment ID: 108462 Result: Up-regulated in Transcription
  misc_feature: MA Experiment 108462 PARAMETER Experiment Name: At_Germinating_Seeds_cDNA_P Parameter: Age (day) Value: 2 vs. 0
  misc_feature: MA Experiment 108462 PARAMETER Experiment Name: At_Germinating_Seeds_cDNA_P Parameter: Tissue Value: Germinating Seeds
  misc_feature: MA Experiment ID: 108469 Result: Up-regulated in Transcription
  misc_feature: MA Experiment ID: 108576 Result: Down-regulated in Transcription
  misc_feature: MA Experiment 108576 PARAMETER Experiment Name: At_42deg_Heat_cDNA_P Parameter: Temperature (deg C) Value: 42 vs. 22
  misc_feature: MA Experiment 108576 PARAMETER Experiment Name: At_42deg_Heat_cDNA_P Parameter: Timepoint (hr) Value: 1
  misc_feature: MA Experiment 108576 PARAMETER Experiment Name: At_42deg_Heat_cDNA_P Parameter: Tissue Value: Aerial
  misc_feature: MA Experiment ID: 108595 Result: Down-regulated in Transcription
  misc_feature: MA Experiment 108595 PARAMETER Experiment Name: At_Ler-pi_Ovule_cDNA_P Parameter: Plant Line Value: null
  misc_feature: MA Experiment ID: 20000090 Result: Up-regulated in Transcription
  misc_feature: MA Experiment ID: 20000111 Result: Down-regulated in Transcription
  misc_feature: MA Experiment 20000111 PARAMETER Experiment Name: At_42deg_Heat_cDNA_P Parameter: Temperature (deg C) Value: 42 vs. 22
  misc_feature: MA Experiment 20000111 PARAMETER Experiment Name: At_42deg_Heat_cDNA_P Parameter: Timepoint (hr) Value: 6
  misc_feature: MA Experiment 20000111 PARAMETER Experiment Name: At_42deg_Heat_cDNA_P Parameter: Tissue Value: Aerial
  misc_feature: MA Experiment ID: 20000113 Result: Down-regulated in Transcription
  misc_feature: MA Experiment 20000113 PARAMETER Experiment Name: At_42deg_Heat_cDNA_P Parameter: Temperature (deg C) Value: 42 vs. 22
  misc_feature: MA Experiment 20000113 PARAMETER Experiment Name: At_42deg_Heat_cDNA_P Parameter: Timepoint (hr) Value: 8
  misc_feature: MA Experiment 20000113 PARAMETER Experiment Name: At_42deg_Heat_cDNA_P Parameter: Tissue Value: Aerial
  misc_feature: MA Experiment ID: 20000182 Result: Up-regulated in Transcription
  misc_feature: MA Experiment 20000182 PARAMETER Experiment Name: At_2mM_SA_P Parameter: Age (day) Value: 14
  misc_feature: MA Experiment 20000182 PARAMETER Experiment Name: At_2mM_SA_P Parameter: Organism Value: A. thaliana
  misc_feature: MA Experiment 20000182 PARAMETER Experiment Name: At_2mM_SA_P Parameter: Plant Line Value: WS
  misc_feature: MA Experiment 20000182 PARAMETER Experiment Name: At_2mM_SA_P Parameter: Timepoint (hr) Value: 6
  misc_feature: MA Experiment 20000182 PARAMETER Experiment Name: At_2mM_SA_P Parameter: Tissue Value: Aerial
  misc_feature: MA Experiment 20000182 PARAMETER Experiment Name: At_2mM_SA_P Parameter: Treatment Value: 2mM SA vs. No Treatment
  misc_feature: MA Experiment ID: 20000184 Result: Down-regulated in Transcription
  misc_feature: MA Experiment 20000184 PARAMETER Experiment Name: At_Shoots__P Parameter: Age (day) Value: 7
  misc_feature: MA Experiment 20000184 PARAMETER Experiment Name: At_Shoots__P Parameter: Tissue Value: Shoots vs. Whole Plant
  misc_feature: MA Experiment ID: 20000185 Result: Down-regulated in Transcription
  misc_feature: MA Experiment 20000185 PARAMETER Experiment Name: At_Roots__P Parameter: Age (day) Value: 7 vs. 21
  misc_feature: MA Experiment 20000185 PARAMETER Experiment Name: At_Roots__P Parameter: Organism Value: A. thaliana
  misc_feature: MA Experiment 20000185 PARAMETER Experiment Name: At_Roots__P Parameter: Tissue Value: Roots vs. Whole Plant
  misc_feature: MA Experiment ID: 20000234 Result: Down-regulated in Transcription
  misc_feature: MA Experiment 20000234 PARAMETER Experiment Name: At_Siliques_P Parameter: Age (day) Value: 21
  misc_feature: MA Experiment 20000234 PARAMETER Experiment Name: At_Siliques_P Parameter: Organism Value: A. thaliana
  misc_feature: MA Experiment 20000234 PARAMETER Experiment Name: At_Siliques_P Parameter: Plant Line Value: WS
  misc_feature: MA Experiment 20000234 PARAMETER Experiment Name: At_Siliques_P Parameter: Tissue Value: Less Than 5mm Siliques vs. Whole Plant
  misc_feature: MA Experiment ID: 20000264 Result: Down-regulated in Transcription
  misc_feature: MA Experiment 20000264 PARAMETER Experiment Name: At_Open_Flower_P Parameter: Age (day) Value: 21
  misc_feature: MA Experiment 20000264 PARAMETER Experiment Name: At_Open_Flower_P Parameter: Plant Line Value: WS
  misc_feature: MA Experiment 20000264 PARAMETER Experiment Name: At_Open_Flower_P Parameter: Tissue Value: Open Flower vs. Whole Plant
  misc_feature: MA Experiment ID: 20000265 Result: Down-regulated in Transcription
  misc_feature: MA Experiment 20000265 PARAMETER Experiment Name: At_Open_Flower_P Parameter: Age (day) Value: 21
  misc_feature: MA Experiment 20000265 PARAMETER Experiment Name: At_Open_Flower_P Parameter: Plant Line Value: WS
  misc_feature: MA Experiment 20000265 PARAMETER Experiment Name: At_Open_Flower_P Parameter: Tissue Value: Closed Flower vs. Whole Plant
  misc_feature: MA Experiment ID: 20000286 Result: Down-regulated in Transcription
  misc_feature: MA Experiment 20000286 PARAMETER Experiment Name: At_Open_Flower_P Parameter: Age (day) Value: 21
  misc_feature: MA Experiment 20000286 PARAMETER Experiment Name: At_Open_Flower_P Parameter: Plant Line Value: WS
  misc_feature: MA Experiment 20000286 PARAMETER Experiment Name: At_Open_Flower_P Parameter: Tissue Value: Half Open vs. Whole Plant
  misc_feature: MA Experiment ID: 20000439 Result: Down-regulated in Transcription
  misc_feature: MA Experiment 20000439 PARAMETER Experiment Name: At_Roots__P Parameter: Age (day) Value: 14 vs. 21
  misc_feature: MA Experiment 20000439 PARAMETER Experiment Name: At_Roots__P Parameter: Organism Value: A. thaliana
  misc_feature: MA Experiment 20000439 PARAMETER Experiment Name: At_Roots__P Parameter: Tissue Value: Roots vs. Whole Plant
  misc_feature: MA Experiment ID: 20000794 Result: Down-regulated in Transcription
  misc_feature: MA Experiment 20000794 PARAMETER Experiment Name: At_Petals_P Parameter: Age (day) Value: 23-25 days
  misc_feature: MA Experiment 20000794 PARAMETER Experiment Name: At_Petals_P Parameter: Plant Line Value: WS
  misc_feature: MA Experiment 20000794 PARAMETER Experiment Name: At_Petals_P Parameter: Tissue Value: Petals vs. Whole plant
  misc_feature: MA Experiment ID: 20001555 Result: Down-regulated in Transcription
  misc_feature: MA Experiment 20001555 PARAMETER Experiment Name: At_Drought_Soil_Dry_P Parameter: Age (day) Value: 24
  misc_feature: MA Experiment 20001555 PARAMETER Experiment Name: At_Drought_Soil_Dry_P Parameter: Organism Value: A. thaliana
  misc_feature: MA Experiment 20001555 PARAMETER Experiment Name: At_Drought_Soil_Dry_P Parameter: Plant Line Value: WS
  misc_feature: MA Experiment 20001555 PARAMETER Experiment Name: At_Drought_Soil_Dry_P Parameter: Post Timepoint (hr) Value: None
  misc_feature: MA Experiment 20001555 PARAMETER Experiment Name: At_Drought_Soil_Dry_P Parameter: Post-Treatment Value: None
  misc_feature: MA Experiment 20001555 PARAMETER Experiment Name: At_Drought_Soil_Dry_P Parameter: Timepoint (day) Value: 10
  misc_feature: MA Experiment 20001555 PARAMETER Experiment Name: At_Drought_Soil_Dry_P Parameter: Treatment Value: Drought vs. No Drought
  misc_feature: MA Experiment ID: 20001557 Result: Down-regulated in Transcription
  misc_feature: MA Experiment 20001557 PARAMETER Experiment Name: At_Drought_Soil_Dry_P Parameter: Age (day) Value: 27
  misc_feature: MA Experiment 20001557 PARAMETER Experiment Name: At_Drought_Soil_Dry_P Parameter: Organism Value: A. thaliana
  misc_feature: MA Experiment 20001557 PARAMETER Experiment Name: At_Drought_Soil_Dry_P Parameter: Plant Line Value: WS
  misc_feature: MA Experiment 20001557 PARAMETER Experiment Name: At_Drought_Soil_Dry_P Parameter: Post Timepoint (hr) Value: 3
  misc_feature: MA Experiment 20001557 PARAMETER Experiment Name: At_Drought_Soil_Dry_P Parameter: Post-Treatment Value: Re-Water vs. No Drought
  misc_feature: MA Experiment 20001557 PARAMETER Experiment Name: At_Drought_Soil_Dry_P Parameter: Timepoint (day) Value: 13
  misc_feature: MA Experiment 20001557 PARAMETER Experiment Name: At_Drought_Soil_Dry_P Parameter: Treatment Value: Drought vs. No Drought
gttcgtcattcttcctctaagctttatctttctgatctctgaccttgtgtctctgtgcatgtgtgtttatctgctactgtgttttgtcggtttgatctccaaaaaccagacatgaacagaggaagcttatgccctaatcccatctgtctccctcctcttgagcaatccatctccaaattcttaacacagagtggaacgtttaaagatggagatcttcgagtgaacaaagatggaatccagaccgtgtctctgtccgaaccaggagctccacctcctattgagccattggacaaccaattgagtttggcagatttagaagtgatcaaagtcattggcaaaggaagtagtggtaatgtccagttggtcaaacacaaactcactcaacagtttttcgctcttaaggtcattcaattgaacacagaagaatcaacatgtcgggcgatttctcaggagctgagaataaacttgagctcgcaatgtccatatcttgtctcatgttatcaatctttctaccacaacggtcttgtttcaatcatattggaattcatggatggtggatcccttgcagacttgttaaagaaagtcggaaaagttcctgaaaacatgctatctgccatctgcaagcgagttcttcgaggtctttgttatattcatcatgagaggcgaatcattcatcgggacttaaagccttcaaacttgctaatcaatcatagaggtgaagtcaagatcacagactttggtgtcagcaagatcttgacaagcacaagtagtcttgctaattctttcgtgggcacatacccttatatgtctccagagagaatcagcgggagtttgtacagtaacaagagcgatatttggagcttgggactggttttgctcgaatgtgcaacgggtaaattcccgtatactcctccagaacacaagaaaggatggagtagcgtgtacgagcttgtggacgccattgttgaaaacccgcctccttgtgcaccttccaatctcttttctccagagttttgctccttcatctcgcaatggtgagacagatttcgaccagttgtcatgtcatttttgttgctataacgagtaggcatttgaaatggtgctttaacttgtgtagtgtacaaaaagatccaagggacagaaaatcagcaaaggagcttctggtgcgttaatcatataagactctgagtctttcaccttgtactgtcttggactacttttaacgatcttttttctggttccatcttggtgaataggaacacaagttcgtaaagatgtttgaagattcggatacaaatctctcggcttacttcaccgacgcaggatctttgattcccccacttgctaactagaaccgagtttgaacaatcttttaacctccaagttattatttcatatccactagaagagattttatgaaagataaatttacgagatgttatgacttaagagacttgtctacaaaatttgatttaatgtgtgtacttttcacatcactattataaacacaactatc

SEQ ID NO: 84997 - protein, 308 aa, Arabidopsis thaliana
  peptide (1)..(308): Ceres Seq. ID no. 12678267
  misc_feature (68)..(307): Pfam Name: Protein kinase domain Pfam Description: Protein kinase domain
  misc_feature (1)..(307): Homolog of NCBI NO: 15236108 NR Description: mitogen activated protein kinase kinase (nMAPKK); id: At4g26070.1, supported by cDNA: 31259., supported by cDNA: [Arabidopsis thaliana] >gi|7434309|pir||T04262 thaliana]
  misc_feature (1)..(308): Homolog of NCBI NO: 30687096 NR Description: mitogen-activated protein kinase kinase [Arabidopsis thaliana] >gi|15292681|gb|AAK92709.1| putative
  misc_feature (1)..(306): Homolog of NCBI NO: 11259772 NR Description: mitogen-activated protein kinase kinase (EC
  misc_feature (1)..(306): Homolog of NCBI NO: 15233715 NR Description: MAP kinase kinase 2; protein id: At4g29810.1, by cDNA: gi_14326470, supported by cDNA: gi_18700199, supported
  misc_feature (1)..(306): Homolog of NCBI NO: 37625027 NR Description: putative mitogen-activated protein kinase kinase
  misc_feature (1)..(306): Homolog of NCBI NO: 9843771 NR Description: MAP kinase kinase [Lycopersicon esculentum]
  misc_feature (1)..(306): Homolog of NCBI NO: 7434316 NR Description: protein kinase MEK1 - tomato
  misc_feature (1)..(306): Homolog of NCBI NO: 15528441 NR Description: MAP kinase kinase [Medicago sativa subsp. x varia]
  misc_feature (1)..(306): Homolog of NCBI NO: 7682432 NR Description: MAP kinase kinase [Nicotiana tabacum]
  misc_feature (11)..(306): Homolog of NCBI NO: 7434320 NR Description: protein kinase MEK1 (EC 2.7.1.-) - maize
MNRGSLCPNPICLPPLEQSISKFLTQSGTFKDGDLRVNKDGIQTVSLSEPGAPPPIEPLDNQLSLADLEVIKVIGKGSSGNVQLVKHKLTQQFFALKVIQLNTEESTCRAISQELRINLSSQCPYLVSCYQSFYHNGLVSIILEFMDGGSLADLLKKVGKVPENMLSAICKRVLRGLCYIHHERRIIHRDLKPSNLLINHRGEVKITDFGVSKILTSTSSLANSFVGTYPYMSPERISGSLYSNKSDIWSLGLVLLECATGKFPYTPPEHKKGWSSVYELVDAIVENPPPCAPSNLFSPEFCSFISQW

SEQ ID NO: 84998 - protein, 163 aa, Arabidopsis thaliana
  peptide (1)..(163): Ceres Seq. ID no. 12678268
  misc_feature (1)..(162): Pfam Name: Protein kinase domain Pfam Description: Protein kinase domain
  misc_feature (1)..(162): Homolog of NCBI NO: 15236108 NR Description: mitogen activated protein kinase kinase (nMAPKK); id: At4g26070.1, supported by cDNA: 31259., supported by cDNA: [Arabidopsis thaliana] >gi|7434309|pir||T04262 thaliana]
  misc_feature (1)..(163): Homolog of NCBI NO: 30687096 NR Description: mitogen-activated protein kinase kinase [Arabidopsis thaliana] >gi|15292681|gb|AAK92709.1| putative
  misc_feature (1)..(161): Homolog of NCBI NO: 11259772 NR Description: mitogen-activated protein kinase kinase (EC
  misc_feature (1)..(161): Homolog of NCBI NO: 15233715 NR Description: MAP kinase kinase 2; protein id: At4g29810.1, by cDNA: gi_14326470, supported by cDNA: gi_18700199, supported
  misc_feature (1)..(161): Homolog of NCBI NO: 37625027 NR Description: putative mitogen-activated protein kinase kinase
  misc_feature (1)..(161): Homolog of NCBI NO: 9843771 NR Description: MAP kinase kinase [Lycopersicon esculentum]
  misc_feature (1)..(161): Homolog of NCBI NO: 7434316 NR Description: protein kinase MEK1 - tomato
  misc_feature (1)..(161): Homolog of NCBI NO: 15528441 NR Description: MAP kinase kinase [Medicago sativa subsp. x varia]
  misc_feature (1)..(161): Homolog of NCBI NO: 7682432 NR Description: MAP kinase kinase [Nicotiana tabacum]
  misc_feature (1)..(161): Homolog of NCBI NO: 7434320 NR Description: protein kinase MEK1 (EC 2.7.1.-) - maize
MDGGSLADLLKKVGKVPENMLSAICKRVLRGLCYIHHERRIIHRDLKPSNLLINHRGEVKITDFGVSKILTSTSSLANSFVGTYPYMSPERISGSLYSNKSDIWSLGLVLLECATGKFPYTPPEHKKGWSSVYELVDAIVENPPPCAPSNLFSPEFCSFISQW

SEQ ID NO: 84999 - DNA, 2075 bp, Arabidopsis thaliana
  misc_feature (1)..(2075): Ceres Seq. ID no. 12678269
  misc_feature: MA Experiment ID: 108561 Result: Up-regulated in Transcription
  misc_feature: MA Experiment 108561 PARAMETER Experiment Name: At_100uM_ABA_cDNA_P Parameter: Timepoint (hr) Value: 6
  misc_feature: MA Experiment 108561 PARAMETER Experiment Name: At_100uM_ABA_cDNA_P Parameter: Tissue Value: Aerial
  misc_feature: MA Experiment 108561 PARAMETER Experiment Name: At_100uM_ABA_cDNA_P Parameter: Treatment Value: 100uM ABA vs. No Treatment
  misc_feature: MA Experiment ID: 108572 Result: Down-regulated in Transcription
  misc_feature: MA Experiment 108572 PARAMETER Experiment Name: At_Drought_cDNA_P Parameter: Timepoint (hr) Value: 1
  misc_feature: MA Experiment 108572 PARAMETER Experiment Name: At_Drought_cDNA_P Parameter: Tissue Value: Aerial
  misc_feature: MA Experiment 108572 PARAMETER Experiment Name: At_Drought_cDNA_P Parameter: Treatment Value: Drought vs. No Drought
  misc_feature: MA Experiment ID: 108576 Result: Down-regulated in Transcription
  misc_feature: MA Experiment 108576 PARAMETER Experiment Name: At_42deg_Heat_cDNA_P Parameter: Temperature (deg C) Value: 42 vs. 22
  misc_feature: MA Experiment 108576 PARAMETER Experiment Name: At_42deg_Heat_cDNA_P Parameter: Timepoint (hr) Value: 1
  misc_feature: MA Experiment 108576 PARAMETER Experiment Name: At_42deg_Heat_cDNA_P Parameter: Tissue Value: Aerial
  misc_feature: MA Experiment ID: 108579 Result: Down-regulated in Transcription
  misc_feature: MA Experiment 108579 PARAMETER Experiment Name: At_4deg_Cold_cDNA_P Parameter: Temperature (deg C) Value: 4 vs. 22
  misc_feature: MA Experiment 108579 PARAMETER Experiment Name: At_4deg_Cold_cDNA_P Parameter: Timepoint (hr) Value: 6
  misc_feature: MA Experiment 108579 PARAMETER Experiment Name: At_4deg_Cold_cDNA_P Parameter: Tissue Value: Aerial
  misc_feature: MA Experiment ID: 108595 Result: Down-regulated in Transcription
  misc_feature: MA Experiment 108595 PARAMETER Experiment Name: At_Ler-pi_Ovule_cDNA_P Parameter: Plant Line Value: null
aagctatttggcatatacttgtcttcgcttttcgtagctctttcgcgcataataataactgaggttgttgtttaatcaagaagagtgtgcaaaaattggaaggccagggaatgcagaaacatgtatttgaaagctgaactcaattgctctacaccaccctctcagatcctttgtccctttgggcccttgttctccctcatcccttatgtggacacccattttctaaacccctgcttccacaccttccagccttcctctcacaatgctagaaaaaacgccacttggaagcatgatctttgcgaagacggttgatccgacactaacagcctcctcctgagttcctcctctaccctttatgttgtctgcgttttagtatattctagggtggtctttttatttagtggtattagtagtgctctaagctaaccagttagtcaatggagaagaaaggatctgtgttgatgctccgttatgaggttgggaagtttctcggtcaaggtacctttgctaaggtataccatgctaggcatttgaaaactggtgatagtgtagcgattaaggtcatcgacaaagaaagaatcctcaaagttggcatgaccgagcagattaagcgagagatctctgccatgagactcttgaggcatcccaacatcgttgagctccatgaagtcatggccaccaaatctaaaatctacttcgtcatggaacatgttaagggtggtgagctcttcaacaaagtgtcaactgggaagctgagagaagacgttgcgagaaagtactttcagcagcttgtacgcgctgttgacttctgtcacagccgtggagtatgccacagggacctgaagccggagaatctcttgttggatgagcatgggaatcttaagatctctgattttggtctcagcgctctttctgactctagaaggcaagacgggttgctgcatactacatgcgggacccctgcatatgttgcaccggaggtgataagcaggaacgggtatgatgggtttaaagcggatgtgtggtcctgtggagtgatattgttcgtcttgctcgctggatatcttcctttccgtgattccaatctgatggagctgtataagaagataggcaaagctgaagtcaagttccccaactggcttgctccgggggcaaagagattgctcaagaggatcttggatcctaaccccaacacaagggtatcaactgagaaaataatgaagagctcttggttccgtaaaggcctacaagaggaggtgaaagaatcagttgaggaagagacagaagtggacgcagaggcagagggaaacgcaagtgcagagaaggaaaagaagcggtgtatcaacctgaacgcgtttgagatcatatctctgtccacggggtttgatctctcgggactgttcgagaagggagaggagaaggaggagatgaggtttacatcaaacagagaggcatctgagataacagagaagctggtggagattgggaaggaccttaagatgaaagtgaggaagaaggaacacgaatggagggtgaaaatgtcggctgaggctacagtggtggaagcggaagtgtttgagattgcgccgagctatcacatggtggtgctaaagaagagcggtggagatactgctgagtataagagagtcatgaaggagagtataagaccggctttgatcgactttgtattagcttggcactgaaacatattctatcctttttatgtgtcttcttcttttagaatgtttttcttgttttgttttgccaatgtgtttagtttatgtattttctcttgagtctcatcttaagacgtgtttcgtatttttctaggtgtcagtgtaacaataataatatgtgaggaccaattatatagtttgagacaaaataagtagatttctttatcagataaaataaaataaattgagccttaatgaaataagccaatagaccgacaacggttttaggaagcattatactactattttgtagttatttcgtattattgtagtcttttggatgatctttttgtgtattaacaaagtcaaaacaaatttataatttaacttacgttacag

SEQ ID NO: 85000 - protein, 421 aa, Arabidopsis thaliana
  peptide (1)..(421): Ceres Seq. ID no. 12678270
  misc_feature (12)..(266): Pfam Name: Protein kinase domain Pfam Description: Protein kinase domain
  misc_feature (1)..(421): Homolog of NCBI NO: 15241066 NR Description: serine/threonine protein kinase ATPK10; protein At5g01810.1, supported by cDNA: gi_13249133, supported by cDNA: supported by cDNA: gi_1777311 [Arabidopsis thaliana]
  misc_feature (1)..(421): Homolog of NCBI NO: 1777312 NR Description: novel serine/threonine protein kinase
  misc_feature (2)..(420): Homolog of NCBI NO: 33146431 NR Description: putative Serine/threonine Kinase [Oryza sativa
  misc_feature (1)..(420): Homolog of NCBI NO: 23428550 NR Description: Serine/threonine Kinase [Persea americana]
  misc_feature (1)..(420): Homolog of NCBI NO: 8777339 NR Description: serine/threonine protein kinase [Arabidopsis
  misc_feature (1)..(420): Homolog of NCBI NO: 9280636 NR Description: CBL-interacting protein kinase 2 [Arabidopsis
  misc_feature (1)..(420): Homolog of NCBI NO: 15240687 NR Description: serine threonine protein kinase-like protein; id: At5g07070.1, supported by cDNA: gi_9280635 [Arabidopsis
  misc_feature (1)..(290): Homolog of NCBI NO: 18424099 NR Description: serine/threonine protein kinase; protein id: supported by cDNA: gi_13249118, supported by cDNA: gi_13448028, by cDNA: gi_20453091 [Arabidopsis thaliana]
  misc_feature (303)..(420): Homolog of NCBI NO: 18424099 NR Description: serine/threonine protein kinase; protein id: supported by cDNA: gi_13249118, supported by cDNA: gi_13448028, by cDNA: gi_20453091 [Arabidopsis thaliana]
  misc_feature (1)..(421): Homolog of NCBI NO: 34903780 NR Description: unnamed protein product [Oryza sativa (japonica group)] >gi|7340882|dbj|BAA92972.1| unnamed protein product
MEKKGSVLMLRYEVGKFLGQGTFAKVYHARHLKTGDSVAIKVIDKERILKVGMTEQIKREISAMRLLRHPNIVELHEVMATKSKIYFVMEHVKGGELFNKVSTGKLREDVARKYFQQLVRAVDFCHSRGVCHRDLKPENLLLDEHGNLKISDFGLSALSDSRRQDGLLHTTCGTPAYVAPEVISRNGYDGFKADVWSCGVILFVLLAGYLPFRDSNLMELYKKIGKAEVKFPNWLAPGAKRLLKRILDPNPNTRVSTEKIMKSSWFRKGLQEEVKESVEEETEVDAEAEGNASAEKEKKRCINLNAFEIISLSTGFDLSGLFEKGEEKEEMRFTSNREASEITEKLVEIGKDLKMKVRKKEHEWRVKMSAEATVVEAEVFEIAPSYHMVVLKKSGGDTAEYKRVMKESIRPALIDFVLAWH

SEQ ID NO: 85001 - protein, 413 aa, Arabidopsis thaliana
  peptide (1)..(413): Ceres Seq. ID no. 12678271
  misc_feature (4)..(258): Pfam Name: Protein kinase domain Pfam Description: Protein kinase domain
  misc_feature (1)..(413): Homolog of NCBI NO: 15241066 NR Description: serine/threonine protein kinase ATPK10; protein At5g01810.1, supported by cDNA: gi_13249133, supported by cDNA: supported by cDNA: gi_1777311 [Arabidopsis thaliana]
  misc_feature (1)..(413): Homolog of NCBI NO: 1777312 NR Description: novel serine/threonine protein kinase
  misc_feature (1)..(412): Homolog of NCBI NO: 33146431 NR Description: putative Serine/threonine Kinase [Oryza sativa
  misc_feature (1)..(412): Homolog of NCBI NO: 23428550 NR Description: Serine/threonine Kinase [Persea americana]
  misc_feature (1)..(412): Homolog of NCBI NO: 8777339 NR Description: serine/threonine protein kinase [Arabidopsis
  misc_feature (1)..(412): Homolog of NCBI NO: 9280636 NR Description: CBL-interacting protein kinase 2 [Arabidopsis
  misc_feature (1)..(412): Homolog of NCBI NO: 15240687 NR Description: serine threonine protein kinase-like protein; id: At5g07070.1, supported by cDNA: gi_9280635 [Arabidopsis
  misc_feature (1)..(282): Homolog of NCBI NO: 18424099 NR Description: serine/threonine protein kinase; protein id: supported by cDNA: gi_13249118, supported by cDNA: gi_13448028, by cDNA: gi_20453091 [Arabidopsis thaliana]
  misc_feature (295)..(412): Homolog of NCBI NO: 18424099 NR Description: serine/threonine protein kinase; protein id: supported by cDNA: gi_13249118, supported by cDNA: gi_13448028, by cDNA: gi_20453091 [Arabidopsis thaliana]
  misc_feature (1)..(413): Homolog of NCBI NO: 34903780 NR Description: unnamed protein product [Oryza sativa (japonica group)] >gi|7340882|dbj|BAA92972.1| unnamed protein product
MLRYEVGKFLGQGTFAKVYHARHLKTGDSVAIKVIDKERILKVGMTEQIKREISAMRLLRHPNIVELHEVMATKSKIYFVMEHVKGGELFNKVSTGKLREDVARKYFQQLVRAVDFCHSRGVCHRDLKPENLLLDEHGNLKISDFGLSALSDSRRQDGLLHTTCGTPAYVAPEVISRNGYDGFKADVWSCGVILFVLLAGYLPFRDSNLMELYKKIGKAEVKFPNWLAPGAKRLLKRILDPNPNTRVSTEKIMKSSWFRKGLQEEVKESVEEETEVDAEAEGNASAEKEKKRCINLNAFEIISLSTGFDLSGLFEKGEEKEEMRFTSNREASEITEKLVEIGKDLKMKVRKKEHEWRVKMSAEATVVEAEVFEIAPSYHMVVLKKSGGDTAEYKRVMKESIRPALIDFVLAWH

SEQ ID NO: 85002 - protein, 369 aa, Arabidopsis thaliana
  peptide (1)..(369): Ceres Seq. ID no. 12678272
  misc_feature (1)..(214): Pfam Name: Protein kinase domain Pfam Description: Protein kinase domain
  misc_feature (1)..(369): Homolog of NCBI NO: 15241066 NR Description: serine/threonine protein kinase ATPK10; protein At5g01810.1, supported by cDNA: gi_13249133, supported by cDNA: supported by cDNA: gi_1777311 [Arabidopsis thaliana]
  misc_feature (1)..(369): Homolog of NCBI NO: 1777312 NR Description: novel serine/threonine protein kinase
  misc_feature (1)..(368): Homolog of NCBI NO: 33146431 NR Description: putative Serine/threonine Kinase [Oryza sativa
  misc_feature (1)..(368): Homolog of NCBI NO: 23428550 NR Description: Serine/threonine Kinase [Persea americana]
  misc_feature (1)..(368): Homolog of NCBI NO: 8777339 NR Description: serine/threonine protein kinase [Arabidopsis
  misc_feature (1)..(368): Homolog of NCBI NO: 9280636 NR Description: CBL-interacting protein kinase 2 [Arabidopsis
  misc_feature (1)..(368): Homolog of NCBI NO: 15240687 NR Description: serine threonine protein kinase-like protein; id: At5g07070.1, supported by cDNA: gi_9280635 [Arabidopsis
  misc_feature (1)..(238): Homolog of NCBI NO: 18424099 NR Description: serine/threonine protein kinase; protein id: supported by cDNA: gi_13249118, supported by cDNA: gi_13448028, by cDNA: gi_20453091 [Arabidopsis thaliana]
  misc_feature (251)..(368): Homolog of NCBI NO: 18424099 NR Description: serine/threonine protein kinase; protein id: supported by cDNA: gi_13249118, supported by cDNA: gi_13448028, by cDNA: gi_20453091 [Arabidopsis thaliana]
  misc_feature (1)..(369): Homolog of NCBI NO: 34903780 NR Description: unnamed protein product [Oryza sativa (japonica group)] >gi|7340882|dbj|BAA92972.1| unnamed protein product
MTEQIKREISAMRLLRHPNIVELHEVMATKSKIYFVMEHVKGGELFNKVSTGKLREDVARKYFQQLVRAVDFCHSRGVCHRDLKPENLLLDEHGNLKISDFGLSALSDSRRQDGLLHTTCGTPAYVAPEVISRNGYDGFKADVWSCGVILFVLLAGYLPFRDSNLMELYKKIGKAEVKFPNWLAPGAKRLLKRILDPNPNTRVSTEKIMKSSWFRKGLQEEVKESVEEETEVDAEAEGNASAEKEKKRCINLNAFEIISLSTGFDLSGLFEKGEEKEEMRFTSNREASEITEKLVEIGKDLKMKVRKKEHEWRVKMSAEATVVEAEVFEIAPSYHMVVLKKSGGDTAEYKRVMKESIRPALIDFVLAWH

SEQ ID NO: 85003 - DNA, 1732 bp, Arabidopsis thaliana
  misc_feature (1)..(1732): Ceres Seq. ID no. 12678273
  misc_feature: MA Experiment ID: 20000182 Result: Up-regulated in Transcription
  misc_feature: MA Experiment 20000182 PARAMETER Experiment Name: At_2mM_SA_P Parameter: Age (day) Value: 14
  misc_feature: MA Experiment 20000182 PARAMETER Experiment Name: At_2mM_SA_P Parameter: Organism Value: A. thaliana
  misc_feature: MA Experiment 20000182 PARAMETER Experiment Name: At_2mM_SA_P Parameter: Plant Line Value: WS
  misc_feature: MA Experiment 20000182 PARAMETER Experiment Name: At_2mM_SA_P Parameter: Timepoint (hr) Value: 6
  misc_feature: MA Experiment 20000182 PARAMETER Experiment Name: At_2mM_SA_P Parameter: Tissue Value: Aerial
  misc_feature: MA Experiment 20000182 PARAMETER Experiment Name: At_2mM_SA_P Parameter: Treatment Value: 2mM SA vs. No Treatment
  misc_feature: MA Experiment ID: 20000184 Result: Down-regulated in Transcription
  misc_feature: MA Experiment 20000184 PARAMETER Experiment Name: At_Shoots__P Parameter: Age (day) Value: 7
  misc_feature: MA Experiment 20000184 PARAMETER Experiment Name: At_Shoots__P Parameter: Tissue Value: Shoots vs. Whole Plant
  misc_feature: MA Experiment ID: 20000227 Result: Down-regulated in Transcription
  misc_feature: MA Experiment 20000227 PARAMETER Experiment Name: At_Root-Tips-vs-Tops_P Parameter: Tissue Value: Root Tips vs. Root Tops
  misc_feature: MA Experiment ID: 20000794 Result: Up-regulated in Transcription
  misc_feature: MA Experiment 20000794 PARAMETER Experiment Name: At_Petals_P Parameter: Age (day) Value: 23-25 days
  misc_feature: MA Experiment 20000794 PARAMETER Experiment Name: At_Petals_P Parameter: Plant Line Value: WS
  misc_feature: MA Experiment 20000794 PARAMETER Experiment Name: At_Petals_P Parameter: Tissue Value: Petals vs. Whole plant
  misc_feature: MA Experiment ID: 20001451 Result: Down-regulated in Transcription
  misc_feature: MA Experiment 20001451 PARAMETER Experiment Name: At_Far-red-induction_P Parameter: Age (day) Value: 7
  misc_feature: MA Experiment 20001451 PARAMETER Experiment Name: At_Far-red-induction_P Parameter: Light Value: Far-red vs. White
  misc_feature: MA Experiment 20001451 PARAMETER Experiment Name: At_Far-red-induction_P Parameter: Organism Value: A. thaliana
  misc_feature: MA Experiment 20001451 PARAMETER Experiment Name: At_Far-red-induction_P Parameter: Plant Line Value: Columbia
  misc_feature: MA Experiment 20001451 PARAMETER Experiment Name: At_Far-red-induction_P Parameter: Timepoint (hr) Value: 24
  misc_feature: MA Experiment 20001451 PARAMETER Experiment Name: At_Far-red-induction_P Parameter: Tissue Value: Whole Plant
agaagattaaacattcctctcgccggagaactaactgctcgatagatagagatagagagagagctctgataactgccattctgtctctatctgcttcctctagatacacgttagtttttttttctttgaaaggggctaaatttcgtacacacgacctatttcttcttcttattggattttgtagagaaaactttattatataggtttctggggaatcttctgagccgtttagaacaaggatttaggcaaaaatatggtcagttagtttcttgtgctagcaattttgaatgggagattgcgacgacgacgactagtctctcctcgaatcagggtttatagttgttgttgatagagatattgaattggaaccaaaagaactcaatgatagagtagtgaattttggatgtagtgtttttctcatcaacggagtaataataacaataataatgagtagcgatgatacgattgaggagagtttgcttgtggatcccaaattgttgttcatcggctccaagattggtgaaggcgctcacggcaaagtctaccaaggaaggtatggtcgtcagattgttgcaatcaaagttgtcaaccggggctccaaacctgaccagcaatcttctctcgagagccgtttcgtccgtgaggtcaatatgatgtcccgcgttcaacaccataaccttgtcaagtttattggagcgtgcaaagatcctttaatggtaatagtaacagagcttctcccagggatgtctctccgtaaatatctcaccagcatccgtcctcagttgctccatctccctcttgctctctcctttgcccttgacatcgcccgtgccttgcactgcttacacgccaatggtatcattcacagagacctcaaacctgacaacttattgctcacggagaatcacaaatccgtcaagcttgctgatttcgggcttgctagggaagaatccgtgactgagatgatgactgctgagactgggacttaccgttggatggctcctgagctctacagtacagtgaccctgcgtcaaggagagaagaagcattacaacaacaaagttgatgtctacagctttggaatcgtgctttgggagcttctcactaatcgtatgccattcgagggcatgtccaatctgcaagccgcctacgcagcagcattcaagcaggagaggcccgtaatgccagaggggatatctccgagtctggcgttcatagtgcagtcttgttgggtggaggacccaaacatgaggccaagcttcagtcaaattatcagactgctcaatgagttcctccttaccctgactcctccgcctcctcagcctctgcctgagactgccaccaacaggaccaatggccgagccatcactgagttctccatccgtccaaaagggaaatttgccttcattcgccagcttttcgctgccaagaggaacataaactcttaggtacaagaaggggtcttctttgtctttgccactgccactgctttggtggataaatgacattagcagagagagagaagtagaaagttagacttacttaaagtctatagcgtagttaagtactcaatcttcttcttgtcaagtgattaactggtagtatcacacgccaaactaattggttaaatgttataacttaaagcctatgttttatcctttatcaatacttgaaacaaaacttaggagatcaactaactatgtatattatcgattatataagttttatgttt

SEQ ID NO: 85004 - protein, 333 aa, Arabidopsis thaliana
  peptide (1)..(333): Ceres Seq. ID no. 12678274
  misc_feature (1)..(333): Homolog of NCBI NO: 30679428 NR Description: protein kinase, putative [Arabidopsis thaliana]
  misc_feature (80)..(333): Homolog of NCBI NO: 11259780 NR Description: protein kinase ATN1-like protein - Arabidopsis
  misc_feature (7)..(329): Homolog of NCBI NO: 28876011 NR Description: putative protein kinase [Oryza sativa (japonica
  misc_feature (2)..(291): Homolog of NCBI NO: 32815816 NR Description: protein kinase [Cucumis sativus]
  misc_feature (7)..(295): Homolog of NCBI NO: 15232197 NR Description: putative protein kinase, ATN1; protein id: supported by cDNA: gi_16604327, supported by cDNA: gi_19699189 thaliana] >gi|11994183|dbj|BAB01286.1| nearly identical to
  misc_feature (7)..(291): Homolog of NCBI NO: 2129698 NR Description: protein kinase ATN1 (EC 2.7.1.-) - Arabidopsis
  misc_feature (7)..(289): Homolog of NCBI NO: 15240630 NR Description: protein kinase ATN1-like protein; protein id:
  misc_feature (7)..(287): Homolog of NCBI NO: 15237443 NR Description: protein kinase - like protein; protein id: [Arabidopsis thaliana] >gi|9758080|dbj|BAB08524.1| protein kinase
  misc_feature (6)..(287): Homolog of NCBI NO: 15240070 NR Description: protein kinase ATN1-like protein; protein id:
  misc_feature (6)..(283): Homolog of NCBI NO: 15230296 NR Description: protein kinase ATN1 - like protein; protein id:
MSSDDTIEESLLVDPKLLFIGSKIGEGAHGKVYQGRYGRQIVAIKVVNRGSKPDQQSSLESRFVREVNMMSRVQHHNLVKFIGACKDPLMVIVTELLPGMSLRKYLTSIRPQLLHLPLALSFALDIARALHCLHANGIIHRDLKPDNLLLTENHKSVKLADFGLAREESVTEMMTAETGTYRWMAPELYSTVTLRQGEKKHYNNKVDVYSFGIVLWELLTNRMPFEGMSNLQAAYAAAFKQERPVMPEGISPSLAFIVQSCWVEDPNMRPSFSQIIRLLNEFLLTLTPPPPQPLPETATNRTNGRAITEFSIRPKGKFAFIRQLFAAKRNINS

SEQ ID NO: 85005 - protein, 265 aa, Arabidopsis thaliana
  peptide (1)..(265): Ceres Seq. ID no. 12678275
  misc_feature (1)..(265): Homolog of NCBI NO: 30679428 NR Description: protein kinase, putative [Arabidopsis thaliana]
  misc_feature (12)..(265): Homolog of NCBI NO: 11259780 NR Description: protein kinase ATN1-like protein - Arabidopsis
  misc_feature (1)..(261): Homolog of NCBI NO: 28876011 NR Description: putative protein kinase [Oryza sativa (japonica
  misc_feature (1)..(223): Homolog of NCBI NO: 32815816 NR Description: protein kinase [Cucumis sativus]
  misc_feature (1)..(227): Homolog of NCBI NO: 15232197 NR Description: putative protein kinase, ATN1; protein id: supported by cDNA: gi_16604327, supported by cDNA: gi_19699189 thaliana] >gi|11994183|dbj|BAB01286.1| nearly identical to
  misc_feature (1)..(223): Homolog of NCBI NO: 2129698 NR Description: protein kinase ATN1 (EC 2.7.1.-) - Arabidopsis
  misc_feature (1)..(221): Homolog of NCBI NO: 15240630 NR Description: protein kinase ATN1-like protein; protein id:
  misc_feature (1)..(219): Homolog of NCBI NO: 15237443 NR Description: protein kinase - like protein; protein id: [Arabidopsis thaliana] >gi|9758080|dbj|BAB08524.1| protein kinase
  misc_feature (1)..(219): Homolog of NCBI NO: 15240070 NR Description: protein kinase ATN1-like protein; protein id:
  misc_feature (1)..(215): Homolog of NCBI NO: 15230296 NR Description: protein kinase ATN1 - like protein; protein id:
MMSRVQHHNLVKFIGACKDPLMVIVTELLPGMSLRKYLTSIRPQLLHLPLALSFALDIARALHCLHANGIIHRDLKPDNLLLTENHKSVKLADFGLAREESVTEMMTAETGTYRWMAPELYSTVTLRQGEKKHYNNKVDVYSFGIVLWELLTNRMPFEGMSNLQAAYAAAFKQERPVMPEGISPSLAFIVQSCWVEDPNMRPSFSQIIRLLNEFLLTLTPPPPQPLPETATNRTNGRAITEFSIRPKGKFAFIRQLFAAKRNINS

SEQ ID NO: 85006 - protein, 264 aa, Arabidopsis thaliana
  peptide (1)..(264): Ceres Seq. ID no. 12678276
  misc_feature (1)..(264): Homolog of NCBI NO: 30679428 NR Description: protein kinase, putative [Arabidopsis thaliana]
  misc_feature (11)..(264): Homolog of NCBI NO: 11259780 NR Description: protein kinase ATN1-like protein - Arabidopsis
  misc_feature (1)..(260): Homolog of NCBI NO: 28876011 NR Description: putative protein kinase [Oryza sativa (japonica
  misc_feature (1)..(222): Homolog of NCBI NO: 32815816 NR Description: protein kinase [Cucumis sativus]
  misc_feature (1)..(226): Homolog of NCBI NO: 15232197 NR Description: putative protein kinase, ATN1; protein id: supported by cDNA: gi_16604327, supported by cDNA: gi_19699189 thaliana] >gi|11994183|dbj|BAB01286.1| nearly identical to
  misc_feature (1)..(222): Homolog of NCBI NO: 2129698 NR Description: protein kinase ATN1 (EC 2.7.1.-) - Arabidopsis
  misc_feature (1)..(220): Homolog of NCBI NO: 15240630 NR Description: protein kinase ATN1-like protein; protein id:
  misc_feature (1)..(218): Homolog of NCBI NO: 15237443 NR Description: protein kinase - like protein; protein id: [Arabidopsis thaliana] >gi|9758080|dbj|BAB08524.1| protein kinase
  misc_feature (1)..(218): Homolog of NCBI NO: 15240070 NR Description: protein kinase ATN1-like protein; protein id:
  misc_feature (1)..(214): Homolog of NCBI NO: 15230296 NR Description: protein kinase ATN1 - like protein; protein id:
MSRVQHHNLVKFIGACKDPLMVIVTELLPGMSLRKYLTSIRPQLLHLPLALSFALDIARALHCLHANGIIHRDLKPDNLLLTENHKSVKLADFGLAREESVTEMMTAETGTYRWMAPELYSTVTLRQGEKKHYNNKVDVYSFGIVLWELLTNRMPFEGMSNLQAAYAAAFKQERPVMPEGISPSLAFIVQSCWVEDPNMRPSFSQIIRLLNEFLLTLTPPPPQPLPETATNRTNGRAITEFSIRPKGKFAFIRQLFAAKRNINS

SEQ ID NO: 85007 - DNA, 856 bp, Arabidopsis thaliana
  misc_feature (1)..(856): Ceres Seq. ID no. 12678277
  misc_feature: MA Experiment ID: 108433 Result: Up-regulated in Transcription
  misc_feature: MA Experiment 108433 PARAMETER Experiment Name: At_rhl_Mutant2_cDNA_P Parameter: Age (day) Value: 7
  misc_feature: MA Experiment 108433 PARAMETER Experiment Name: At_rhl_Mutant2_cDNA_P Parameter: Organism Value: A. thaliana
  misc_feature: MA Experiment 108433 PARAMETER Experiment Name: At_rhl_Mutant2_cDNA_P Parameter: Plant Line Value: rhl Mutant vs. wt landsburg
  misc_feature: MA Experiment 108433 PARAMETER Experiment Name: At_rhl_Mutant2_cDNA_P Parameter: Tissue Value: Roots
  misc_feature: MA Experiment ID: 108434 Result: Down-regulated in Transcription
  misc_feature: MA Experiment 108434 PARAMETER Experiment Name: At_Root_Tips_cDNA_P Parameter: Tissue Value: Root Tips
  misc_feature: MA Experiment ID: 108435 Result: Down-regulated in Transcription
  misc_feature: MA Experiment 108435 PARAMETER Experiment Name: At_stm_Mutants_cDNA_P Parameter: Plant Line Value: wt Landsburg vs stm
  misc_feature: MA Experiment 108435 PARAMETER Experiment Name: At_stm_Mutants_cDNA_P Parameter: Tissue Value: Shoot Apical Meristem Region
  misc_feature: MA Experiment ID: 108462 Result: Up-regulated in Transcription
  misc_feature: MA Experiment 108462 PARAMETER Experiment Name: At_Germinating_Seeds_cDNA_P Parameter: Age (day) Value: 2 vs. 0
  misc_feature: MA Experiment 108462 PARAMETER Experiment Name: At_Germinating_Seeds_cDNA_P Parameter: Tissue Value: Germinating Seeds
  misc_feature: MA Experiment ID: 108463 Result: Up-regulated in Transcription
  misc_feature: MA Experiment 108463 PARAMETER Experiment Name: At_Germinating_Seeds_cDNA_P Parameter: Age (day) Value: 3 vs. 0
  misc_feature: MA Experiment 108463 PARAMETER Experiment Name: At_Germinating_Seeds_cDNA_P Parameter: Tissue Value: Germinating Seeds
  misc_feature: MA Experiment ID: 108464 Result: Up-regulated in Transcription
  misc_feature: MA Experiment 108464 PARAMETER Experiment Name: At_Germinating_Seeds_cDNA_P Parameter: Age (day) Value: 4 vs. 0
  misc_feature: MA Experiment 108464 PARAMETER Experiment Name: At_Germinating_Seeds_cDNA_P Parameter: Tissue Value: Germinating Seeds
  misc_feature: MA Experiment ID: 108488 Result: Down-regulated in Transcription
  misc_feature: MA Experiment ID: 108577 Result: Down-regulated in Transcription
  misc_feature: MA Experiment 108577 PARAMETER Experiment Name: At_42deg_Heat_cDNA_P Parameter: Temperature (deg C) Value: 42 vs. 22
  misc_feature: MA Experiment 108577 PARAMETER Experiment Name: At_42deg_Heat_cDNA_P Parameter: Timepoint (hr) Value: 6
  misc_feature: MA Experiment 108577 PARAMETER Experiment Name: At_42deg_Heat_cDNA_P Parameter: Tissue Value: Aerial
  misc_feature: MA Experiment ID: 20000090 Result: Up-regulated in Transcription
  misc_feature: MA Experiment ID: 20000111 Result: Down-regulated in Transcription
  misc_feature: MA Experiment 20000111 PARAMETER Experiment Name: At_42deg_Heat_cDNA_P Parameter: Temperature (deg C) Value: 42 vs. 22
  misc_feature: MA Experiment 20000111 PARAMETER Experiment Name: At_42deg_Heat_cDNA_P Parameter: Timepoint (hr) Value: 6
  misc_feature: MA Experiment 20000111 PARAMETER Experiment Name: At_42deg_Heat_cDNA_P Parameter: Tissue Value: Aerial
  misc_feature: MA Experiment ID: 20000113 Result: Down-regulated in Transcription
  misc_feature: MA Experiment 20000113 PARAMETER Experiment Name: At_42deg_Heat_cDNA_P Parameter: Temperature (deg C) Value: 42 vs. 22
  misc_feature: MA Experiment 20000113 PARAMETER Experiment Name: At_42deg_Heat_cDNA_P Parameter: Timepoint (hr) Value: 8
  misc_feature: MA Experiment 20000113 PARAMETER Experiment Name: At_42deg_Heat_cDNA_P Parameter: Tissue Value: Aerial
acggcataataagaccaagaagaaaaagaaaacattaatttcaaccaaagcaaaacagagagaaaaaaatagagagagtgaatcaatttcggtggagaaagagaagaatggagcagccgtacgtgtacgcatacccgcaaggtagtggcccctcgggagctccgactccacaagccggaggagtggtagtggatccaaagtactgcgctccttaccctatagatatggcgatcgtacggaagatgatgtcgttaacggacggcaatttcgtgataacggacgtcaacggaaacctgctgttcaaggtgaaggaaccggtgtttggtctccacgacaagagggtcttgctggatggttctggtactccggtcgtcactttgagagaaaagatggtgagcatgcatgacaggtggcaagtgtttagaggagggagtacggatcagcgtgatctgctgtacacggtgaaaagatcgtcgatgcttcagctaaagaccaaactcgatgtgtttttgggacacaacaaagatgagaagagatgtgatttcagagtcaaagggagttggctcgagcgttcttgtgttgtttacgccggcgaatctgacgccattgttgcccaagtatactatctctaactctctttccttcattaagggcccatccatctcatttatcaatgcatctcacatgtctctacacagtacacattaattagcaatgttttaatctggttttggtctactgctttagaatccggttttgatggacaggtttaggtagtttttgatttcggtttagatcaaaagatacatttatcttagcccatatattgtatgtttgatgaaattgggaagatttg

SEQ ID NO: 85008 - protein, 174 aa, Arabidopsis thaliana
  peptide (1)..(174): Ceres Seq. ID no. 12678278
  misc_feature (25)..(172): Pfam Name: Protein of unknown function (DUF567) Pfam Description: Protein of unknown function (DUF567)
  misc_feature (1)..(174): Homolog of NCBI NO: 18413737 NR Description: expressed protein; protein id: At5g01750.1,
  misc_feature (1)..(174): Homolog of NCBI NO: 21553506 NR Description: unknown [Arabidopsis thaliana]
  misc_feature (1)..(172): Homolog of NCBI NO: 30679390 NR Description: expressed protein [Arabidopsis thaliana]
  misc_feature (1)..(174): Homolog of NCBI NO: 25352417 NR Description: hypothetical protein T3M13.14 - Arabidopsis
  misc_feature (1)..(171): Homolog of NCBI NO: 9665105 NR Description: Hypothetical protein [Arabidopsis thaliana]
  misc_feature (26)..(171): Homolog of NCBI NO: 15217694 NR Description: unknown protein; protein id: At1g33840.1
  misc_feature (26)..(171): Homolog of NCBI NO: 17979321 NR Description: unknown protein [Arabidopsis thaliana]
  misc_feature (26)..(171): Homolog of NCBI NO: 15225960 NR Description: unknown protein; protein id: At2g14560.1, by cDNA: gi_17979320 [Arabidopsis thaliana]
  misc_feature (18)..(171): Homolog of NCBI NO: 27818079 NR Description: OSJNBa0086N05.7 [Oryza sativa (japonica
  misc_feature (27)..(172): Homolog of NCBI NO: 15228906 NR Description: hypothetical protein; protein id: At3g16900.1 thaliana] >gi|7670020|dbj|BAA94974.1|
MEQPYVYAYPQGSGPSGAPTPQAGGVVVDPKYCAPYPIDMAIVRKMMSLTDGNFVITDVNGNLLFKVKEPVFGLHDKRVLLDGSGTPVVTLREKMVSMHDRWQVFRGGSTDQRDLLYTVKRSSMLQLKTKLDVFLGHNKDEKRCDFRVKGSWLERSCVVYAGESDAIVAQVYYL

SEQ ID NO: 85009 - protein, 135 aa, Arabidopsis thaliana
  peptide (1)..(135): Ceres Seq. ID no. 12678279
  misc_feature (1)..(133): Pfam Name: Protein of unknown function (DUF567) Pfam Description: Protein of unknown function (DUF567)
  misc_feature (1)..(135): Homolog of NCBI NO: 18413737 NR Description: expressed protein; protein id: At5g01750.1,
  misc_feature (1)..(135): Homolog of NCBI NO: 21553506 NR Description: unknown [Arabidopsis thaliana]
  misc_feature (1)..(133): Homolog of NCBI NO: 30679390 NR Description: expressed protein [Arabidopsis thaliana]
  misc_feature (1)..(135): Homolog of NCBI NO: 25352417 NR Description: hypothetical protein T3M13.14 - Arabidopsis
  misc_feature (1)..(132): Homolog of NCBI NO: 9665105 NR Description: Hypothetical protein [Arabidopsis thaliana]
  misc_feature (1)..(132): Homolog of NCBI NO: 15217694 NR Description: unknown protein; protein id: At1g33840.1
  misc_feature (1)..(132): Homolog of NCBI NO: 17979321 NR Description: unknown protein [Arabidopsis thaliana]
  misc_feature (1)..(132): Homolog of NCBI NO: 15225960 NR Description: unknown protein; protein id: At2g14560.1, by cDNA: gi_17979320 [Arabidopsis thaliana]
  misc_feature (1)..(132): Homolog of NCBI NO: 27818079 NR Description: OSJNBa0086N05.7 [Oryza sativa (japonica
  misc_feature (1)..(133): Homolog of NCBI NO: 15228906 NR Description: hypothetical protein; protein id: At3g16900.1 thaliana] >gi|7670020|dbj|BAA94974.1|
MAIVRKMMSLTDGNFVITDVNGNLLFKVKEPVFGLHDKRVLLDGSGTPVVTLREKMVSMHDRWQVFRGGSTDQRDLLYTVKRSSMLQLKTKLDVFLGHNKDEKRCDFRVKGSWLERSCVVYAGESDAIVAQVYYL

SEQ ID NO: 85010 - protein, 129 aa, Arabidopsis thaliana
  peptide (1)..(129): Ceres Seq. ID no. 12678280
  misc_feature (1)..(127): Pfam Name: Protein of unknown function (DUF567) Pfam Description: Protein of unknown function (DUF567)
  misc_feature (1)..(129): Homolog of NCBI NO: 18413737 NR Description: expressed protein; protein id: At5g01750.1,
  misc_feature (1)..(129): Homolog of NCBI NO: 21553506 NR Description: unknown [Arabidopsis thaliana]
  misc_feature (1)..(127): Homolog of NCBI NO: 30679390 NR Description: expressed protein [Arabidopsis thaliana]
  misc_feature (1)..(129): Homolog of NCBI NO: 25352417 NR Description: hypothetical protein T3M13.14 - Arabidopsis
  misc_feature (1)..(126): Homolog of NCBI NO: 9665105 NR Description: Hypothetical protein [Arabidopsis thaliana]
  misc_feature (1)..(126): Homolog of NCBI NO: 15217694 NR Description: unknown protein; protein id: At1g33840.1
  misc_feature (1)..(126): Homolog of NCBI NO: 17979321 NR Description: unknown protein [Arabidopsis thaliana]
  misc_feature (1)..(126): Homolog of NCBI NO: 15225960 NR Description: unknown protein; protein id: At2g14560.1, by cDNA: gi_17979320 [Arabidopsis thaliana]
  misc_feature (1)..(126): Homolog of NCBI NO: 27818079 NR Description: OSJNBa0086N05.7 [Oryza sativa (japonica
  misc_feature (1)..(127): Homolog of NCBI NO: 15228906 NR Description: hypothetical protein; protein id: At3g16900.1 thaliana] >gi|7670020|dbj|BAA94974.1|
MMSLTDGNFVITDVNGNLLFKVKEPVFGLHDKRVLLDGSGTPVVTLREKMVSMHDRWQVFRGGSTDQRDLLYTVKRSSMLQLKTKLDVFLGHNKDEKRCDFRVKGSWLERSCVVYAGESDAIVAQVYYL

SEQ ID NO: 85011 - DNA, 1343 bp, Arabidopsis thaliana
  misc_feature (1)..(1343): Ceres Seq. ID no. 12678322
  misc_feature: MA Experiment ID: 20000169 Result: Down-regulated in Transcription
  misc_feature: MA Experiment 20000169 PARAMETER Experiment Name: At_100uM_ABA_P Parameter: Age (day) Value: 14
  misc_feature: MA Experiment 20000169 PARAMETER Experiment Name: At_100uM_ABA_P Parameter: Organism Value: A. thaliana
  misc_feature: MA Experiment 20000169 PARAMETER Experiment Name: At_100uM_ABA_P Parameter: Plant Line Value: WS
  misc_feature: MA Experiment 20000169 PARAMETER Experiment Name: At_100uM_ABA_P Parameter: Timepoint (hr) Value: 6
  misc_feature: MA Experiment 20000169 PARAMETER Experiment Name: At_100uM_ABA_P Parameter: Tissue Value: Aerial
  misc_feature: MA Experiment 20000169 PARAMETER Experiment Name: At_100uM_ABA_P Parameter: Treatment Value: 100uM ABA vs. No Treatment
  misc_feature: MA Experiment ID: 20000185 Result: Down-regulated in Transcription
  misc_feature: MA Experiment 20000185 PARAMETER Experiment Name: At_Roots__P Parameter: Age (day) Value: 7 vs. 21
  misc_feature: MA Experiment 20000185 PARAMETER Experiment Name: At_Roots__P Parameter: Organism Value: A. thaliana
  misc_feature: MA Experiment 20000185 PARAMETER Experiment Name: At_Roots__P Parameter: Tissue Value: Roots vs. Whole Plant
  misc_feature: MA Experiment ID: 20000265 Result: Up-regulated in Transcription
  misc_feature: MA Experiment 20000265 PARAMETER Experiment Name: At_Open_Flower_P Parameter: Age (day) Value: 21
  misc_feature: MA Experiment 20000265 PARAMETER Experiment Name: At_Open_Flower_P Parameter: Plant Line Value: WS
  misc_feature: MA Experiment 20000265 PARAMETER Experiment Name: At_Open_Flower_P Parameter: Tissue Value: Closed Flower vs. Whole Plant
  misc_feature: MA Experiment ID: 20000439 Result: Down-regulated in Transcription
  misc_feature: MA Experiment 20000439 PARAMETER Experiment Name: At_Roots__P Parameter: Age (day) Value: 14 vs. 21
  misc_feature: MA Experiment 20000439 PARAMETER Experiment Name: At_Roots__P Parameter: Organism Value: A. thaliana
  misc_feature: MA Experiment 20000439 PARAMETER Experiment Name: At_Roots__P Parameter: Tissue Value: Roots vs. Whole Plant
  misc_feature: MA Experiment ID: 20000496 Result: Up-regulated in Transcription
  misc_feature: MA Experiment 20000496 PARAMETER Experiment Name: At_Guard_Cells_P Parameter: Harvest Date Value: 7/19/2002
  misc_feature: MA Experiment 20000496 PARAMETER Experiment Name: At_Guard_Cells_P Parameter: Organism Value: Canola
  misc_feature: MA Experiment 20000496 PARAMETER Experiment Name: At_Guard_Cells_P Parameter: Tissue Value: Guard Cells vs. Leaves
  misc_feature: MA Experiment ID: 20001247 Result: Up-regulated in Transcription
  misc_feature: MA Experiment 20001247 PARAMETER Experiment Name: At_Far-red-induction_P Parameter: Age (day) Value: 7
  misc_feature: MA Experiment 20001247 PARAMETER Experiment Name: At_Far-red-induction_P Parameter: Light Value: Far-red vs. White
  misc_feature: MA Experiment 20001247 PARAMETER Experiment Name: At_Far-red-induction_P Parameter: Organism Value: A. thaliana
  misc_feature: MA Experiment 20001247 PARAMETER Experiment Name: At_Far-red-induction_P Parameter: Plant Line Value: Columbia
  misc_feature: MA Experiment 20001247 PARAMETER Experiment Name: At_Far-red-induction_P Parameter: Timepoint (hr) Value: 1
  misc_feature: MA Experiment 20001247 PARAMETER Experiment Name: At_Far-red-induction_P Parameter: Tissue Value: Whole Plant
  misc_feature: MA Experiment ID: 20001451 Result: Up-regulated in Transcription
  misc_feature: MA Experiment 20001451 PARAMETER Experiment Name: At_Far-red-induction_P Parameter: Age (day) Value: 7
  misc_feature: MA Experiment 20001451 PARAMETER Experiment Name: At_Far-red-induction_P Parameter: Light Value: Far-red vs. White
  misc_feature: MA Experiment 20001451 PARAMETER Experiment Name: At_Far-red-induction_P Parameter: Organism Value: A. thaliana
  misc_feature: MA Experiment 20001451 PARAMETER Experiment Name: At_Far-red-induction_P Parameter: Plant Line Value: Columbia
  misc_feature: MA Experiment 20001451 PARAMETER Experiment Name: At_Far-red-induction_P Parameter: Timepoint (hr) Value: 24
  misc_feature: MA Experiment 20001451 PARAMETER Experiment Name: At_Far-red-induction_P Parameter: Tissue Value: Whole Plant
  misc_feature: MA Experiment ID: 20001557 Result: Up-regulated in Transcription
  misc_feature: MA Experiment 20001557 PARAMETER Experiment Name: At_Drought_Soil_Dry_P Parameter: Age (day) Value: 27
  misc_feature: MA Experiment 20001557 PARAMETER Experiment Name: At_Drought_Soil_Dry_P Parameter: Organism Value: A. thaliana
  misc_feature: MA Experiment 20001557 PARAMETER Experiment Name: At_Drought_Soil_Dry_P Parameter: Plant Line Value: WS
  misc_feature: MA Experiment 20001557 PARAMETER Experiment Name: At_Drought_Soil_Dry_P Parameter: Post Timepoint (hr) Value: 3
  misc_feature: MA Experiment 20001557 PARAMETER Experiment Name: At_Drought_Soil_Dry_P Parameter: Post-Treatment Value: Re-Water vs. No Drought
  misc_feature: MA Experiment 20001557 PARAMETER Experiment Name: At_Drought_Soil_Dry_P Parameter: Timepoint (day) Value: 13
  misc_feature: MA Experiment 20001557 PARAMETER Experiment Name: At_Drought_Soil_Dry_P Parameter: Treatment Value: Drought vs. No Drought
  misc_feature: MA Experiment ID: 20001558 Result: Up-regulated in Transcription
  misc_feature: MA Experiment 20001558 PARAMETER Experiment Name: At_Drought_Soil_Dry_P Parameter: Age (day) Value: 27
  misc_feature: MA Experiment 20001558 PARAMETER Experiment Name: At_Drought_Soil_Dry_P Parameter: Organism Value: A. thaliana
  misc_feature: MA Experiment 20001558 PARAMETER Experiment Name: At_Drought_Soil_Dry_P Parameter: Plant Line Value: WS
  misc_feature: MA Experiment 20001558 PARAMETER Experiment Name: At_Drought_Soil_Dry_P Parameter: Post Timepoint (hr) Value: 6
  misc_feature: MA Experiment 20001558 PARAMETER Experiment Name: At_Drought_Soil_Dry_P Parameter: Post-Treatment Value: Re-Water vs. No Drought
  misc_feature: MA Experiment 20001558 PARAMETER Experiment Name: At_Drought_Soil_Dry_P Parameter: Timepoint (day) Value: 13
  misc_feature: MA Experiment 20001558 PARAMETER Experiment Name: At_Drought_Soil_Dry_P Parameter: Treatment Value: Drought vs. No Drought
  misc_feature: MA Experiment ID: 20001560 Result: Up-regulated in Transcription
  misc_feature: MA Experiment 20001560 PARAMETER Experiment Name: At_Drought_Soil_Dry_P Parameter: Age (day) Value: 28
  misc_feature: MA Experiment 20001560 PARAMETER Experiment Name: At_Drought_Soil_Dry_P Parameter: Organism Value: A. thaliana
  misc_feature: MA Experiment 20001560 PARAMETER Experiment Name: At_Drought_Soil_Dry_P Parameter: Plant Line Value: WS
  misc_feature: MA Experiment 20001560 PARAMETER Experiment Name: At_Drought_Soil_Dry_P Parameter: Post Timepoint (hr) Value: None
  misc_feature: MA Experiment 20001560 PARAMETER Experiment Name: At_Drought_Soil_Dry_P Parameter: Post-Treatment Value: None
  misc_feature: MA Experiment 20001560 PARAMETER Experiment Name: At_Drought_Soil_Dry_P Parameter: Timepoint (day) Value: 14
  misc_feature: MA Experiment 20001560 PARAMETER Experiment Name: At_Drought_Soil_Dry_P Parameter: Treatment Value: Drought vs. No Drought
aaatgagtttaaggtcctgcaaaaactgggtttttcctcgtgtacttgttcatcttatctcctctgcataaacttcattgaagaaaaagtcttttttattttgttgatctcttttaattaagatccttttgggttttaatttattaatctccaagaaaaaaaatggatatgagaagccatgaaatgatagagagaagaagagaagacaatggcaacaacaatggtggtgttgttattagtaacatcattagtactaatattgatgataattgcaatggtaataacaacaacactcgtgtctcttgcaactctcaaaccctagatcaccaccaatccaagtctccctcttcgttttccatctccgccgcagctaaacccaccgtaagataccgtgagtgtctaaagaatcatgcggcgagcgtcggcggaagtgttcacgacggatgcggcgagtttatgccgagtggtgaagaaggaacaatcgaagctctcagatgcgctgcttgtgattgtcaccgtaatttccaccggaaagaaatggacggcgttggaagctcggatttgatctctcaccaccgtcatcaccactaccaccataaccaatacggtggaggaggagggagaagacctccgccgccgaatatgatgcttaacccactcatgcttcctccgccaccgaattatcagccgattcaccaccacaagtatggaatgagtcctcccggaggaggaggaatggtgacgccgatgagcgttgcttacggcggtggaggaggaggagctgagtcgtctagtgaagatctgaatctgtacggacaatcaagcggagaaggagctggtgcggcggcgggacaaatggcgttttcgatgtcgtcgtctaagaaaagattcaggacaaagttcacgacggatcagaaggagaggatgatggactttgcggagaagctagggtggaggatgaacaagcaagacgaagaagagcttaagagattctgcggcgagatcggagtgaagagacaagtcttcaaagtttggatgcataacaacaagaacaatgctaagaaaccaccaacaccaacaactactctctaatcagtgatcatatgattaattgagagattatgtaagagattttcttttaatctacttttgttgttgttgtttatttaatgttttccttcttctaggtttttgtagtttgtacgatctttggatcaatcaatggatcttttgtttgcttagttaatgtttttaattttggtttgccttttttttttagtctttttattttattttgtttgtcttttacccggatcgtacttgtaatcagcttctgttgcttc

SEQ ID NO: 85012 - protein, 309 aa, Arabidopsis thaliana; identical to SEQ ID NO: 28543
  peptide (1)..(309): Ceres Seq. ID no. 12678323
  misc_feature (71)..(130): Pfam Name: ZF-HD protein dimerisation region Pfam Description: ZF-HD protein dimerisation region
  misc_feature (1)..(309): Homolog of NCBI NO: 18410804 NR Description: expressed protein; protein id: At1g75240.1, by cDNA: 10873. [Arabidopsis thaliana] >gi|25406424|pir||G96782
  misc_feature (74)..(176): Homolog of NCBI NO: 15233925 NR Description: putative protein; protein id: At4g24660.1, by cDNA: gi_16612294 [Arabidopsis thaliana]
  misc_feature (235)..(302): Homolog of NCBI NO: 15233925 NR Description: putative protein; protein id: At4g24660.1, by cDNA: gi_16612294 [Arabidopsis thaliana]
  misc_feature (14)..(206): Homolog of NCBI NO: 15238445 NR Description: hypothetical protein common family; protein id: [Arabidopsis thaliana] >gi|9759621|dbj|BAB11563.1| contains to unknown protein~gene_id:MNA5.14~pir||T05568 [Arabidopsis
  misc_feature (240)..(305): Homolog of NCBI NO: 15238445 NR Description: hypothetical protein common family; protein id: [Arabidopsis thaliana] >gi|9759621|dbj|BAB11563.1| contains to unknown protein~gene_id:MNA5.14~pir||T05568 [Arabidopsis
  misc_feature (67)..(307): Homolog of NCBI NO: 19387257 NR Description: hypothetical protein [Oryza sativa (japonica
  misc_feature (167)..(298): Homolog of NCBI NO: 5091602 NR Description: 10A19I.6 [Oryza sativa]
  misc_feature (58)..(128): Homolog of NCBI NO: 5091602 NR Description: 10A19I.6 [Oryza sativa]
  misc_feature (17)..(128): Homolog of NCBI NO: 21554149 NR Description: unknown [Arabidopsis thaliana]
  misc_feature (204)..(301): Homolog of NCBI NO: 21554149 NR Description: unknown [Arabidopsis thaliana]

SEQ ID NO: 85013 - protein, 307 aa, Arabidopsis thaliana; identical to SEQ ID NO: 28544
  peptide (1)..(307): Ceres Seq. ID no. 12678324
  misc_feature (69)..(128): Pfam Name: ZF-HD protein dimerisation region Pfam Description: ZF-HD protein dimerisation region
  misc_feature (1)..(307): Homolog of NCBI NO: 18410804 NR Description: expressed protein; protein id: At1g75240.1, by cDNA: 10873. [Arabidopsis thaliana] >gi|25406424|pir||G96782
  misc_feature (72)..(174): Homolog of NCBI NO: 15233925 NR Description: putative protein; protein id: At4g24660.1, by cDNA: gi_16612294 [Arabidopsis thaliana]
  misc_feature (233)..(300): Homolog of NCBI NO: 15233925 NR Description: putative protein; protein id: At4g24660.1, by cDNA: gi_16612294 [Arabidopsis thaliana]
  misc_feature (12)..(204): Homolog of NCBI NO: 15238445 NR Description: hypothetical protein common family; protein id: [Arabidopsis thaliana] >gi|9759621|dbj|BAB11563.1| contains to unknown protein~gene_id:MNA5.14~pir||T05568 [Arabidopsis
  misc_feature (238)..(303): Homolog of NCBI NO: 15238445 NR Description: hypothetical protein common family; protein id: [Arabidopsis thaliana] >gi|9759621|dbj|BAB11563.1| contains to unknown protein~gene_id:MNA5.14~pir||T05568 [Arabidopsis
  misc_feature (65)..(305): Homolog of NCBI NO: 19387257 NR Description: hypothetical protein [Oryza sativa (japonica
  misc_feature (165)..(296): Homolog of NCBI NO: 5091602 NR Description: 10A19I.6 [Oryza sativa]
  misc_feature (56)..(126): Homolog of NCBI NO: 5091602 NR Description: 10A19I.6 [Oryza sativa]
  misc_feature (15)..(126): Homolog of NCBI NO: 21554149 NR Description: unknown [Arabidopsis thaliana]
  misc_feature (202)..(299): Homolog of NCBI NO: 21554149 NR Description: unknown [Arabidopsis thaliana]

SEQ ID NO: 85014 - protein, 302 aa, Arabidopsis thaliana; identical to SEQ ID NO: 28545
  peptide (1)..(302): Ceres Seq. ID no. 12678325
  misc_feature (64)..(123): Pfam Name: ZF-HD protein dimerisation region Pfam Description: ZF-HD protein dimerisation region
  misc_feature (1)..(302): Homolog of NCBI NO: 18410804 NR Description: expressed protein; protein id: At1g75240.1, by cDNA: 10873. [Arabidopsis thaliana] >gi|25406424|pir||G96782
  misc_feature (67)..(169): Homolog of NCBI NO: 15233925 NR Description: putative protein; protein id: At4g24660.1, by cDNA: gi_16612294 [Arabidopsis thaliana]
  misc_feature (228)..(295): Homolog of NCBI NO: 15233925 NR Description: putative protein; protein id: At4g24660.1, by cDNA: gi_16612294 [Arabidopsis thaliana]
  misc_feature (7)..(199): Homolog of NCBI NO: 15238445 NR Description: hypothetical protein common family; protein id: [Arabidopsis thaliana] >gi|9759621|dbj|BAB11563.1| contains to unknown protein~gene_id:MNA5.14~pir||T05568 [Arabidopsis
  misc_feature (233)..(298): Homolog of NCBI NO: 15238445 NR Description: hypothetical protein common family; protein id: [Arabidopsis thaliana] >gi|9759621|dbj|BAB11563.1| contains to unknown protein~gene_id:MNA5.14~pir||T05568 [Arabidopsis
  misc_feature (60)..(300): Homolog of NCBI NO: 19387257 NR Description: hypothetical protein [Oryza sativa (japonica
  misc_feature (160)..(291): Homolog of NCBI NO: 5091602 NR Description: 10A19I.6 [Oryza sativa]
  misc_feature (51)..(121): Homolog of NCBI NO: 5091602 NR Description: 10A19I.6 [Oryza sativa]
  misc_feature (10)..(121): Homolog of NCBI NO: 21554149 NR Description: unknown [Arabidopsis thaliana]
  misc_feature (197)..(294): Homolog of NCBI NO: 21554149 NR Description: unknown [Arabidopsis thaliana]

SEQ ID NO: 85015 - DNA, 1134 bp, Arabidopsis thaliana
  misc_feature (1)..(1134): Ceres Seq. ID no. 12678354
  misc_feature: MA Experiment ID: 108434 Result: Up-regulated in Transcription
  misc_feature: MA Experiment 108434 PARAMETER Experiment Name: At_Root_Tips_cDNA_P Parameter: Tissue Value: Root Tips
  misc_feature: MA Experiment ID: 108463 Result: Down-regulated in Transcription
  misc_feature: MA Experiment 108463 PARAMETER Experiment Name: At_Germinating_Seeds_cDNA_P Parameter: Age (day) Value: 3 vs. 0
  misc_feature: MA Experiment 108463 PARAMETER Experiment Name: At_Germinating_Seeds_cDNA_P Parameter: Tissue Value: Germinating Seeds
  misc_feature: MA Experiment ID: 108573 Result: Up-regulated in Transcription
  misc_feature: MA Experiment 108573 PARAMETER Experiment Name: At_Drought_cDNA_P Parameter: Timepoint (hr) Value: 6
  misc_feature: MA Experiment 108573 PARAMETER Experiment Name: At_Drought_cDNA_P Parameter: Tissue Value: Aerial
  misc_feature: MA Experiment 108573 PARAMETER Experiment Name: At_Drought_cDNA_P Parameter: Treatment Value: Drought vs. No Drought
  misc_feature: MA Experiment ID: 108595 Result: Down-regulated in Transcription
  misc_feature: MA Experiment 108595 PARAMETER Experiment Name: At_Ler-pi_Ovule_cDNA_P Parameter: Plant Line Value: null
  misc_feature: MA Experiment ID: 20000111 Result: Up-regulated in Transcription
  misc_feature: MA Experiment 20000111 PARAMETER Experiment Name: At_42deg_Heat_cDNA_P Parameter: Temperature (deg C) Value: 42 vs. 22
  misc_feature: MA Experiment 20000111 PARAMETER Experiment Name: At_42deg_Heat_cDNA_P Parameter: Timepoint (hr) Value: 6
  misc_feature: MA Experiment 20000111 PARAMETER Experiment Name: At_42deg_Heat_cDNA_P Parameter: Tissue Value: Aerial
  misc_feature: MA Experiment ID: 20000112 Result: Up-regulated in Transcription
  misc_feature: MA Experiment 20000112 PARAMETER Experiment Name: At_42deg_Heat_cDNA_P Parameter: Temperature (deg C) Value: 42 vs. 22
  misc_feature: MA Experiment 20000112 PARAMETER Experiment Name: At_42deg_Heat_cDNA_P Parameter: Timepoint (hr) Value: 2
  misc_feature: MA Experiment 20000112 PARAMETER Experiment Name: At_42deg_Heat_cDNA_P Parameter: Tissue Value: Aerial
  misc_feature: MA Experiment ID: 20000113 Result: Up-regulated in Transcription
  misc_feature: MA Experiment 20000113 PARAMETER Experiment Name: At_42deg_Heat_cDNA_P Parameter: Temperature (deg C) Value: 42 vs. 22
  misc_feature: MA Experiment 20000113 PARAMETER Experiment Name: At_42deg_Heat_cDNA_P Parameter: Timepoint (hr) Value: 8
  misc_feature: MA Experiment 20000113 PARAMETER Experiment Name: At_42deg_Heat_cDNA_P Parameter: Tissue Value: Aerial
  misc_feature: MA Experiment ID: 20000173 Result: Up-regulated in Transcription
  misc_feature: MA Experiment 20000173 PARAMETER Experiment Name: At_42deg_Heat_P Parameter: Age (day) Value: 14
  misc_feature: MA Experiment 20000173 PARAMETER Experiment Name: At_42deg_Heat_P Parameter: Organism Value: A. thaliana
  misc_feature: MA Experiment 20000173 PARAMETER Experiment Name: At_42deg_Heat_P Parameter: Plant Line Value: WS
  misc_feature: MA Experiment 20000173 PARAMETER Experiment Name: At_42deg_Heat_P Parameter: Temperature (deg C) Value: 42 vs. 22
  misc_feature: MA Experiment 20000173 PARAMETER Experiment Name: At_42deg_Heat_P Parameter: Timepoint (hr) Value: 6
  misc_feature: MA Experiment 20000173 PARAMETER Experiment Name: At_42deg_Heat_P Parameter: Tissue Value: Aerial
  misc_feature: MA Experiment ID: 20000224 Result: Down-regulated in Transcription
gggatcgtaagaacagaggatttttctcggccaagttttctctagctcaggtgtttgatgtgaattttttgagggaggggaatgagttcaatgagcagaagcagaagtcgaagtagaagtcgtagtcgggatcggtttcgtagtcggagtccgagagacaggagaatgagatctgaacgagtttcttaccatgatgctccttctagaagggagagggagccacgtcgtgccttcagccaaggaaatctctgcaacaactgcaagcgacctggtcactttgcaagagactgttctaatgtttccgtctgtaacaactgtggtcttccagggcacattgcagcagaatgcactgcggaatcacgttgttggaactgtagagaaccgggccacgtagcctcaaactgttcaaacgaaggaatctgccactcctgtggtaaatctggacatcgagccagagactgctctaattcggattctcgtgcaggagacttaaggctctgcaacaactgcttcaaacagggacatcttgccgctgactgcacaaatgacaaggcgtgcaagaactgcaggacttcaggtcacatagctcgcgattgcaggaacgatccagtttgtaacatctgcagtatctcggggcatgttgctagacactgcccaaagggtgacagcaattactctgacagaggaagcagggttcgagatggtggtatgcaaagaggtggtttgagcagaatgagcagagacagagaaggcgttagtgctatgataatatgtcacaattgtggtggccgaggacacagggcgtacgagtgtccgtctgctcgagtcgctgaccgtggattccgccggtactgaggctcttaaatttaccaattgaagttccattcatcttcacctttacccttttagcttctgcactcttgtttttgttgagctacattgttgttttctaatctcatggtttttgtctattggagtgaatcaaggatggttttagttttggtttgttttcggaaaatttgagacattgcttgtgttgtatgaagtattgaacagattagtgtgatgcagagttctgagttttcagaactcaatattatattaaaaacaaattttaatggtttgctttctccc

SEQ ID NO: 85016 - protein, 257 aa, Arabidopsis thaliana; identical to SEQ ID NO: 39512
  peptide (1)..(257): Ceres Seq. ID no. 12678355
  misc_feature (229)..(246): Pfam Name: Zinc knuckle Pfam Description: Zinc knuckle
  misc_feature (1)..(257): Homolog of NCBI NO: 18410883 NR Description: DNA-binding protein; protein id: At1g75560.1,
  misc_feature (4)..(257): Homolog of NCBI NO: 21537255 NR Description: DNA-binding protein [Arabidopsis thaliana]
  misc_feature (23)..(257): Homolog of NCBI NO: 25404984 NR Description: protein F10A5.22 [imported] - Arabidopsis >gi|9369368|gb|AAF87117.1|AC006434_13 F10A5.22 [Arabidopsis
  misc_feature (20)..(252): Homolog of NCBI NO: 37536582 NR Description: putative zinc finger protein [Oryza sativa
  misc_feature (57)..(193): Homolog of NCBI NO: 6324074 NR Description: GIG3 suppressor; Gis2p [Saccharomyces cerevisiae]
  misc_feature (56)..(172): Homolog of NCBI NO: 6324074 NR Description: GIG3 suppressor; Gis2p [Saccharomyces cerevisiae]
  misc_feature (75)..(191): Homolog of NCBI NO: 26347241 NR Description: unnamed protein product [Mus musculus]
  misc_feature (45)..(255): Homolog of NCBI NO: 729704 NR Description: DNA-binding protein HEXBP (Hexamer-binding
  misc_feature (71)..(191): Homolog of NCBI NO: 16549164 NR Description: unnamed protein product [Homo sapiens]
  misc_feature (71)..(191): Homolog of NCBI NO: 1055224 NR Description: cellular nucleic acid binding protein

SEQ ID NO: 85017 - protein, 254 aa, Arabidopsis thaliana; identical to SEQ ID NO: 39513
  peptide (1)..(254): Ceres Seq. ID no. 12678356
  misc_feature (226)..(243): Pfam Name: Zinc knuckle Pfam Description: Zinc knuckle
  misc_feature (1)..(254): Homolog of NCBI NO: 18410883 NR Description: DNA-binding protein; protein id: At1g75560.1,
  misc_feature (1)..(254): Homolog of NCBI NO: 21537255 NR Description: DNA-binding protein [Arabidopsis thaliana]
  misc_feature (20)..(254): Homolog of NCBI NO: 25404984 NR Description: protein F10A5.22 [imported] - Arabidopsis >gi|9369368|gb|AAF87117.1|AC006434_13 F10A5.22 [Arabidopsis
  misc_feature (17)..(249): Homolog of NCBI NO: 37536582 NR Description: putative zinc finger protein [Oryza sativa
  misc_feature (54)..(190): Homolog of NCBI NO: 6324074 NR Description: GIG3 suppressor; Gis2p [Saccharomyces cerevisiae]
  misc_feature (53)..(169): Homolog of NCBI NO: 6324074 NR Description: GIG3 suppressor; Gis2p [Saccharomyces cerevisiae]
  misc_feature (72)..(188): Homolog of NCBI NO: 26347241 NR Description: unnamed protein product [Mus musculus]
  misc_feature (42)..(252): Homolog of NCBI NO: 729704 NR Description: DNA-binding protein HEXBP (Hexamer-binding
  misc_feature (68)..(188): Homolog of NCBI NO: 16549164 NR Description: unnamed protein product [Homo sapiens]
  misc_feature (68)..(188): Homolog of NCBI NO: 1055224 NR Description: cellular nucleic acid binding protein

SEQ ID NO: 85018 - protein, 229 aa, Arabidopsis thaliana; identical to SEQ ID NO: 39514
  peptide (1)..(229): Ceres Seq. ID no. 12678357
  misc_feature (201)..(218): Pfam Name: Zinc knuckle Pfam Description: Zinc knuckle
  misc_feature (1)..(229): Homolog of NCBI NO: 18410883 NR Description: DNA-binding protein; protein id: At1g75560.1,
  misc_feature (1)..(229): Homolog of NCBI NO: 21537255 NR Description: DNA-binding protein [Arabidopsis thaliana]
  misc_feature (1)..(229): Homolog of NCBI NO: 25404984 NR Description: protein F10A5.22 [imported] - Arabidopsis >gi|9369368|gb|AAF87117.1|AC006434_13 F10A5.22 [Arabidopsis
  misc_feature (1)..(224): Homolog of NCBI NO: 37536582 NR Description: putative zinc finger protein [Oryza sativa
  misc_feature (29)..(165): Homolog of NCBI NO: 6324074 NR Description: GIG3 suppressor; Gis2p [Saccharomyces cerevisiae]
  misc_feature (28)..(144): Homolog of NCBI NO: 6324074 NR Description: GIG3 suppressor; Gis2p [Saccharomyces cerevisiae]
  misc_feature (47)..(163): Homolog of NCBI NO: 26347241 NR Description: unnamed protein product [Mus musculus]
  misc_feature (17)..(227): Homolog of NCBI NO: 729704 NR Description: DNA-binding protein HEXBP (Hexamer-binding
  misc_feature (43)..(163): Homolog of NCBI NO: 16549164 NR Description: unnamed protein product [Homo sapiens]
  misc_feature (43)..(163): Homolog of NCBI NO: 1055224 NR Description: cellular nucleic acid binding protein

SEQ ID NO: 85019 - DNA, 1128 bp, Arabidopsis thaliana
  misc_feature (1)..(1128): Ceres Seq. ID no. 12678360
  misc_feature: MA Experiment ID: 108463 Result: Up-regulated in Transcription
  misc_feature: MA Experiment 108463 PARAMETER Experiment Name: At_Germinating_Seeds_cDNA_P Parameter: Age (day) Value: 3 vs. 0
  misc_feature: MA Experiment 108463 PARAMETER Experiment Name: At_Germinating_Seeds_cDNA_P Parameter: Tissue Value: Germinating Seeds
  misc_feature: MA Experiment ID: 108464 Result: Up-regulated in Transcription
  misc_feature: MA Experiment 108464 PARAMETER Experiment Name: At_Germinating_Seeds_cDNA_P Parameter: Age (day) Value: 4 vs. 0
  misc_feature: MA Experiment 108464 PARAMETER Experiment Name: At_Germinating_Seeds_cDNA_P Parameter: Tissue Value: Germinating Seeds
  misc_feature: MA Experiment ID: 108474 Result: Down-regulated in Transcription
  misc_feature: MA Experiment 108474 PARAMETER Experiment Name: At_Drought_Flowers_cDNA_P Parameter: Timepoint (hr) Value: null
  misc_feature: MA Experiment 108474 PARAMETER Experiment Name: At_Drought_Flowers_cDNA_P Parameter: Treatment Value: Drought vs. No Drought
  misc_feature: MA Experiment ID: 108573 Result: Up-regulated in Transcription
  misc_feature: MA Experiment 108573 PARAMETER Experiment Name: At_Drought_cDNA_P Parameter: Timepoint (hr) Value: 6
  misc_feature: MA Experiment 108573 PARAMETER Experiment Name: At_Drought_cDNA_P Parameter: Tissue Value: Aerial
  misc_feature: MA Experiment 108573 PARAMETER Experiment Name: At_Drought_cDNA_P Parameter: Treatment Value: Drought vs. No Drought
  misc_feature: MA Experiment ID: 20000113 Result: Down-regulated in Transcription
  misc_feature: MA Experiment 20000113 PARAMETER Experiment Name: At_42deg_Heat_cDNA_P Parameter: Temperature (deg C) Value: 42 vs. 22
  misc_feature: MA Experiment 20000113 PARAMETER Experiment Name: At_42deg_Heat_cDNA_P Parameter: Timepoint (hr) Value: 8
  misc_feature: MA Experiment 20000113 PARAMETER Experiment Name: At_42deg_Heat_cDNA_P Parameter: Tissue Value: Aerial
  misc_feature: MA Experiment ID: 20000144 Result: Down-regulated in Transcription
  misc_feature: MA Experiment 20000144 PARAMETER Experiment Name: At_42deg_Heat_cDNA_P Parameter: Temperature (deg C) Value: 42 vs. 22
  misc_feature: MA Experiment 20000144 PARAMETER Experiment Name: At_42deg_Heat_cDNA_P Parameter: Timepoint (hr) Value: 1
  misc_feature: MA Experiment 20000144 PARAMETER Experiment Name: At_42deg_Heat_cDNA_P Parameter: Tissue Value: Aerial
  misc_feature: MA Experiment ID: 20000224 Result: Down-regulated in Transcription
atggaacgatgtcgttctggtcatcatcgcatcatttcttattatctctcttcttcgttgatactattttggtgtattttcgttctcgtgctgttatctacgacaagtactacaaatgctttagtgaaaatcccgaaaaacacgaccgttccggcggtaatagtgttcggtgattcaattgtcgatgccgggaataacgacgacatgataacagaagctagatgcgattatgctccctacggcattgattttgacggtggagttgctacgggaagattctctaatggcaaagtccctggtgatattgtagcggaagagctagggattaaacccaatataccggcatatcgaaatccgaatttaaaaccagaagagctcttaaccggtgtaacatttgcttctggtggtgctggttatgttcctttgacaaccaaaatagcggtaggaggaatacctttaccacagcaattgatatattttgaggaatatatagagaaattgaagcaaatggttggagaaaagaggacaaagttcataatcaagaatagcttgttcgttgttatatgtggtagtaacgatatcgccaacgacttctttactctccccccggtccggctacactacaccgtcgcttctttcaccgctcttatggccgacaatgctcgttcttttgctcagacactctatggatatggagcaagaagaatacttgtatttggtgcaccaccaataggatgtgttccttcgcagagaaccgtagcaggaggacctacaagagattgtgttgctaggtttaatgatgcagcaaaacttttcaatactaagctctctgcaaatattgatgtcttgtcaaggactctacaagacccaacaataatctatattgacatctatagtcctcttcttgatctcattttaaaccctcatcaatatggatttaaggtggccaataaaggatgttgcggaaccggattaatagaagttactgcgctatgcaacaactatacagcttctgtatgtcccataagatctgattatgtgttttgggacagttttcatcctactgaaaaagcttacagaattatagttgcaaagcttttggatagatacctcaacagattcttctaa

SEQ ID NO: 85020 - protein, 375 aa, Arabidopsis thaliana
  peptide (1)..(375): Ceres Seq. ID no. 12678361
  misc_feature (53)..(338): Pfam Name: GDSL-like Lipase/Acylhydrolase Pfam Description: GDSL-like Lipase/Acylhydrolase
  misc_feature (1)..(375): Homolog of NCBI NO: 18410954 NR Description: family II extracellular lipase 1 (EXL1); protein At1g75880.1, supported by cDNA: gi_15054381 [Arabidopsis >gi|15054382|gb|AAK30016.1| family II lipase EXL1 [Arabidopsis
  misc_feature (1)..(375): Homolog of NCBI NO: 28393626 NR Description: putative family II extracellular lipase 1 (EXL1) thaliana] >gi|28827430|gb|AAO50559.1| putative family II
  misc_feature (1)..(338): Homolog of NCBI NO: 8778807 NR Description: T4O12.12 [Arabidopsis thaliana]
  misc_feature (1)..(371): Homolog of NCBI NO: 18410956 NR Description: family II extracellular lipase 2 (EXL2); protein At1g75890.1, supported by cDNA: gi_15054383 [Arabidopsis >gi|15054384|gb|AAK30017.1| family II lipase EXL2 [Arabidopsis
  misc_feature (34)..(371): Homolog of NCBI NO: 8778807 NR Description: T4O12.12 [Arabidopsis thaliana]
  misc_feature (24)..(374): Homolog of NCBI NO: 15222901 NR Description: family II extracellular lipase 3 (EXL3); protein At1g75900.1, supported by cDNA: gi_15054385 [Arabidopsis >gi|15054386|gb|AAK30018.1| family II lipase EXL3 [Arabidopsis
  misc_feature (24)..(374): Homolog of NCBI NO: 26449364 NR Description: putative family II lipase EXL3 [Arabidopsis
  misc_feature (24)..(370): Homolog of NCBI NO: 25404994 NR Description: protein T4O12.13 [imported] - Arabidopsis >gi|8778808|gb|AAF79815.1|AC007396_8 T4O12.13 [Arabidopsis
  misc_feature (40)..(375): Homolog of NCBI NO: 18394825 NR Description: anter-specific proline-rich protein APG putative; protein id: At1g20120.1, supported by cDNA: 22980.
  misc_feature (40)..(375): Homolog of NCBI NO: 21592372 NR Description: anter-specific proline-rich protein APG
MERCRSGHHRIISYYLSSSLILFWCIFVLVLLSTTSTTNALVKIPKNTTVPAVIVFGDSIVDAGNNDDMITEARCDYAPYGIDFDGGVATGRFSNGKVPGDIVAEELGIKPNIPAYRNPNLKPEELLTGVTFASGGAGYVPLTTKIAVGGIPLPQQLIYFEEYIEKLKQMVGEKRTKFIIKNSLFVVICGSNDIANDFFTLPPVRLHYTVASFTALMADNARSFAQTLYGYGARRILVFGAPPIGCVPSQRTVAGGPTRDCVARFNDAAKLFNTKLSANIDVLSRTLQDPTIIYIDIYSPLLDLILNPHQYGFKVANKGCCGTGLIEVTALCNNYTASVCPIRSDYVFWDSFHPTEKAYRIIVAKLLDRYLNRFF

SEQ ID NO: 85021 - protein, 307 aa, Arabidopsis thaliana
  peptide (1)..(307): Ceres Seq. ID no. 12678362
  misc_feature (1)..(270): Pfam Name: GDSL-like Lipase/Acylhydrolase Pfam Description: GDSL-like Lipase/Acylhydrolase
  misc_feature (1)..(307): Homolog of NCBI NO: 18410954 NR Description: family II extracellular lipase 1 (EXL1); protein At1g75880.1, supported by cDNA: gi_15054381 [Arabidopsis >gi|15054382|gb|AAK30016.1| family II lipase EXL1 [Arabidopsis
  misc_feature (1)..(307): Homolog of NCBI NO: 28393626 NR Description: putative family II extracellular lipase 1 (EXL1) thaliana] >gi|28827430|gb|AAO50559.1| putative family II
  misc_feature (1)..(270): Homolog of NCBI NO: 8778807 NR Description: T4O12.12 [Arabidopsis thaliana]
  misc_feature (1)..(303): Homolog of NCBI NO: 18410956 NR Description: family II extracellular lipase 2 (EXL2); protein At1g75890.1, supported by cDNA: gi_15054383 [Arabidopsis >gi|15054384|gb|AAK30017.1| family II lipase EXL2 [Arabidopsis
  misc_feature (1)..(303): Homolog of NCBI NO: 8778807 NR Description: T4O12.12 [Arabidopsis thaliana]
  misc_feature (1)..(306): Homolog of NCBI NO: 15222901 NR Description: family II extracellular lipase 3 (EXL3); protein At1g75900.1, supported by cDNA: gi_15054385 [Arabidopsis >gi|15054386|gb|AAK30018.1| family II lipase EXL3 [Arabidopsis
  misc_feature (1)..(306): Homolog of NCBI NO: 26449364 NR Description: putative family II lipase EXL3 [Arabidopsis
  misc_feature (1)..(302): Homolog of NCBI NO: 25404994 NR Description: protein T4O12.13 [imported] - Arabidopsis >gi|8778808|gb|AAF79815.1|AC007396_8 T4O12.13 [Arabidopsis
  misc_feature (1)..(307): Homolog of NCBI NO: 18394825 NR Description: anter-specific proline-rich protein APG putative; protein id: At1g20120.1, supported by cDNA: 22980.
  misc_feature (1)..(307): Homolog of NCBI NO: 21592372 NR Description: anter-specific proline-rich protein APG
MITEARCDYAPYGIDFDGGVATGRFSNGKVPGDIVAEELGIKPNIPAYRNPNLKPEELLTGVTFASGGAGYVPLTTKIAVGGIPLPQQLIYFEEYIEKLKQMVGEKRTKFIIKNSLFVVICGSNDIANDFFTLPPVRLHYTVASFTALMADNARSFAQTLYGYGARRILVFGAPPIGCVPSQRTVAGGPTRDCVARFNDAAKLFNTKLSANIDVLSRTLQDPTIIYIDIYSPLLDLILNPHQYGFKVANKGCCGTGLIEVTALCNNYTASVCPIRSDYVFWDSFHPTEKAYRIIVAKLLDRYLNRFF

SEQ ID NO: 85022 - protein, 206 aa, Arabidopsis thaliana; identical to SEQ ID NO: 22929
  peptide (1)..(206): Ceres Seq. ID no. 12678363
  misc_feature (1)..(169): Pfam Name: GDSL-like Lipase/Acylhydrolase Pfam Description: GDSL-like Lipase/Acylhydrolase
  misc_feature (1)..(206): Homolog of NCBI NO: 18410954 NR Description: family II extracellular lipase 1 (EXL1); protein At1g75880.1, supported by cDNA: gi_15054381 [Arabidopsis >gi|15054382|gb|AAK30016.1| family II lipase EXL1 [Arabidopsis
  misc_feature (1)..(206): Homolog of NCBI NO: 28393626 NR Description: putative family II extracellular lipase 1 (EXL1) thaliana] >gi|28827430|gb|AAO50559.1| putative family II
  misc_feature (1)..(169): Homolog of NCBI NO: 8778807 NR Description: T4O12.12 [Arabidopsis thaliana]
  misc_feature (1)..(202): Homolog of NCBI NO: 18410956 NR Description: family II extracellular lipase 2 (EXL2); protein At1g75890.1, supported by cDNA: gi_15054383 [Arabidopsis >gi|15054384|gb|AAK30017.1| family II lipase EXL2 [Arabidopsis
  misc_feature (1)..(202): Homolog of NCBI NO: 8778807 NR Description: T4O12.12 [Arabidopsis thaliana]
  misc_feature (1)..(205): Homolog of NCBI NO: 15222901 NR Description: family II extracellular lipase 3 (EXL3); protein At1g75900.1, supported by cDNA: gi_15054385 [Arabidopsis >gi|15054386|gb|AAK30018.1| family II lipase EXL3 [Arabidopsis
  misc_feature (1)..(205): Homolog of NCBI NO: 26449364 NR Description: putative family II lipase EXL3 [Arabidopsis
  misc_feature (1)..(201): Homolog of NCBI NO: 25404994 NR Description: protein T4O12.13 [imported] - Arabidopsis >gi|8778808|gb|AAF79815.1|AC007396_8 T4O12.13 [Arabidopsis
  misc_feature (1)..(206): Homolog of NCBI NO: 18394825 NR Description: anter-specific proline-rich protein APG putative; protein id: At1g20120.1, supported by cDNA: 22980.
  misc_feature (1)..(206): Homolog of NCBI NO: 21592372 NR Description: anter-specific proline-rich protein APG

SEQ ID NO: 85023 - DNA, 1516 bp, Arabidopsis thaliana
  misc_feature (1)..(1516): Ceres Seq. ID no. 12678379
  misc_feature: MA Experiment ID: 108473 Result: Down-regulated in Transcription
  misc_feature: MA Experiment 108473 PARAMETER Experiment Name: At_Drought_Flowers_cDNA_P Parameter: Timepoint (hr) Value: 7 d
  misc_feature: MA Experiment 108473 PARAMETER Experiment Name: At_Drought_Flowers_cDNA_P Parameter: Tissue Value: Flower
  misc_feature: MA Experiment 108473 PARAMETER Experiment Name: At_Drought_Flowers_cDNA_P Parameter: Treatment Value: Drought vs. No Drought
  misc_feature: MA Experiment ID: 108501 Result: Down-regulated in Transcription
  misc_feature: MA Experiment 108501 PARAMETER Experiment Name: At_ap2_floral_buds_cDNA_P Parameter: Plant Line Value: ap2 (Ler.)
  misc_feature: MA Experiment 108501 PARAMETER Experiment Name: At_ap2_floral_buds_cDNA_P Parameter: Tissue Value: Closed Flower
  misc_feature: MA Experiment ID: 20000184 Result: Down-regulated in Transcription
  misc_feature: MA Experiment 20000184 PARAMETER Experiment Name: At_Shoots__P Parameter: Age (day) Value: 7
  misc_feature: MA Experiment 20000184 PARAMETER Experiment Name: At_Shoots__P Parameter: Tissue Value: Shoots vs. Whole Plant
  misc_feature: MA Experiment ID: 20000265 Result: Up-regulated in Transcription
  misc_feature: MA Experiment 20000265 PARAMETER Experiment Name: At_Open_Flower_P Parameter: Age (day) Value: 21
  misc_feature: MA Experiment 20000265 PARAMETER Experiment Name: At_Open_Flower_P Parameter: Plant Line Value: WS
  misc_feature: MA Experiment 20000265 PARAMETER Experiment Name: At_Open_Flower_P Parameter: Tissue Value: Closed Flower vs. Whole Plant
  misc_feature: MA Experiment ID: 20000286 Result: Up-regulated in Transcription
  misc_feature: MA Experiment 20000286 PARAMETER Experiment Name: At_Open_Flower_P Parameter: Age (day) Value: 21
  misc_feature: MA Experiment 20000286 PARAMETER Experiment Name: At_Open_Flower_P Parameter: Plant Line Value: WS
  misc_feature: MA Experiment 20000286 PARAMETER Experiment Name: At_Open_Flower_P Parameter: Tissue Value: Half Open vs. Whole Plant
  misc_feature: MA Experiment ID: 20001771 Result: Up-regulated in Transcription
  misc_feature: MA Experiment 20001771 PARAMETER Experiment Name: At_Far-red-enriched-adult_P Parameter: Age (day) Value: 28
  misc_feature: MA Experiment 20001771 PARAMETER Experiment Name: At_Far-red-enriched-adult_P Parameter: Light Value: Far-red enriched vs. White
  misc_feature: MA Experiment 20001771 PARAMETER Experiment Name: At_Far-red-enriched-adult_P Parameter: Organism Value: A. thaliana
  misc_feature: MA Experiment 20001771 PARAMETER Experiment Name: At_Far-red-enriched-adult_P Parameter: Plant Line Value: Columbia
  misc_feature: MA Experiment 20001771 PARAMETER Experiment Name: At_Far-red-enriched-adult_P Parameter: Timepoint (hr) Value: 16
  misc_feature: MA Experiment 20001771 PARAMETER Experiment Name: At_Far-red-enriched-adult_P Parameter: Tissue Value: Aerial
attttcgatatgtttaggggaaaaatatttgtgttatcattattttctatttacgtcctctcatcagcggctgaaaaaaatacatcattttctgcgctttttgcttttggtgattcagtcttagatacgggaaacaataattttcttcttactcttctcaaaggaaattattggccatatggtttgagttttgactataaatttccgacgggaagattcggaaatggaagagttttcaccgatatagttgccgaaggtttacagatcaaaagacttgtaccagcttatagcaagattcgtcgcatcagttctgaagaccttaagactggcgtttgttttgcatcaggtggttcaggaattgacgatcttacatcccgaacactggtgaaagaaaaaaaaaacttaattgttatttcgataaacactatatattatatatctcaaacaatgttttcttataataattggatggttgtgggtggttttgtcagagagttttatcggcaggtgaccaagtaaaagactttaaagactatttgaagaaactaagaagagtagtgaaacgtaagaaaaaagtaaaagaaatagtttcaaacgctgtgtttcttatttctgaaggaaataatgatcttggatactttgtcgctcccgctcttcttcgattacagtccacaacaacatacaccagtaaaatggttgtttggaccagaaagtttctaaaagatttatacgatcttggagcgagaaaatttgcggtgatgggagtgatgcctgtgggatgtttgcctatccatcgagcctcattcggtggggtattcggatggtgtaacttcctcttgaatagaattacggaggacttcaacatgaaattgcagaaaggtcttacaagttacgcagtagaatatgatttcaaagatgcaaagtttgtttacgtcgacatatacggtactcttatggatcttgtcaaaaatcctatggcctatggtacgtatatacacactccctatataaatatatgcatgacgtaaccaagtgatagtaatatgtcatttgttttatcttttaaaggattgtgcatcctaacaattaatgttttttttttctttctttgtgatcaaatttatatccgaatcataacactataagatgatcaagatcatgattctaattacaacaatacatatacttgcagggtttacagaagcgaaaaaagcttgttgttgtatgccgaatgcaataataccatgcttccatccagataaatacgtcttctatgactttgctcacccttcccagaaagcctacgaagtaatatctaaacctattgtctatcagatagcgaaaggccttgcctagctaattccttatttcctacaatgttttattataatctttgaaaattatcaccatatcgataaatatatgtaaatgtataagattcatgacaatctattcgtttttcttatagtaaacaatgtataattcaaattacaggcttttaaatattgtccatttt

SEQ ID NO: 85024 - protein, 172 aa, Arabidopsis thaliana; identical to SEQ ID NO: 40418
  peptide (1)..(172): Ceres Seq. ID no. 12678380
  misc_feature (33)..(128): Pfam Name: GDSL-like Lipase/Acylhydrolase Pfam Description: GDSL-like Lipase/Acylhydrolase
  misc_feature (4)..(128): Homolog of NCBI NO: 15222904 NR Description: family II extracellular lipase 6 (EXL6); protein At1g75930.1, supported by cDNA: gi_15054389 [Arabidopsis >gi|15054390|gb|AAK30021.1| family II lipase EXL6 [Arabidopsis
  misc_feature (4)..(128): Homolog of NCBI NO: 25404995 NR Description: protein T4O12.15 [imported] - Arabidopsis >gi|8778810|gb|AAF26759.2|AC007396_8 T4O12.15 [Arabidopsis
  misc_feature (4)..(128): Homolog of NCBI NO: 8778809 NR Description: T4O12.14 [Arabidopsis thaliana]
  misc_feature (9)..(128): Homolog of NCBI NO: 18410967 NR Description: family II extracellular lipase 5 (EXL5); protein At1g75920.1, supported by cDNA: gi_15054391 [Arabidopsis >gi|15054392|gb|AAK30020.1| family II lipase EXL5 [Arabidopsis
  misc_feature (11)..(128): Homolog of NCBI NO: 15222902 NR Description: family II extracellular lipase 4 (EXL4); protein At1g75910.1, supported by cDNA: gi_15054387 [Arabidopsis
  misc_feature (11)..(128): Homolog of NCBI NO: 15054388 NR Description: family II lipase EXL4 [Arabidopsis thaliana]
  misc_feature (27)..(128): Homolog of NCBI NO: 25404994 NR Description: protein T4O12.13 [imported] - Arabidopsis >gi|8778808|gb|AAF79815.1|AC007396_8 T4O12.13 [Arabidopsis
  misc_feature (2)..(127): Homolog of NCBI NO: 15220775 NR Description: hypothetical protein; protein id: At1g23500.1
  misc_feature (32)..(126): Homolog of NCBI NO: 25404994 NR Description: protein T4O12.13 [imported] - Arabidopsis >gi|8778808|gb|AAF79815.1|AC007396_8 T4O12.13 [Arabidopsis
  misc_feature (2)..(127): Homolog of NCBI NO: 8778580 NR Description: F28C11.13 [Arabidopsis thaliana]

SEQ ID NO: 85025 - protein, 169 aa, Arabidopsis thaliana; identical to SEQ ID NO: 40419
  peptide (1)..(169): Ceres Seq. ID no. 12678381
  misc_feature (30)..(125): Pfam Name: GDSL-like Lipase/Acylhydrolase Pfam Description: GDSL-like Lipase/Acylhydrolase
  misc_feature (1)..(125): Homolog of NCBI NO: 15222904 NR Description: family II extracellular lipase 6 (EXL6); protein At1g75930.1, supported by cDNA: gi_15054389 [Arabidopsis >gi|15054390|gb|AAK30021.1| family II lipase EXL6 [Arabidopsis
  misc_feature (1)..(125): Homolog of NCBI NO: 25404995 NR Description: protein T4O12.15 [imported] - Arabidopsis >gi|8778810|gb|AAF26759.2|AC007396_8 T4O12.15 [Arabidopsis
  misc_feature (1)..(125): Homolog of NCBI NO: 8778809 NR Description: T4O12.14 [Arabidopsis thaliana]
  misc_feature (6)..(125): Homolog of NCBI NO: 18410967 NR Description: family II extracellular lipase 5 (EXL5); protein At1g75920.1, supported by cDNA: gi_15054391 [Arabidopsis >gi|15054392|gb|AAK30020.1| family II lipase EXL5 [Arabidopsis
  misc_feature (8)..(125): Homolog of NCBI NO: 15222902 NR Description: family II extracellular lipase 4 (EXL4); protein At1g75910.1, supported by cDNA: gi_15054387 [Arabidopsis
  misc_feature (8)..(125): Homolog of NCBI NO: 15054388 NR Description: family II lipase EXL4 [Arabidopsis thaliana]
  misc_feature (24)..(125): Homolog of NCBI NO: 25404994 NR Description: protein T4O12.13 [imported] - Arabidopsis >gi|8778808|gb|AAF79815.1|AC007396_8 T4O12.13 [Arabidopsis
  misc_feature (1)..(124): Homolog of NCBI NO: 15220775 NR Description: hypothetical protein; protein id: At1g23500.1
  misc_feature (29)..(123): Homolog of NCBI NO: 25404994 NR Description: protein T4O12.13 [imported] - Arabidopsis >gi|8778808|gb|AAF79815.1|AC007396_8 T4O12.13 [Arabidopsis
  misc_feature (1)..(124): Homolog of NCBI NO: 8778580 NR Description: F28C11.13 [Arabidopsis thaliana]

SEQ ID NO: 85026 - protein, 111 aa, Arabidopsis thaliana
  peptide (1)..(111): Ceres Seq. ID no. 12678382
  misc_feature (1)..(98): Pfam Name: GDSL-like Lipase/Acylhydrolase Pfam Description: GDSL-like Lipase/Acylhydrolase
  misc_feature (1)..(98): Homolog of NCBI NO: 15222904 NR Description: family II extracellular lipase 6 (EXL6); protein At1g75930.1, supported by cDNA: gi_15054389 [Arabidopsis >gi|15054390|gb|AAK30021.1| family II lipase EXL6 [Arabidopsis
  misc_feature (1)..(98): Homolog of NCBI NO: 25404995 NR Description: protein T4O12.15 [imported] - Arabidopsis >gi|8778810|gb|AAF26759.2|AC007396_8 T4O12.15 [Arabidopsis
  misc_feature (1)..(110): Homolog of NCBI NO: 8778809 NR Description: T4O12.14 [Arabidopsis thaliana]
  misc_feature (1)..(110): Homolog of NCBI NO: 18410967 NR Description: family II extracellular lipase 5 (EXL5); protein At1g75920.1, supported by cDNA: gi_15054391 [Arabidopsis >gi|15054392|gb|AAK30020.1| family II lipase EXL5 [Arabidopsis
  misc_feature (1)..(98): Homolog of NCBI NO: 15222902 NR Description: family II extracellular lipase 4 (EXL4); protein At1g75910.1, supported by cDNA: gi_15054387 [Arabidopsis
  misc_feature (1)..(98): Homolog of NCBI NO: 15054388 NR Description: family II lipase EXL4 [Arabidopsis thaliana]
  misc_feature (1)..(98): Homolog of NCBI NO: 25404994 NR Description: protein T4O12.13 [imported] - Arabidopsis >gi|8778808|gb|AAF79815.1|AC007396_8 T4O12.13 [Arabidopsis
  misc_feature (1)..(98): Homolog of NCBI NO: 15220775 NR Description: hypothetical protein; protein id: At1g23500.1
  misc_feature (8)..(98): Homolog of NCBI NO: 8778580 NR Description: F28C11.13 [Arabidopsis thaliana]
  misc_feature (1)..(13): Homolog of NCBI NO: 8778580 NR Description: F28C11.13 [Arabidopsis thaliana]
MVVWTRKFLKDLYDLGARKFAVMGVMPVGCLPIHRASFGGVFGWCNFLLNRITEDFNMKLQKGLTSYAVEYDFKDAKFVYVDIYGTLMDLVKNPMAYGTYIHTPYINICMT

SEQ ID NO: 85027 - DNA, 837 bp, Arabidopsis thaliana
  misc_feature (1)..(837): Ceres Seq. ID no. 12678389
agggattgttttatatataaagagagacgcatctctttatttcattcatcgcttctccaaaattttcttcaaagaacaaatctcccaaatctaaaatctttctcttctctcttcgtttccataaccatgtctgcgaagaagattgtgttgaagagttccgatggtgaatctttcgaggttgaggaggcggtggctctcgagtcacaaaccatagcgcatatggttgaagacgactgcgtcgacaacggagtccctcttcctaacgtcacgagcaagatcctcgccaaggtgatcgagtattgcaagaggcacgtcgaggctgctgcctctaaggccgaggccgtcgagggtgctgctacctccgatgacgatcttaaggcctgggacgctgattttatgaagatcgatcaagctactctctttgaactcattctggctgctaattacctgaatatcaagaacttgcttgatctaacatgtcagacagttgcggatatgatcaaaggaaagactccagaagagatccgcacaacgttcaacattaagaacgacttcacaccagaggaagaggaagaggttcgcagagagaaccaatgggcttttgaatgattgatcttcagagagaagaatcaaaagcagcaagcaaccagtttcttcttccttatgtttattgccgttttcaagtgttgttgatgacttgctttttaatattcttcatgaatcatgactatcttcttcctcttctttctttcttatcaagaaccaatgtttcttactctttgtgggatggataatttgtgcttttagataatcttcaagagtgatgttggtttgtct

SEQ ID NO: 85028 - protein, 202 aa, Arabidopsis thaliana
  peptide (1)..(202): Ceres Seq. ID no. 12678390
  misc_feature (125)..(202): Pfam Name: Skp1 family, dimerisation domain Pfam Description: Skp1 family, dimerisation domain
  misc_feature (43)..(202): Homolog of NCBI NO: 18410982 NR Description: E3 ubiquitin ligase SCF complex subunit, (At1); protein id: At1g75950.1, supported by cDNA: gi_1432082, by cDNA: gi_19424109, supported by cDNA: gi_21281126, supported
  misc_feature (43)..(202): Homolog of NCBI NO: 18958257 NR Description: kinetochore protein [Brassica juncea]
  misc_feature (43)..(202): Homolog of NCBI NO: 18958259 NR Description: kinetochore protein [Brassica juncea]
  misc_feature (43)..(202): Homolog of NCBI NO: 18958253 NR Description: kinetochore protein [Brassica juncea]
  misc_feature (43)..(202): Homolog of NCBI NO: 18958255 NR Description: kinetochore protein [Brassica juncea]
  misc_feature (43)..(202): Homolog of NCBI NO: 18958249 NR Description: kinetochore protein [Brassica juncea]
  misc_feature (48)..(192): Homolog of NCBI NO: 18958251 NR Description: kinetochore protein [Brassica juncea]
  misc_feature (43)..(202): Homolog of NCBI NO: 7489299 NR Description: fimbriata-associated protein - garden snapdragon
  misc_feature (44)..(202): Homolog of NCBI NO: 7489300 NR Description: fimbriata-associated protein 2 - garden snapdragon
  misc_feature (44)..(202): Homolog of NCBI NO: 3719211 NR Description: UIP2 [Arabidopsis thaliana]
RDCFIYKERRISLFHSSLLQNFLQRTNLPNLKSFSSLFVSITMSAKKIVLKSSDGESFEVEEAVALESQTIAHMVEDDCVDNGVPLPNVTSKILAKVIEYCKRHVEAAASKAEAVEGAATSDDDLKAWDADFMKIDQATLFELILAANYLNIKNLLDLTCQTVADMIKGKTPEEIRTTFNIKNDFTPEEEEEVRRENQWAFE

SEQ ID NO: 85029 - protein, 160 aa, Arabidopsis thaliana; identical to SEQ ID NO: 44533
  peptide (1)..(160): Ceres Seq. ID no. 12678391
  misc_feature (83)..(160): Pfam Name: Skp1 family, dimerisation domain Pfam Description: Skp1 family, dimerisation domain
  misc_feature (1)..(160): Homolog of NCBI NO: 18410982 NR Description: E3 ubiquitin ligase SCF complex subunit, (At1); protein id: At1g75950.1, supported by cDNA: gi_1432082, by cDNA: gi_19424109, supported by cDNA: gi_21281126, supported
  misc_feature (1)..(160): Homolog of NCBI NO: 18958257 NR Description: kinetochore protein [Brassica juncea]
  misc_feature (1)..(160): Homolog of NCBI NO: 18958259 NR Description: kinetochore protein [Brassica juncea]
  misc_feature (1)..(160): Homolog of NCBI NO: 18958253 NR Description: kinetochore protein [Brassica juncea]
  misc_feature (1)..(160): Homolog of NCBI NO: 18958255 NR Description: kinetochore protein [Brassica juncea]
  misc_feature (1)..(160): Homolog of NCBI NO: 18958249 NR Description: kinetochore protein [Brassica juncea]
  misc_feature (6)..(150): Homolog of NCBI NO: 18958251 NR Description: kinetochore protein [Brassica juncea]
  misc_feature (1)..(160): Homolog of NCBI NO: 7489299 NR Description: fimbriata-associated protein - garden snapdragon
  misc_feature (2)..(160): Homolog of NCBI NO: 7489300 NR Description: fimbriata-associated protein 2 - garden snapdragon
  misc_feature (2)..(160): Homolog of NCBI NO: 3719211 NR Description: UIP2 [Arabidopsis thaliana]

SEQ ID NO: 85030 - protein, 129 aa, Arabidopsis thaliana; identical to SEQ ID NO: 44534
  peptide (1)..(129): Ceres Seq. ID no. 12678392
  misc_feature (52)..(129): Pfam Name: Skp1 family, dimerisation domain Pfam Description: Skp1 family, dimerisation domain
  misc_feature (1)..(129): Homolog of NCBI NO: 18410982 NR Description: E3 ubiquitin ligase SCF complex subunit, (At1); protein id: At1g75950.1, supported by cDNA: gi_1432082, by cDNA: gi_19424109, supported by cDNA: gi_21281126, supported
  misc_feature (1)..(129): Homolog of NCBI NO: 18958257 NR Description: kinetochore protein [Brassica juncea]
  misc_feature (1)..(129): Homolog of NCBI NO: 18958259 NR Description: kinetochore protein [Brassica juncea]
  misc_feature (1)..(129): Homolog of NCBI NO: 18958253 NR Description: kinetochore protein [Brassica juncea]
  misc_feature (1)..(129): Homolog of NCBI NO: 18958255 NR Description: kinetochore protein [Brassica juncea]
  misc_feature (1)..(129): Homolog of NCBI NO: 18958249 NR Description: kinetochore protein [Brassica juncea]
  misc_feature (1)..(119): Homolog of NCBI NO: 18958251 NR Description: kinetochore protein [Brassica juncea]
  misc_feature (1)..(129): Homolog of NCBI NO: 7489299 NR Description: fimbriata-associated protein - garden snapdragon
  misc_feature (1)..(129): Homolog of NCBI NO: 7489300 NR Description: fimbriata-associated protein 2 - garden snapdragon
  misc_feature (1)..(129): Homolog of NCBI NO: 3719211 NR Description: UIP2 [Arabidopsis thaliana]

SEQ ID NO: 85031 - DNA, 1205 bp, Arabidopsis thaliana
  misc_feature (1)..(1205): Ceres Seq. ID no. 12678401
  misc_feature: MA Experiment ID: 108473 Result: Down-regulated in Transcription
  misc_feature: MA Experiment 108473 PARAMETER Experiment Name: At_Drought_Flowers_cDNA_P Parameter: Timepoint (hr) Value: 7 d
  misc_feature: MA Experiment 108473 PARAMETER Experiment Name: At_Drought_Flowers_cDNA_P Parameter: Tissue Value: Flower
  misc_feature: MA Experiment 108473 PARAMETER Experiment Name: At_Drought_Flowers_cDNA_P Parameter: Treatment Value: Drought vs. No Drought
  misc_feature: MA Experiment ID: 108501 Result: Down-regulated in Transcription
  misc_feature: MA Experiment 108501 PARAMETER Experiment Name: At_ap2_floral_buds_cDNA_P Parameter: Plant Line Value: ap2 (Ler.)
  misc_feature: MA Experiment 108501 PARAMETER Experiment Name: At_ap2_floral_buds_cDNA_P Parameter: Tissue Value: Closed Flower
  misc_feature: MA Experiment ID: 20000184 Result: Down-regulated in Transcription
  misc_feature: MA Experiment 20000184 PARAMETER Experiment Name: At_Shoots__P Parameter: Age (day) Value: 7
  misc_feature: MA Experiment 20000184 PARAMETER Experiment Name: At_Shoots__P Parameter: Tissue Value: Shoots vs. Whole Plant
  misc_feature: MA Experiment ID: 20000265 Result: Up-regulated in Transcription
  misc_feature: MA Experiment 20000265 PARAMETER Experiment Name: At_Open_Flower_P Parameter: Age (day) Value: 21
  misc_feature: MA Experiment 20000265 PARAMETER Experiment Name: At_Open_Flower_P Parameter: Plant Line Value: WS
  misc_feature: MA Experiment 20000265 PARAMETER Experiment Name: At_Open_Flower_P Parameter: Tissue Value: Closed Flower vs. Whole Plant
  misc_feature: MA Experiment ID: 20000286 Result: Up-regulated in Transcription
  misc_feature: MA Experiment 20000286 PARAMETER Experiment Name: At_Open_Flower_P Parameter: Age (day) Value: 21
  misc_feature: MA Experiment 20000286 PARAMETER Experiment Name: At_Open_Flower_P Parameter: Plant Line Value: WS
  misc_feature: MA Experiment 20000286 PARAMETER Experiment Name: At_Open_Flower_P Parameter: Tissue Value: Half Open vs. Whole Plant
  misc_feature: MA Experiment ID: 20001771 Result: Up-regulated in Transcription
  misc_feature: MA Experiment 20001771 PARAMETER Experiment Name: At_Far-red-enriched-adult_P Parameter: Age (day) Value: 28
  misc_feature: MA Experiment 20001771 PARAMETER Experiment Name: At_Far-red-enriched-adult_P Parameter: Light Value: Far-red enriched vs. White
  misc_feature: MA Experiment 20001771 PARAMETER Experiment Name: At_Far-red-enriched-adult_P Parameter: Organism Value: A. thaliana
  misc_feature: MA Experiment 20001771 PARAMETER Experiment Name: At_Far-red-enriched-adult_P Parameter: Plant Line Value: Columbia
  misc_feature: MA Experiment 20001771 PARAMETER Experiment Name: At_Far-red-enriched-adult_P Parameter: Timepoint (hr) Value: 16
  misc_feature: MA Experiment 20001771 PARAMETER Experiment Name: At_Far-red-enriched-adult_P Parameter: Tissue Value: Aerial
attcagaaaaattttggacttattttcgatatgtttaggggaaaaatatttgtgttatcattattttctatttacgtcctctcatcagcggctgaaaaaaatacatcattttctgcgctttttgcttttggtgattcagtcttagatacgggaaacaataattttcttcttactcttctcaaaggaaattattggccatatggtttgagttttgactataaatttccgacgggaagattcggaaatggaagagttttcaccgatatagttgccgaaggtttacagatcaaaagacttgtaccagcttatagcaagattcgtcgcatcagttctgaagaccttaagactggcgtttgttttgcatcaggtggttcaggaattgacgatcttacatcccgaacactgagagttttatcggcaggtgaccaagtaaaagactttaaagactatttgaagaaactaagaagagtagtgaaacgtaagaaaaaagtaaaagaaatagtttcaaacgctgtgtttcttatttctgaaggaaataatgatcttggatactttgtcgctcccgctcttcttcgattacagtccacaacaacatacaccagtaaaatggttgtttggaccagaaagtttctaaaagatttatacgatcttggagcgagaaaatttgcggtgatgggagtgatgcctgtgggatgtttgcctatccatcgagcctcattcggtggggtattcggatggtgtaacttcctcttgaatagaattacggaggacttcaacatgaaattgcagaaaggtcttacaagttacgcagtagaatatgatttcaaagatgcaaagtttgtttacgtcgacatatacggtactcttatggatcttgtcaaaaatcctatggcctatgggtttacagaagcgaaaaaagcttgttgttgtatgccgaatgcaataataccatgcttccatccagataaatacgtcttctatgactttgctcacccttcccagaaagcctacgaagtaatatctaaacctattgtctatcagatagcgaaaggccttgcctagctaattccttatttcctacaatgttttattataatctttgaaaattatcaccatatcgataaatatatgtaaatgtataagattcatgacaatctattcgtttttcttatagtaaacaatgtataattcaaattacaggcttt

SEQ ID NO: 85032 - protein, 353 aa, Arabidopsis thaliana
  peptide (1)..(353): Ceres Seq. ID no. 12678402
  misc_feature (40)..(343): Pfam Name: GDSL-like Lipase/Acylhydrolase Pfam Description: GDSL-like Lipase/Acylhydrolase
  misc_feature (11)..(353): Homolog of NCBI NO: 15222904 NR Description: family II extracellular lipase 6 (EXL6); protein At1g75930.1, supported by cDNA: gi_15054389 [Arabidopsis >gi|15054390|gb|AAK30021.1| family II lipase EXL6 [Arabidopsis
  misc_feature (11)..(353): Homolog of NCBI NO: 25404995 NR Description: protein T4O12.15 [imported] - Arabidopsis >gi|8778810|gb|AAF26759.2|AC007396_8 T4O12.15 [Arabidopsis
  misc_feature (11)..(353): Homolog of NCBI NO: 8778809 NR Description: T4O12.14 [Arabidopsis thaliana]
  misc_feature (16)..(353): Homolog of NCBI NO: 18410967 NR Description: family II extracellular lipase 5 (EXL5); protein At1g75920.1, supported by cDNA: gi_15054391 [Arabidopsis >gi|15054392|gb|AAK30020.1| family II lipase EXL5 [Arabidopsis
  misc_feature (18)..(353): Homolog of NCBI NO: 15222902 NR Description: family II extracellular lipase 4 (EXL4); protein At1g75910.1, supported by cDNA: gi_15054387 [Arabidopsis
  misc_feature (18)..(353): Homolog of NCBI NO: 15054388 NR Description: family II lipase EXL4 [Arabidopsis thaliana]
  misc_feature (34)..(353): Homolog of NCBI NO: 25404994 NR Description: protein T4O12.13 [imported] - Arabidopsis >gi|8778808|gb|AAF79815.1|AC007396_8 T4O12.13 [Arabidopsis
  misc_feature (4)..(353): Homolog of NCBI NO: 15220775 NR Description: hypothetical protein; protein id: At1g23500.1
  misc_feature (4)..(215): Homolog of NCBI NO: 8778580 NR Description: F28C11.13 [Arabidopsis thaliana]
  misc_feature (210)..(353): Homolog of NCBI NO: 8778580 NR Description: F28C11.13 [Arabidopsis thaliana]
IQKNFGLIFDMFRGKIFVLSLFSIYVLSSAAEKNTSFSALFAFGDSVLDTGNNNFLLTLLKGNYWPYGLSFDYKFPTGRFGNGRVFTDIVAEGLQIKRLVPAYSKIRRISSEDLKTGVCFASGGSGIDDLTSRTLRVLSAGDQVKDFKDYLKKLRRVVKRKKKVKEIVSNAVFLISEGNNDLGYFVAPALLRLQSTTTYTSKMVVWTRKFLKDLYDLGARKFAVMGVMPVGCLPIHRASFGGVFGWCNFLLNRITEDFNMKLQKGLTSYAVEYDFKDAKFVYVDIYGTLMDLVKNPMAYGFTEAKKACCCMPNAIIPCFHPDKYVFYDFAHPSQKAYEVISKPIVYQIAKGLA

SEQ ID NO: 85033 - protein, 343 aa, Arabidopsis thaliana
  peptide (1)..(343): Ceres Seq. ID no. 12678403
  misc_feature (30)..(333): Pfam Name: GDSL-like Lipase/Acylhydrolase Pfam Description: GDSL-like Lipase/Acylhydrolase
  misc_feature (1)..(343): Homolog of NCBI NO: 15222904 NR Description: family II extracellular lipase 6 (EXL6); protein At1g75930.1, supported by cDNA: gi_15054389 [Arabidopsis >gi|15054390|gb|AAK30021.1| family II lipase EXL6 [Arabidopsis
  misc_feature (1)..(343): Homolog of NCBI NO: 25404995 NR Description: protein T4O12.15 [imported] - Arabidopsis >gi|8778810|gb|AAF26759.2|AC007396_8 T4O12.15 [Arabidopsis
  misc_feature (1)..(343): Homolog of NCBI NO: 8778809 NR Description: T4O12.14 [Arabidopsis thaliana]
  misc_feature (6)..(343): Homolog of NCBI NO: 18410967 NR Description: family II extracellular lipase 5 (EXL5); protein At1g75920.1, supported by cDNA: gi_15054391 [Arabidopsis >gi|15054392|gb|AAK30020.1| family II lipase EXL5 [Arabidopsis
  misc_feature (8)..(343): Homolog of NCBI NO: 15222902 NR Description: family II extracellular lipase 4 (EXL4); protein At1g75910.1, supported by cDNA: gi_15054387 [Arabidopsis
  misc_feature (8)..(343): Homolog of NCBI NO: 15054388 NR Description: family II lipase EXL4 [Arabidopsis thaliana]
  misc_feature (24)..(343): Homolog of NCBI NO: 25404994 NR Description: protein T4O12.13 [imported] - Arabidopsis >gi|8778808|gb|AAF79815.1|AC007396_8 T4O12.13 [Arabidopsis
  misc_feature (1)..(343): Homolog of NCBI NO: 15220775 NR Description: hypothetical protein; protein id: At1g23500.1
  misc_feature (1)..(205): Homolog of NCBI NO: 8778580 NR Description: F28C11.13 [Arabidopsis thaliana]
  misc_feature (200)..(343): Homolog of NCBI NO: 8778580 NR Description: F28C11.13 [Arabidopsis thaliana]
MFRGKIFVLSLFSIYVLSSAAEKNTSFSALFAFGDSVLDTGNNNFLLTLLKGNYWPYGLSFDYKFPTGRFGNGRVFTDIVAEGLQIKRLVPAYSKIRRISSEDLKTGVCFASGGSGIDDLTSRTLRVLSAGDQVKDFKDYLKKLRRVVKRKKKVKEIVSNAVFLISEGNNDLGYFVAPALLRLQSTTTYTSKMVVWTRKFLKDLYDLGARKFAVMGVMPVGCLPIHRASFGGVFGWCNFLLNRITEDFNMKLQKGLTSYAVEYDFKDAKFVYVDIYGTLMDLVKNPMAYGFTEAKKACCCMPNAIIPCFHPDKYVFYDFAHPSQKAYEVISKPIVYQIAKGLA

SEQ ID NO: 85034 - DNA, 1087 bp, Arabidopsis thaliana
  misc_feature (1)..(1087): Ceres Seq. ID no. 12678428
  misc_feature: MA Experiment ID: 108569 Result: Down-regulated in Transcription
  misc_feature: MA Experiment 108569 PARAMETER Experiment Name: At_0.001%_MeJA__cDNA_P Parameter: Timepoint (hr) Value: 6
  misc_feature: MA Experiment 108569 PARAMETER Experiment Name: At_0.001%_MeJA__cDNA_P Parameter: Tissue Value: Aerial
  misc_feature: MA Experiment 108569 PARAMETER Experiment Name: At_0.001%_MeJA__cDNA_P Parameter: Treatment Value: 0.001% MeJA vs. No Treatment
  misc_feature: MA Experiment ID: 20000179 Result: Up-regulated in Transcription
  misc_feature: MA Experiment 20000179 PARAMETER Experiment Name: At_Germinating_Seeds_P Parameter: Age (hr) Value: 6 vs. 0
  misc_feature: MA Experiment 20000179 PARAMETER Experiment Name: At_Germinating_Seeds_P Parameter: Tissue Value: Germinating Seeds
  misc_feature: MA Experiment ID: 20000180 Result: Up-regulated in Transcription
  misc_feature: MA Experiment 20000180 PARAMETER Experiment Name: At_Germinating_Seeds_P Parameter: Age (hr) Value: 24 vs. 0
  misc_feature: MA Experiment 20000180 PARAMETER Experiment Name: At_Germinating_Seeds_P Parameter: Tissue Value: Germinating Seeds
  misc_feature: MA Experiment ID: 20000794 Result: Up-regulated in Transcription
  misc_feature: MA Experiment 20000794 PARAMETER Experiment Name: At_Petals_P Parameter: Age (day) Value: 23-25 days
  misc_feature: MA Experiment 20000794 PARAMETER Experiment Name: At_Petals_P Parameter: Plant Line Value: WS
  misc_feature: MA Experiment 20000794 PARAMETER Experiment Name: At_Petals_P Parameter: Tissue Value: Petals vs. Whole plant
atatgtcaggaccggtccgcaggacaagcatgtaataaaactgtgtgttttctacattttctatgaaatgggtgtaattgaaagatactaaatgttagggcttttcagaaacttccgttacgttttaggcgtttaacacaattattattttctaaaacgagagccgtttaaagagaaagagaaatttctaactccagagagcgaagaacacaatcccagagtagcagaatctgatccatcccacctttttcaattctcaggcaaagataagtcaaacttgaaaaaatggaagggactgtgttcacgccttgtttggaaggaatgaagcatgtcaaatctgatcaaggcgagatgcttactaagccatttttagagctttgcaagaccatcttgcctgttatagataaatttggagctgctatgactctcgtgaaatctgacattggtggcaacataacgaggttggagaagaactacttatctgatcccgacaagttcaagtacttgtacacctttgttcaagtcgaaattgagtctaagatagcaaaaggatcgtctagctgtacaaacggtcttctctggttaaccagagcaatggatttcttagtggagctgttccgaaacttggtagcacatcaagactggtcaatgccacaagcttgtgctgactcataccaaaaaacactcaagaaatggcacggatggctcgccagctctaccttctctatggctttaaagctagctccggacaggaagaagttcatggatgtcatatctggttctggtaacatccaagccgacatggaaaggttttgtgctgagtttggtccgtttcttcatgataatcataagtttctggctagcgtcggtatggatgacatgaaagcttcttaagtcatcatatgattatcgccggtatcaaatcttctttgccggaatctttgtctgttttaacttttctccttccaattatagaacctccaaaaagaaacagaataatgtgttggtttctatctgaatgttcactttatattacaagttataacatacgaatcaatcttatcaactcttcttgttaatgtttgtt

SEQ ID NO: 85035 - protein, 202 aa, Arabidopsis thaliana; identical to SEQ ID NO: 24242
  peptide (1)..(202): Ceres Seq. ID no. 12678429
  misc_feature (1)..(202): Homolog of NCBI NO: 18403285 NR Description: expressed protein; protein id: At2g33470.1, by cDNA: 19302. [Arabidopsis thaliana] >gi|25408274|pir||H84745
  misc_feature (1)..(202): Homolog of NCBI NO: 34901156 NR Description: hypothetical protein~similar to Arabidopsis
  misc_feature (25)..(202): Homolog of NCBI NO: 38344077 NR Description: OSJNBa0006B20.21 [Oryza sativa (japonica
  misc_feature (26)..(201): Homolog of NCBI NO: 9280228 NR Description: gene_id:MXL8.12~unknown protein [Arabidopsis
  misc_feature (25)..(191): Homolog of NCBI NO: 39545646 NR Description: OJ000114_01.1 [Oryza sativa (japonica
  misc_feature (59)..(201): Homolog of NCBI NO: 30686173 NR Description: expressed protein [Arabidopsis thaliana]
  misc_feature (66)..(201): Homolog of NCBI NO: 18402939 NR Description: expressed protein; protein id: At3g21260.1,
  misc_feature (66)..(201): Homolog of NCBI NO: 21554671 NR Description: unknown [Arabidopsis thaliana]
  misc_feature (19)..(164): Homolog of NCBI NO: 30481662 NR Description: Unknown (protein for MGC:58573) [Mus musculus]
  misc_feature (10)..(182): Homolog of NCBI NO: 28571195 NR Description: CG6299-PB [Drosophila melanogaster]

SEQ ID NO: 85036 - protein, 190 aa, Arabidopsis thaliana; identical to SEQ ID NO: 24243
  peptide (1)..(190): Ceres Seq. ID no. 12678430
  misc_feature (1)..(190): Homolog of NCBI NO: 18403285 NR Description: expressed protein; protein id: At2g33470.1, by cDNA: 19302. [Arabidopsis thaliana] >gi|25408274|pir||H84745
  misc_feature (1)..(190): Homolog of NCBI NO: 34901156 NR Description: hypothetical protein~similar to Arabidopsis
  misc_feature (13)..(190): Homolog of NCBI NO: 38344077 NR Description: OSJNBa0006B20.21 [Oryza sativa (japonica
  misc_feature (14)..(189): Homolog of NCBI NO: 9280228 NR Description: gene_id:MXL8.12~unknown protein [Arabidopsis
  misc_feature (13)..(179): Homolog of NCBI NO: 39545646 NR Description: OJ000114_01.1 [Oryza sativa (japonica
  misc_feature (47)..(189): Homolog of NCBI NO: 30686173 NR Description: expressed protein [Arabidopsis thaliana]
  misc_feature (54)..(189): Homolog of NCBI NO: 18402939 NR Description: expressed protein; protein id: At3g21260.1,
  misc_feature (54)..(189): Homolog of NCBI NO: 21554671 NR Description: unknown [Arabidopsis thaliana]
  misc_feature (7)..(152): Homolog of NCBI NO: 30481662 NR Description: Unknown (protein for MGC:58573) [Mus musculus]
  misc_feature (1)..(170): Homolog of NCBI NO: 28571195 NR Description: CG6299-PB [Drosophila melanogaster]

SEQ ID NO: 85037 - protein, 180 aa, Arabidopsis thaliana; identical to SEQ ID NO: 24244
  peptide (1)..(180): Ceres Seq. ID no. 12678431
  misc_feature (1)..(180): Homolog of NCBI NO: 18403285 NR Description: expressed protein; protein id: At2g33470.1, by cDNA: 19302. [Arabidopsis thaliana] >gi|25408274|pir||H84745
  misc_feature (1)..(180): Homolog of NCBI NO: 34901156 NR Description: hypothetical protein~similar to Arabidopsis
  misc_feature (3)..(180): Homolog of NCBI NO: 38344077 NR Description: OSJNBa0006B20.21 [Oryza sativa (japonica
  misc_feature (4)..(179): Homolog of NCBI NO: 9280228 NR Description: gene_id:MXL8.12~unknown protein [Arabidopsis
  misc_feature (3)..(169): Homolog of NCBI NO: 39545646 NR Description: OJ000114_01.1 [Oryza sativa (japonica
  misc_feature (37)..(179): Homolog of NCBI NO: 30686173 NR Description: expressed protein [Arabidopsis thaliana]
  misc_feature (44)..(179): Homolog of NCBI NO: 18402939 NR Description: expressed protein; protein id: At3g21260.1,
  misc_feature (44)..(179): Homolog of NCBI NO: 21554671 NR Description: unknown [Arabidopsis thaliana]
  misc_feature (1)..(142): Homolog of NCBI NO: 30481662 NR Description: Unknown (protein for MGC:58573) [Mus musculus]
  misc_feature (1)..(160): Homolog of NCBI NO: 28571195 NR Description: CG6299-PB [Drosophila melanogaster]

SEQ ID NO: 85038 - DNA, 1017 bp, Arabidopsis thaliana
  misc_feature (1)..(1017): Ceres Seq. ID no. 12678438
  misc_feature: MA Experiment ID: 108569 Result: Up-regulated in Transcription
  misc_feature: MA Experiment 108569 PARAMETER Experiment Name: At_0.001%_MeJA__cDNA_P Parameter: Timepoint (hr) Value: 6
  misc_feature: MA Experiment 108569 PARAMETER Experiment Name: At_0.001%_MeJA__cDNA_P Parameter: Tissue Value: Aerial
  misc_feature: MA Experiment 108569 PARAMETER Experiment Name: At_0.001%_MeJA__cDNA_P Parameter: Treatment Value: 0.001% MeJA vs. No Treatment
  misc_feature: MA Experiment ID: 108579 Result: Down-regulated in Transcription
  misc_feature: MA Experiment 108579 PARAMETER Experiment Name: At_4deg_Cold_cDNA_P Parameter: Temperature (deg C) Value: 4 vs. 22
  misc_feature: MA Experiment 108579 PARAMETER Experiment Name: At_4deg_Cold_cDNA_P Parameter: Timepoint (hr) Value: 6
  misc_feature: MA Experiment 108579 PARAMETER Experiment Name: At_4deg_Cold_cDNA_P Parameter: Tissue Value: Aerial
  misc_feature: MA Experiment ID: 108595 Result: Down-regulated in Transcription
  misc_feature: MA Experiment 108595 PARAMETER Experiment Name: At_Ler-pi_Ovule_cDNA_P Parameter: Plant Line Value: null
  misc_feature: MA Experiment ID: 108607 Result: Down-regulated in Transcription
  misc_feature: MA Experiment 108607 PARAMETER Experiment Name: At_100uM_ABA_cDNA_P Parameter: Timepoint (hr) Value: 4
  misc_feature: MA Experiment 108607 PARAMETER Experiment Name: At_100uM_ABA_cDNA_P Parameter: Tissue Value: Aerial
  misc_feature: MA Experiment 108607 PARAMETER Experiment Name: At_100uM_ABA_cDNA_P Parameter: Treatment Value: 100uM ABA vs. No Treatment
  misc_feature: MA Experiment ID: 20000069 Result: Down-regulated in Transcription
  misc_feature: MA Experiment 20000069 PARAMETER Experiment Name: At_100uM_ABA_Mutants_cDNA_P Parameter: Plant Line Value: CS23
  misc_feature: MA Experiment 20000069 PARAMETER Experiment Name: At_100uM_ABA_Mutants_cDNA_P Parameter: Timepoint (hr) Value: 6
  misc_feature: MA Experiment 20000069 PARAMETER Experiment Name: At_100uM_ABA_Mutants_cDNA_P Parameter: Tissue Value: Aerial
  misc_feature: MA Experiment 20000069 PARAMETER Experiment Name: At_100uM_ABA_Mutants_cDNA_P Parameter: Treatment Value: 100uM ABA vs. No Treatment
  misc_feature: MA Experiment ID: 20000070 Result: Down-regulated in Transcription
  misc_feature: MA Experiment 20000070 PARAMETER Experiment Name: At_100uM_ABA_Mutants_cDNA_P Parameter: Plant Line Value: CS24
  misc_feature: MA Experiment 20000070 PARAMETER Experiment Name: At_100uM_ABA_Mutants_cDNA_P Parameter: Timepoint (hr) Value: 6
  misc_feature: MA Experiment 20000070 PARAMETER Experiment Name: At_100uM_ABA_Mutants_cDNA_P Parameter: Tissue Value: Aerial
  misc_feature: MA Experiment 20000070 PARAMETER Experiment Name: At_100uM_ABA_Mutants_cDNA_P Parameter: Treatment Value: 100uM ABA vs. No Treatment
  misc_feature: MA Experiment ID: 20000072 Result: Down-regulated in Transcription
  misc_feature: MA Experiment 20000072 PARAMETER Experiment Name: At_100uM_ABA_Mutants_cDNA_P Parameter: Plant Line Value: CS8105
  misc_feature: MA Experiment 20000072 PARAMETER Experiment Name: At_100uM_ABA_Mutants_cDNA_P Parameter: Timepoint (hr) Value: 6
  misc_feature: MA Experiment 20000072 PARAMETER Experiment Name: At_100uM_ABA_Mutants_cDNA_P Parameter: Tissue Value: Aerial
  misc_feature: MA Experiment 20000072 PARAMETER Experiment Name: At_100uM_ABA_Mutants_cDNA_P Parameter: Treatment Value: 100uM ABA vs. No Treatment
  misc_feature: MA Experiment ID: 20000086 Result: Down-regulated in Transcription
  misc_feature: MA Experiment 20000086 PARAMETER Experiment Name: At_100uM_ABA_Mutants_cDNA_P Parameter: Plant Line Value: CS22
  misc_feature: MA Experiment 20000086 PARAMETER Experiment Name: At_100uM_ABA_Mutants_cDNA_P Parameter: Timepoint (hr) Value: 6
  misc_feature: MA Experiment 20000086 PARAMETER Experiment Name: At_100uM_ABA_Mutants_cDNA_P Parameter: Tissue Value: Aerial
  misc_feature: MA Experiment 20000086 PARAMETER Experiment Name: At_100uM_ABA_Mutants_cDNA_P Parameter: Treatment Value: 100uM ABA vs. No Treatment
  misc_feature: MA Experiment ID: 20000087 Result: Down-regulated in Transcription
  misc_feature: MA Experiment 20000087 PARAMETER Experiment Name: At_100uM_ABA_Mutants_cDNA_P Parameter: Plant Line Value: WS
  misc_feature: MA Experiment 20000087 PARAMETER Experiment Name: At_100uM_ABA_Mutants_cDNA_P Parameter: Timepoint (hr) Value: 6
  misc_feature: MA Experiment 20000087 PARAMETER Experiment Name: At_100uM_ABA_Mutants_cDNA_P Parameter: Tissue Value: Aerial
  misc_feature: MA Experiment 20000087 PARAMETER Experiment Name: At_100uM_ABA_Mutants_cDNA_P Parameter: Treatment Value: 100uM ABA vs. No Treatment
  misc_feature: MA Experiment ID: 20000088 Result: Down-regulated in Transcription
  misc_feature: MA Experiment 20000088 PARAMETER Experiment Name: At_100uM_ABA_Mutants_cDNA_P Parameter: Plant Line Value: Landsberg
  misc_feature: MA Experiment 20000088 PARAMETER Experiment Name: At_100uM_ABA_Mutants_cDNA_P Parameter: Timepoint (hr) Value: 6
  misc_feature: MA Experiment 20000088 PARAMETER Experiment Name: At_100uM_ABA_Mutants_cDNA_P Parameter: Tissue Value: Aerial
  misc_feature: MA Experiment 20000088 PARAMETER Experiment Name: At_100uM_ABA_Mutants_cDNA_P Parameter: Treatment Value: 100uM ABA vs. No Treatment
  misc_feature: MA Experiment ID: 20000144 Result: Down-regulated in Transcription
  misc_feature: MA Experiment 20000144 PARAMETER Experiment Name: At_42deg_Heat_cDNA_P Parameter: Temperature (deg C) Value: 42 vs. 22
  misc_feature: MA Experiment 20000144 PARAMETER Experiment Name: At_42deg_Heat_cDNA_P Parameter: Timepoint (hr) Value: 1
  misc_feature: MA Experiment 20000144 PARAMETER Experiment Name: At_42deg_Heat_cDNA_P Parameter: Tissue Value: Aerial
  misc_feature: MA Experiment ID: 20000166 Result: Down-regulated in Transcription
  misc_feature: MA Experiment 20000166 PARAMETER Experiment Name: At_100uM_ABA_P Parameter: Age (day) Value: 14
  misc_feature: MA Experiment 20000166 PARAMETER Experiment Name: At_100uM_ABA_P Parameter: Organism Value: A. thaliana
  misc_feature: MA Experiment 20000166 PARAMETER Experiment Name: At_100uM_ABA_P Parameter: Plant Line Value: WS
  misc_feature: MA Experiment 20000166 PARAMETER Experiment Name: At_100uM_ABA_P Parameter: Timepoint (hr) Value: 1
  misc_feature: MA Experiment 20000166 PARAMETER Experiment Name: At_100uM_ABA_P Parameter: Tissue Value: Aerial
  misc_feature: MA Experiment 20000166 PARAMETER Experiment Name: At_100uM_ABA_P Parameter: Treatment Value: 100uM ABA vs. No Treatment
  misc_feature: MA Experiment ID: 20000169 Result: Down-regulated in Transcription
  misc_feature: MA Experiment 20000169 PARAMETER Experiment Name: At_100uM_ABA_P Parameter: Age (day) Value: 14
  misc_feature: MA Experiment 20000169 PARAMETER Experiment Name: At_100uM_ABA_P Parameter: Organism Value: A. thaliana
  misc_feature: MA Experiment 20000169 PARAMETER Experiment Name: At_100uM_ABA_P Parameter: Plant Line Value: WS
  misc_feature: MA Experiment 20000169 PARAMETER Experiment Name: At_100uM_ABA_P Parameter: Timepoint (hr) Value: 6
  misc_feature: MA Experiment 20000169 PARAMETER Experiment Name: At_100uM_ABA_P Parameter: Tissue Value: Aerial
  misc_feature: MA Experiment 20000169 PARAMETER Experiment Name: At_100uM_ABA_P Parameter: Treatment Value: 100uM ABA vs. No Treatment
  misc_feature: MA Experiment ID: 20000171 Result: Down-regulated in Transcription
  misc_feature: MA Experiment 20000171 PARAMETER Experiment Name: At_42deg_Heat_P Parameter: Age (day) Value: 14
  misc_feature: MA Experiment 20000171 PARAMETER Experiment Name: At_42deg_Heat_P Parameter: Organism Value: A. thaliana
  misc_feature: MA Experiment 20000171 PARAMETER Experiment Name: At_42deg_Heat_P Parameter: Plant Line Value: WS
  misc_feature: MA Experiment 20000171 PARAMETER Experiment Name: At_42deg_Heat_P Parameter: Temperature (deg C) Value: 42 vs. 22
  misc_feature: MA Experiment 20000171 PARAMETER Experiment Name: At_42deg_Heat_P Parameter: Timepoint (hr) Value: 1
  misc_feature: MA Experiment 20000171 PARAMETER Experiment Name: At_42deg_Heat_P Parameter: Tissue Value: Aerial
  misc_feature: MA Experiment ID: 20000173 Result: Down-regulated in Transcription
  misc_feature: MA Experiment 20000173 PARAMETER Experiment Name: At_42deg_Heat_P Parameter: Age (day) Value: 14
  misc_feature: MA Experiment 20000173 PARAMETER Experiment Name: At_42deg_Heat_P Parameter: Organism Value: A. thaliana
  misc_feature: MA Experiment 20000173 PARAMETER Experiment Name: At_42deg_Heat_P Parameter: Plant Line Value: WS
  misc_feature: MA Experiment 20000173 PARAMETER Experiment Name: At_42deg_Heat_P Parameter: Temperature (deg C) Value: 42 vs. 22
  misc_feature: MA Experiment 20000173 PARAMETER Experiment Name: At_42deg_Heat_P Parameter: Timepoint (hr) Value: 6
  misc_feature: MA Experiment 20000173 PARAMETER Experiment Name: At_42deg_Heat_P Parameter: Tissue Value: Aerial
  misc_feature: MA Experiment ID: 20000179 Result: Down-regulated in Transcription
  misc_feature: MA Experiment 20000179 PARAMETER Experiment Name: At_Germinating_Seeds_P Parameter: Age (hr) Value: 6 vs. 0
  misc_feature: MA Experiment 20000179 PARAMETER Experiment Name: At_Germinating_Seeds_P Parameter: Tissue Value: Germinating Seeds
  misc_feature: MA Experiment ID: 20000180 Result: Down-regulated in Transcription
  misc_feature: MA Experiment 20000180 PARAMETER Experiment Name: At_Germinating_Seeds_P Parameter: Age (hr) Value: 24 vs. 0
  misc_feature: MA Experiment 20000180 PARAMETER Experiment Name: At_Germinating_Seeds_P Parameter: Tissue Value: Germinating Seeds
  misc_feature: MA Experiment ID: 20000184 Result: Up-regulated in Transcription
  misc_feature: MA Experiment 20000184 PARAMETER Experiment Name: At_Shoots__P Parameter: Age (day) Value: 7
  misc_feature: MA Experiment 20000184 PARAMETER Experiment Name: At_Shoots__P Parameter: Tissue Value: Shoots vs. Whole Plant
  misc_feature: MA Experiment ID: 20000213 Result: Down-regulated in Transcription
  misc_feature: MA Experiment 20000213 PARAMETER Experiment Name: At_4deg_Cold_P Parameter: Timepoint (hr) Value: 2
  misc_feature: MA Experiment ID: 20000234 Result: Up-regulated in Transcription
  misc_feature: MA Experiment 20000234 PARAMETER Experiment Name: At_Siliques_P Parameter: Age (day) Value: 21
  misc_feature: MA Experiment 20000234 PARAMETER Experiment Name: At_Siliques_P Parameter: Organism Value: A. thaliana
  misc_feature: MA Experiment 20000234 PARAMETER Experiment Name: At_Siliques_P Parameter: Plant Line Value: WS
  misc_feature: MA Experiment 20000234 PARAMETER Experiment Name: At_Siliques_P Parameter: Tissue Value: Less Than 5mm Siliques vs. Whole Plant
  misc_feature: MA Experiment ID: 20000264 Result: Up-regulated in Transcription
  misc_feature: MA Experiment 20000264 PARAMETER Experiment Name: At_Open_Flower_P Parameter: Age (day) Value: 21
  misc_feature: MA Experiment 20000264 PARAMETER Experiment Name: At_Open_Flower_P Parameter: Plant Line Value: WS
  misc_feature: MA Experiment 20000264 PARAMETER Experiment Name: At_Open_Flower_P Parameter: Tissue Value: Open Flower vs. Whole Plant
  misc_feature: MA Experiment ID: 20000265 Result: Up-regulated in Transcription
  misc_feature: MA Experiment 20000265 PARAMETER Experiment Name: At_Open_Flower_P Parameter: Age (day) Value: 21
  misc_feature: MA Experiment 20000265 PARAMETER Experiment Name: At_Open_Flower_P Parameter: Plant Line Value: WS
  misc_feature: MA Experiment 20000265 PARAMETER Experiment Name: At_Open_Flower_P Parameter: Tissue Value: Closed Flower vs. Whole Plant
  misc_feature: MA Experiment ID: 20000267 Result: Down-regulated in Transcription
  misc_feature: MA Experiment 20000267 PARAMETER Experiment Name: At_Drought_P Parameter: Age (day) Value: 7
  misc_feature: MA Experiment 20000267 PARAMETER Experiment Name: At_Drought_P Parameter: Organism Value: A. thaliana
  misc_feature: MA Experiment 20000267 PARAMETER Experiment Name: At_Drought_P Parameter: Plant Line Value: WS
  misc_feature: MA Experiment 20000267 PARAMETER Experiment Name: At_Drought_P Parameter: Timepoint (hr) Value: 6
  misc_feature: MA Experiment 20000267 PARAMETER Experiment Name: At_Drought_P Parameter: Tissue Value: Whole Plant
  misc_feature: MA Experiment 20000267 PARAMETER Experiment Name: At_Drought_P Parameter: Treatment Value: Drought vs. No Drought
  misc_feature: MA Experiment ID: 20000286 Result: Up-regulated in Transcription
  misc_feature: MA Experiment 20000286 PARAMETER Experiment Name: At_Open_Flower_P Parameter: Age (day) Value: 21
  misc_feature: MA Experiment 20000286 PARAMETER Experiment Name: At_Open_Flower_P Parameter: Plant Line Value: WS
  misc_feature: MA Experiment 20000286 PARAMETER Experiment Name: At_Open_Flower_P Parameter: Tissue Value: Half Open vs. Whole Plant
  misc_feature: MA Experiment ID: 20000288 Result: Down-regulated in Transcription
  misc_feature: MA Experiment 20000288 PARAMETER Experiment Name: At_Drought_P Parameter: Age (day) Value: 7
  misc_feature: MA Experiment 20000288 PARAMETER Experiment Name: At_Drought_P Parameter: Organism Value: A. thaliana
  misc_feature: MA Experiment 20000288 PARAMETER Experiment Name: At_Drought_P Parameter: Plant Line Value: WS
  misc_feature: MA Experiment 20000288 PARAMETER Experiment Name: At_Drought_P Parameter: Timepoint (hr) Value: 1
  misc_feature: MA Experiment 20000288 PARAMETER Experiment Name: At_Drought_P Parameter: Tissue Value: Whole Plant
  misc_feature: MA Experiment 20000288 PARAMETER Experiment Name: At_Drought_P Parameter: Treatment Value: Drought vs. No Drought
  misc_feature: MA Experiment ID: 20000308 Result: Down-regulated in Transcription
  misc_feature: MA Experiment 20000308 PARAMETER Experiment Name: At_100mM_NaCl__P Parameter: Age (day) Value: 17
  misc_feature: MA Experiment 20000308 PARAMETER Experiment Name: At_100mM_NaCl__P Parameter: Organism Value: A. thaliana
  misc_feature: MA Experiment 20000308 PARAMETER Experiment Name: At_100mM_NaCl__P Parameter: Plant Line Value: WS
  misc_feature: MA Experiment 20000308 PARAMETER Experiment Name: At_100mM_NaCl__P Parameter: Timepoint (hr) Value: 72
  misc_feature: MA Experiment 20000308 PARAMETER Experiment Name: At_100mM_NaCl__P Parameter: Tissue Value: Whole Plant
  misc_feature: MA Experiment 20000308 PARAMETER Experiment Name: At_100mM_NaCl__P Parameter: Treatment Value: 100mM NaCl vs. No Treatment
  misc_feature: MA Experiment ID: 20000436 Result: Down-regulated in Transcription
  misc_feature: MA Experiment 20000436 PARAMETER Experiment Name: At_Drought_P Parameter: Age (day) Value: 7
  misc_feature: MA Experiment 20000436 PARAMETER Experiment Name: At_Drought_P Parameter: Organism Value: A. thaliana
  misc_feature: MA Experiment 20000436 PARAMETER Experiment Name: At_Drought_P Parameter: Plant Line Value: WS
  misc_feature: MA Experiment 20000436 PARAMETER Experiment Name: At_Drought_P Parameter: Timepoint (hr) Value: 12
  misc_feature: MA Experiment 20000436 PARAMETER Experiment Name: At_Drought_P Parameter: Tissue Value: Whole Plant
  misc_feature: MA Experiment 20000436 PARAMETER Experiment Name: At_Drought_P Parameter: Treatment Value: Drought vs. No Drought
  misc_feature: MA Experiment ID: 20000437 Result: Down-regulated in Transcription
  misc_feature: MA Experiment 20000437 PARAMETER Experiment Name: At_Drought_P Parameter: Age (day) Value: 8
  misc_feature: MA Experiment 20000437 PARAMETER Experiment Name: At_Drought_P Parameter: Organism Value: A. thaliana
  misc_feature: MA Experiment 20000437 PARAMETER Experiment Name: At_Drought_P Parameter: Plant Line Value: WS
  misc_feature: MA Experiment 20000437 PARAMETER Experiment Name: At_Drought_P Parameter: Timepoint (hr) Value: 24
  misc_feature: MA Experiment 20000437 PARAMETER Experiment Name: At_Drought_P Parameter: Tissue Value: Whole Plant
  misc_feature: MA Experiment 20000437 PARAMETER Experiment Name: At_Drought_P Parameter: Treatment Value: Drought vs. No Drought
  misc_feature: MA Experiment ID: 20000438 Result: Up-regulated in Transcription
  misc_feature: MA Experiment 20000438 PARAMETER Experiment Name: At_Shoots__P Parameter: Age (day) Value: 14
  misc_feature: MA Experiment 20000438 PARAMETER Experiment Name: At_Shoots__P Parameter: Tissue Value: Shoots vs. Whole Plant
  misc_feature: MA Experiment ID: 20000444 Result: Up-regulated in Transcription
  misc_feature: MA Experiment 20000444 PARAMETER Experiment Name: At_100uM_NAA__P Parameter: Age (day) Value: 14
  misc_feature: MA Experiment 20000444 PARAMETER Experiment Name: At_100uM_NAA__P Parameter: Organism Value: A. thaliana
  misc_feature: MA Experiment 20000444 PARAMETER Experiment Name: At_100uM_NAA__P Parameter: Plant Line Value: WS
  misc_feature: MA Experiment 20000444 PARAMETER Experiment Name: At_100uM_NAA__P Parameter: Timepoint (hr) Value: 1
  misc_feature: MA Experiment 20000444 PARAMETER Experiment Name: At_100uM_NAA__P Parameter: Tissue Value: Aerial
  misc_feature: MA Experiment 20000444 PARAMETER Experiment Name: At_100uM_NAA__P Parameter: Treatment Value: 100uM NAA vs. No Treatment
  misc_feature: MA Experiment ID: 20000451 Result: Up-regulated in Transcription
  misc_feature: MA Experiment 20000451 PARAMETER Experiment Name: At_CS6879_Shoots-Roots_P Parameter: Age (day) Value: 14
  misc_feature: MA Experiment 20000451 PARAMETER Experiment Name: At_CS6879_Shoots-Roots_P Parameter: Organism Value: A. thaliana
  misc_feature: MA Experiment 20000451 PARAMETER Experiment Name: At_CS6879_Shoots-Roots_P Parameter: Plant Line Value: CS6879 vs. WS
  misc_feature: MA Experiment 20000451 PARAMETER Experiment Name: At_CS6879_Shoots-Roots_P Parameter: Tissue Value: Roots
  misc_feature: MA Experiment ID: 20000453 Result: Down-regulated in Transcription
  misc_feature: MA Experiment 20000453 PARAMETER Experiment Name: At_100uM_ABA_P Parameter: Age (day) Value: 15
  misc_feature: MA Experiment 20000453 PARAMETER Experiment Name: At_100uM_ABA_P Parameter: Organism Value: A. thaliana
  misc_feature: MA Experiment 20000453 PARAMETER Experiment Name: At_100uM_ABA_P Parameter: Plant Line Value: WS
  misc_feature: MA Experiment 20000453 PARAMETER Experiment Name: At_100uM_ABA_P Parameter: Timepoint (hr) Value: 24
  misc_feature: MA Experiment 20000453 PARAMETER Experiment Name: At_100uM_ABA_P Parameter: Tissue Value: Aerial
  misc_feature: MA Experiment 20000453 PARAMETER Experiment Name: At_100uM_ABA_P Parameter: Treatment Value: 100uM ABA vs. No Treatment
  misc_feature: MA Experiment ID: 20000455 Result: Down-regulated in Transcription
  misc_feature: MA Experiment 20000455 PARAMETER Experiment Name: At_100uM_ABA_P Parameter: Age (day) Value: 16
  misc_feature: MA Experiment 20000455 PARAMETER Experiment Name: At_100uM_ABA_P Parameter: Organism Value: A. thaliana
  misc_feature: MA Experiment 20000455 PARAMETER Experiment Name: At_100uM_ABA_P Parameter: Plant Line Value: WS
  misc_feature: MA Experiment 20000455 PARAMETER Experiment Name: At_100uM_ABA_P Parameter: Timepoint (hr) Value: 48
  misc_feature: MA Experiment 20000455 PARAMETER Experiment Name: At_100uM_ABA_P Parameter: Tissue Value: Aerial
  misc_feature: MA Experiment 20000455 PARAMETER Experiment Name: At_100uM_ABA_P Parameter: Treatment Value: 100uM ABA vs. No Treatment
  misc_feature: MA Experiment ID: 20000573 Result: Down-regulated in Transcription
  misc_feature: MA Experiment 20000573 PARAMETER Experiment Name: At_100uM_ABA_Mutants__P Parameter: Organism Value: A. thaliana
  misc_feature: MA Experiment 20000573 PARAMETER Experiment Name: At_100uM_ABA_Mutants__P Parameter: Plant Line Value: CS22 vs. Ler wt
  misc_feature: MA Experiment 20000573 PARAMETER Experiment Name: At_100uM_ABA_Mutants__P Parameter: Timepoint (hr) Value: N/A
  misc_feature: MA Experiment 20000573 PARAMETER Experiment Name: At_100uM_ABA_Mutants__P Parameter: Tissue Value: Whole Plant
  misc_feature: MA Experiment 20000573 PARAMETER Experiment Name: At_100uM_ABA_Mutants__P Parameter: Treatment Value: None
  misc_feature: MA Experiment ID: 20000574 Result: Down-regulated in Transcription
  misc_feature: MA Experiment 20000574 PARAMETER Experiment Name: At_100uM_ABA_Mutants__P Parameter: Organism Value: A. thaliana
  misc_feature: MA Experiment 20000574 PARAMETER Experiment Name: At_100uM_ABA_Mutants__P Parameter: Plant Line Value: CS23 vs. Ler wt
  misc_feature: MA Experiment 20000574 PARAMETER Experiment Name: At_100uM_ABA_Mutants__P Parameter: Timepoint (hr) Value: N/A
  misc_feature: MA Experiment 20000574 PARAMETER Experiment Name: At_100uM_ABA_Mutants__P Parameter: Tissue Value: Whole Plant
  misc_feature: MA Experiment 20000574 PARAMETER Experiment Name: At_100uM_ABA_Mutants__P Parameter: Treatment Value: None
  misc_feature: MA Experiment ID: 20000578 Result: Down-regulated in Transcription
  misc_feature: MA Experiment 20000578 PARAMETER Experiment Name: At_CS3726__P Parameter: Organism Value: A. thaliana
  misc_feature: MA Experiment 20000578 PARAMETER Experiment Name: At_CS3726__P Parameter: Plant Line Value: CS3726
  misc_feature: MA Experiment 20000578 PARAMETER Experiment Name: At_CS3726__P Parameter: Tissue Value: Whole Plant
  misc_feature: MA Experiment ID: 20000794 Result: Up-regulated in Transcription
  misc_feature: MA Experiment 20000794 PARAMETER Experiment Name: At_Petals_P Parameter: Age (day) Value: 23-25 days
  misc_feature: MA Experiment 20000794 PARAMETER Experiment Name: At_Petals_P Parameter: Plant Line Value: WS
  misc_feature: MA Experiment 20000794 PARAMETER Experiment Name: At_Petals_P Parameter: Tissue Value: Petals vs. Whole plant
  misc_feature: MA Experiment ID: 20001247 Result: Down-regulated in Transcription
  misc_feature: MA Experiment 20001247 PARAMETER Experiment Name: At_Far-red-induction_P Parameter: Age (day) Value: 7
  misc_feature: MA Experiment 20001247 PARAMETER Experiment Name: At_Far-red-induction_P Parameter: Light Value: Far-red vs. White
  misc_feature: MA Experiment 20001247 PARAMETER Experiment Name: At_Far-red-induction_P Parameter: Organism Value: A. thaliana
  misc_feature: MA Experiment 20001247 PARAMETER Experiment Name: At_Far-red-induction_P Parameter: Plant Line Value: Columbia
  misc_feature: MA Experiment 20001247 PARAMETER Experiment Name: At_Far-red-induction_P Parameter: Timepoint (hr) Value: 1
  misc_feature: MA Experiment 20001247 PARAMETER Experiment Name: At_Far-red-induction_P Parameter: Tissue Value: Whole Plant
  misc_feature: MA Experiment ID: 20001248 Result: Down-regulated in Transcription
  misc_feature: MA Experiment 20001248 PARAMETER Experiment Name: At_Far-red-induction_P Parameter: Age (day) Value: 7
  misc_feature: MA Experiment 20001248 PARAMETER Experiment Name: At_Far-red-induction_P Parameter: Light Value: Far-red vs. White
  misc_feature: MA Experiment 20001248 PARAMETER Experiment Name: At_Far-red-induction_P Parameter: Organism Value: A. thaliana
  misc_feature: MA Experiment 20001248 PARAMETER Experiment Name: At_Far-red-induction_P Parameter: Plant Line Value: Columbia
  misc_feature: MA Experiment 20001248 PARAMETER Experiment Name: At_Far-red-induction_P Parameter: Timepoint (hr) Value: 4
  misc_feature: MA Experiment 20001248 PARAMETER Experiment Name: At_Far-red-induction_P Parameter: Tissue Value: Whole Plant
  misc_feature: MA Experiment ID: 20001451 Result: Down-regulated in Transcription
  misc_feature: MA Experiment 20001451 PARAMETER Experiment Name: At_Far-red-induction_P Parameter: Age (day) Value: 7
  misc_feature: MA Experiment 20001451 PARAMETER Experiment Name: At_Far-red-induction_P Parameter: Light Value: Far-red vs. White
  misc_feature: MA Experiment 20001451 PARAMETER Experiment Name: At_Far-red-induction_P Parameter: Organism Value: A. thaliana
  misc_feature: MA Experiment 20001451 PARAMETER Experiment Name: At_Far-red-induction_P Parameter: Plant Line Value: Columbia
  misc_feature: MA Experiment 20001451 PARAMETER Experiment Name: At_Far-red-induction_P Parameter: Timepoint (hr) Value: 24
  misc_feature: MA Experiment 20001451 PARAMETER Experiment Name: At_Far-red-induction_P Parameter: Tissue Value: Whole Plant
  misc_feature: MA Experiment ID: 20001554 Result: Down-regulated in Transcription
  misc_feature: MA Experiment 20001554 PARAMETER Experiment Name: At_Drought_Soil_Dry_P Parameter: Age (day) Value: 21
  misc_feature: MA Experiment 20001554 PARAMETER Experiment Name: At_Drought_Soil_Dry_P Parameter: Organism Value: A. thaliana
  misc_feature: MA Experiment 20001554 PARAMETER Experiment Name: At_Drought_Soil_Dry_P Parameter: Plant Line Value: WS
  misc_feature: MA Experiment 20001554 PARAMETER Experiment Name: At_Drought_Soil_Dry_P Parameter: Post Timepoint (hr) Value: None
  misc_feature: MA Experiment 20001554 PARAMETER Experiment Name: At_Drought_Soil_Dry_P Parameter: Post-Treatment Value: None
  misc_feature: MA Experiment 20001554 PARAMETER Experiment Name: At_Drought_Soil_Dry_P Parameter: Timepoint (day) Value: 7
  misc_feature: MA Experiment 20001554 PARAMETER Experiment Name: At_Drought_Soil_Dry_P Parameter: Treatment Value: Drought vs. No Drought
  misc_feature: MA Experiment ID: 20001555 Result: Down-regulated in Transcription
  misc_feature: MA Experiment 20001555 PARAMETER Experiment Name: At_Drought_Soil_Dry_P Parameter: Age (day) Value: 24
  misc_feature: MA Experiment 20001555 PARAMETER Experiment Name: At_Drought_Soil_Dry_P Parameter: Organism Value: A. thaliana
  misc_feature: MA Experiment 20001555 PARAMETER Experiment Name: At_Drought_Soil_Dry_P Parameter: Plant Line Value: WS
  misc_feature: MA Experiment 20001555 PARAMETER Experiment Name: At_Drought_Soil_Dry_P Parameter: Post Timepoint (hr) Value: None
  misc_feature: MA Experiment 20001555 PARAMETER Experiment Name: At_Drought_Soil_Dry_P Parameter: Post-Treatment Value: None
  misc_feature: MA Experiment 20001555 PARAMETER Experiment Name: At_Drought_Soil_Dry_P Parameter: Timepoint (day) Value: 10
  misc_feature: MA Experiment 20001555 PARAMETER Experiment Name: At_Drought_Soil_Dry_P Parameter: Treatment Value: Drought vs. No Drought
  misc_feature: MA Experiment ID: 20001556 Result: Down-regulated in Transcription
  misc_feature: MA Experiment 20001556 PARAMETER Experiment Name: At_Drought_Soil_Dry_P Parameter: Age (day) Value: 26
  misc_feature: MA Experiment 20001556 PARAMETER Experiment Name: At_Drought_Soil_Dry_P Parameter: Organism Value: A. thaliana
  misc_feature: MA Experiment 20001556 PARAMETER Experiment Name: At_Drought_Soil_Dry_P Parameter: Plant Line Value: WS
  misc_feature: MA Experiment 20001556 PARAMETER Experiment Name: At_Drought_Soil_Dry_P Parameter: Post Timepoint (hr) Value: None
  misc_feature: MA Experiment 20001556 PARAMETER Experiment Name: At_Drought_Soil_Dry_P Parameter: Post-Treatment Value: None
  misc_feature: MA Experiment 20001556 PARAMETER Experiment Name: At_Drought_Soil_Dry_P Parameter: Timepoint (day) Value: 12
  misc_feature: MA Experiment 20001556 PARAMETER Experiment Name: At_Drought_Soil_Dry_P Parameter: Treatment Value: Drought vs. No Drought
  misc_feature: MA Experiment ID: 20001557 Result: Down-regulated in Transcription
  misc_feature: MA Experiment 20001557 PARAMETER Experiment Name: At_Drought_Soil_Dry_P Parameter: Age (day) Value: 27
  misc_feature: MA Experiment 20001557 PARAMETER Experiment Name: At_Drought_Soil_Dry_P Parameter: Organism Value: A. thaliana
  misc_feature: MA Experiment 20001557 PARAMETER Experiment Name: At_Drought_Soil_Dry_P Parameter: Plant Line Value: WS
  misc_feature: MA Experiment 20001557 PARAMETER Experiment Name: At_Drought_Soil_Dry_P Parameter: Post Timepoint (hr) Value: 3
  misc_feature: MA Experiment 20001557 PARAMETER Experiment Name: At_Drought_Soil_Dry_P Parameter: Post-Treatment Value: Re-Water vs. No Drought
  misc_feature: MA Experiment 20001557 PARAMETER Experiment Name: At_Drought_Soil_Dry_P Parameter: Timepoint (day) Value: 13
  misc_feature: MA Experiment 20001557 PARAMETER Experiment Name: At_Drought_Soil_Dry_P Parameter: Treatment Value: Drought vs. No Drought
  misc_feature: MA Experiment ID: 20001558 Result: Down-regulated in Transcription
  misc_feature: MA Experiment 20001558 PARAMETER Experiment Name: At_Drought_Soil_Dry_P Parameter: Age (day) Value: 27
  misc_feature: MA Experiment 20001558 PARAMETER Experiment Name: At_Drought_Soil_Dry_P Parameter: Organism Value: A. thaliana
  misc_feature: MA Experiment 20001558 PARAMETER Experiment Name: At_Drought_Soil_Dry_P Parameter: Plant Line Value: WS
  misc_feature: MA Experiment 20001558 PARAMETER Experiment Name: At_Drought_Soil_Dry_P Parameter: Post Timepoint (hr) Value: 6
  misc_feature: MA Experiment 20001558 PARAMETER Experiment Name: At_Drought_Soil_Dry_P Parameter: Post-Treatment Value: Re-Water vs. No Drought
  misc_feature: MA Experiment 20001558 PARAMETER Experiment Name: At_Drought_Soil_Dry_P Parameter: Timepoint (day) Value: 13
  misc_feature: MA Experiment 20001558 PARAMETER Experiment Name: At_Drought_Soil_Dry_P Parameter: Treatment Value: Drought vs. No Drought
  misc_feature: MA Experiment ID: 20001559 Result: Down-regulated in Transcription
  misc_feature: MA Experiment 20001559 PARAMETER Experiment Name: At_Drought_Soil_Dry_P Parameter: Age (day) Value: 28
  misc_feature: MA Experiment 20001559 PARAMETER Experiment Name: At_Drought_Soil_Dry_P Parameter: Organism Value: A. thaliana
  misc_feature: MA Experiment 20001559 PARAMETER Experiment Name: At_Drought_Soil_Dry_P Parameter: Plant Line Value: WS
  misc_feature: MA Experiment 20001559 PARAMETER Experiment Name: At_Drought_Soil_Dry_P Parameter: Post Timepoint (hr) Value: 29
  misc_feature: MA Experiment 20001559 PARAMETER Experiment Name: At_Drought_Soil_Dry_P Parameter: Post-Treatment Value: Re-Water vs. No Drought
  misc_feature: MA Experiment 20001559 PARAMETER Experiment Name: At_Drought_Soil_Dry_P Parameter: Timepoint (day) Value: 14
  misc_feature: MA Experiment 20001559 PARAMETER Experiment Name: At_Drought_Soil_Dry_P Parameter: Treatment Value: Drought vs. No Drought
  misc_feature: MA Experiment ID: 20001560 Result: Down-regulated in Transcription
  misc_feature: MA Experiment 20001560 PARAMETER Experiment Name: At_Drought_Soil_Dry_P Parameter: Age (day) Value: 28
  misc_feature: MA Experiment 20001560 PARAMETER Experiment Name: At_Drought_Soil_Dry_P Parameter: Organism Value: A. thaliana
  misc_feature: MA Experiment 20001560 PARAMETER Experiment Name: At_Drought_Soil_Dry_P Parameter: Plant Line Value: WS
  misc_feature: MA Experiment 20001560 PARAMETER Experiment Name: At_Drought_Soil_Dry_P Parameter: Post Timepoint (hr) Value: None
  misc_feature: MA Experiment 20001560 PARAMETER Experiment Name: At_Drought_Soil_Dry_P Parameter: Post-Treatment Value: None
  misc_feature: MA Experiment 20001560 PARAMETER Experiment Name: At_Drought_Soil_Dry_P Parameter: Timepoint (day) Value: 14
  misc_feature: MA Experiment 20001560 PARAMETER Experiment Name: At_Drought_Soil_Dry_P Parameter: Treatment Value: Drought vs. No Drought
  misc_feature: MA Experiment ID: 20001772 Result: Up-regulated in Transcription
  misc_feature: MA Experiment 20001772 PARAMETER Experiment Name: At_Far-red-enriched-adult_P Parameter: Age (day) Value: 29
  misc_feature: MA Experiment 20001772 PARAMETER Experiment Name: At_Far-red-enriched-adult_P Parameter: Light Value: Far-red enriched vs. White
  misc_feature: MA Experiment 20001772 PARAMETER Experiment Name: At_Far-red-enriched-adult_P Parameter: Organism Value: A. thaliana
  misc_feature: MA Experiment 20001772 PARAMETER Experiment Name: At_Far-red-enriched-adult_P Parameter: Plant Line Value: Columbia
  misc_feature: MA Experiment 20001772 PARAMETER Experiment Name: At_Far-red-enriched-adult_P Parameter: Timepoint (hr) Value: 24
  misc_feature: MA Experiment 20001772 PARAMETER Experiment Name: At_Far-red-enriched-adult_P Parameter: Tissue Value: Aerial
  misc_feature: MA Experiment ID: 20001904 Result: Down-regulated in Transcription
  misc_feature: MA Experiment 20001904 PARAMETER Experiment Name: At_Drought_Reproduction_P Parameter: Age (day) Value: 37
  misc_feature: MA Experiment 20001904 PARAMETER Experiment Name: At_Drought_Reproduction_P Parameter: Organism Value: A. thaliana
  misc_feature: MA Experiment 20001904 PARAMETER Experiment Name: At_Drought_Reproduction_P Parameter: Plant Line Value: WS
  misc_feature: MA Experiment 20001904 PARAMETER Experiment Name: At_Drought_Reproduction_P Parameter: Timepoint (day) Value: 7
  misc_feature: MA Experiment 20001904 PARAMETER Experiment Name: At_Drought_Reproduction_P Parameter: Tissue Value: Rosettes
  misc_feature: MA Experiment 20001904 PARAMETER Experiment Name: At_Drought_Reproduction_P Parameter: Treatment Value: Drought vs. No Drought
  misc_feature: MA Experiment ID: 20001906 Result: Down-regulated in Transcription
  misc_feature: MA Experiment 20001906 PARAMETER Experiment Name: At_Drought_Reproduction_P Parameter: Age (day) Value: 35
  misc_feature: MA Experiment 20001906 PARAMETER Experiment Name: At_Drought_Reproduction_P Parameter: Organism Value: A. thaliana
  misc_feature: MA Experiment 20001906 PARAMETER Experiment Name: At_Drought_Reproduction_P Parameter: Plant Line Value: WS
  misc_feature: MA Experiment 20001906 PARAMETER Experiment Name: At_Drought_Reproduction_P Parameter: Timepoint (day) Value: 5
  misc_feature: MA Experiment 20001906 PARAMETER Experiment Name: At_Drought_Reproduction_P Parameter: Tissue Value: Siliques
  misc_feature: MA Experiment 20001906 PARAMETER Experiment Name: At_Drought_Reproduction_P Parameter: Treatment Value: Drought vs. No Drought
  misc_feature: MA Experiment ID: 20001911 Result: Down-regulated in Transcription
  misc_feature: MA Experiment 20001911 PARAMETER Experiment Name: At_Drought_Reproduction_P Parameter: Age (day) Value: 40
  misc_feature: MA Experiment 20001911 PARAMETER Experiment Name: At_Drought_Reproduction_P Parameter: Organism Value: A. thaliana
  misc_feature: MA Experiment 20001911 PARAMETER Experiment Name: At_Drought_Reproduction_P Parameter: Plant Line Value: WS
  misc_feature: MA Experiment 20001911 PARAMETER Experiment Name: At_Drought_Reproduction_P Parameter: Timepoint (day) Value: 10
  misc_feature: MA Experiment 20001911 PARAMETER Experiment Name: At_Drought_Reproduction_P Parameter: Tissue Value: Flowers
  misc_feature: MA Experiment 20001911 PARAMETER Experiment Name: At_Drought_Reproduction_P Parameter: Treatment Value: Drought vs. No Drought
ccatattattcacgattctcatcaaatcatctccgatactcacaaccgaaataactaacccctcctcaacaaaaaacaacaaaacatgtacactccatcatacttaaaatattcaataatctcaattatatccgtattattcctccaaggaactcatggagacgacggaggttggcaaggtggtcacgccacgttttacggcggcgaagatgcttccggcaccatgggcggagcttgtggctatggaaatttgtatggccaaggttacgggacgaacacggcggctttaagtacggctctattcaacaacggactcacgtgtggcgcgtgctatgagatgaagtgtaacgatgacccgaggtggtgtctcgggtcaaccatcaccgtcacagctacaaacttttgcccacctaaccctggcctctccaacgataatggaggttggtgcaatcctcctcttcagcatttcgacctcgccgagccagcttttcttcagatcgctcagtatcgtgccggcattgttcctgtctctttccgaagagtaccatgtatgaagaaaggaggaataaggtttacgatcaacggacactcatacttcaacctcgttctgatctccaacgtaggaggagcaggagacgtacacgccgtctcaatcaaaggctcaaaaacacagtcgtggcaagcgatgtctagaaactggggacaaaactggcagagcaattcatacatgaacgaccaaagcctttccttccaggtaacgaccagcgatggtcgcacactcgttagcaacgacgtggctccttctaattggcagttcggacaaacctaccaaggtggtcagttctgatccaaaccatcatccacatctctctgttttgggtgctgacgtggctgcatattgctgaggtggctcgtaagcacccgcttaattagcttagccttttttttctcttatttacgaattattgcttcaatggttgtattttcattgtgcctacaaaaaagcaaggttttttt

SEQ ID NO: 85039 - protein, 253 aa, Arabidopsis thaliana; identical to SEQ ID NO: 20852
  peptide (1)..(253): Ceres Seq. ID no. 12678439
  misc_feature (161)..(239): Pfam Name: Pollen allergen Pfam Description: Pollen allergen
  misc_feature (1)..(253): Homolog of NCBI NO: 15226718 NR Description: expansin, putative; protein id: At2g40610.1,
  misc_feature (1)..(253): Homolog of NCBI NO: 29421120 NR Description: expansin [Vitis labrusca x Vitis vinifera]
  misc_feature (10)..(253): Homolog of NCBI NO: 7025493 NR Description: expansin 2 [Zinnia elegans]
  misc_feature (1)..(253): Homolog of NCBI NO: 29421122 NR Description: expansin [Vitis labrusca x Vitis vinifera]
  misc_feature (5)..(253): Homolog of NCBI NO: 11932092 NR Description: expansin [Cicer arietinum]
  misc_feature (5)..(253): Homolog of NCBI NO: 11907554 NR Description: expansin [Prunus persica]
  misc_feature (2)..(253): Homolog of NCBI NO: 29467499 NR Description: expansin [Pyrus communis]
  misc_feature (14)..(253): Homolog of NCBI NO: 38046728 NR Description: alpha-expansin 2 [Populus tremula x Populus
  misc_feature (5)..(253): Homolog of NCBI NO: 29467501 NR Description: expansin [Pyrus communis]
  misc_feature (4)..(253): Homolog of NCBI NO: 3510538 NR Description: expansin [Prunus armeniaca]

SEQ ID NO: 85040 - protein, 207 aa, Arabidopsis thaliana; identical to SEQ ID NO: 20853
  peptide (1)..(207): Ceres Seq. ID no. 12678440
  misc_feature (115)..(193): Pfam Name: Pollen allergen Pfam Description: Pollen allergen
  misc_feature (1)..(207): Homolog of NCBI NO: 15226718 NR Description: expansin, putative; protein id: At2g40610.1,
  misc_feature (1)..(207): Homolog of NCBI NO: 29421120 NR Description: expansin [Vitis labrusca x Vitis vinifera]
  misc_feature (1)..(207): Homolog of NCBI NO: 7025493 NR Description: expansin 2 [Zinnia elegans]
  misc_feature (1)..(207): Homolog of NCBI NO: 29421122 NR Description: expansin [Vitis labrusca x Vitis vinifera]
  misc_feature (1)..(207): Homolog of NCBI NO: 11932092 NR Description: expansin [Cicer arietinum]
  misc_feature (1)..(207): Homolog of NCBI NO: 11907554 NR Description: expansin [Prunus persica]
  misc_feature (1)..(207): Homolog of NCBI NO: 29467499 NR Description: expansin [Pyrus communis]
  misc_feature (1)..(207): Homolog of NCBI NO: 38046728 NR Description: alpha-expansin 2 [Populus tremula x Populus
  misc_feature (1)..(207): Homolog of NCBI NO: 29467501 NR Description: expansin [Pyrus communis]
  misc_feature (1)..(207): Homolog of NCBI NO: 3510538 NR Description: expansin [Prunus armeniaca]

SEQ ID NO: 85041 - protein, 169 aa, Arabidopsis thaliana; identical to SEQ ID NO: 20854
  peptide (1)..(169): Ceres Seq. ID no. 12678441
  misc_feature (77)..(155): Pfam Name: Pollen allergen Pfam Description: Pollen allergen
  misc_feature (1)..(169): Homolog of NCBI NO: 15226718 NR Description: expansin, putative; protein id: At2g40610.1,
  misc_feature (1)..(169): Homolog of NCBI NO: 29421120 NR Description: expansin [Vitis labrusca x Vitis vinifera]
  misc_feature (1)..(169): Homolog of NCBI NO: 7025493 NR Description: expansin 2 [Zinnia elegans]
  misc_feature (1)..(169): Homolog of NCBI NO: 29421122 NR Description: expansin [Vitis labrusca x Vitis vinifera]
  misc_feature (1)..(169): Homolog of NCBI NO: 11932092 NR Description: expansin [Cicer arietinum]
  misc_feature (1)..(169): Homolog of NCBI NO: 11907554 NR Description: expansin [Prunus persica]
  misc_feature (1)..(169): Homolog of NCBI NO: 29467499 NR Description: expansin [Pyrus communis]
  misc_feature (1)..(169): Homolog of NCBI NO: 38046728 NR Description: alpha-expansin 2 [Populus tremula x Populus
  misc_feature (1)..(169): Homolog of NCBI NO: 29467501 NR Description: expansin [Pyrus communis]
  misc_feature (1)..(169): Homolog of NCBI NO: 3510538 NR Description: expansin [Prunus armeniaca]

SEQ ID NO: 85042 - DNA, 567 bp, Arabidopsis thaliana
  misc_feature (1)..(567): Ceres Seq. ID no. 12678481
  misc_feature: MA Experiment ID: 108434 Result: Down-regulated in Transcription
  misc_feature: MA Experiment 108434 PARAMETER Experiment Name: At_Root_Tips_cDNA_P Parameter: Tissue Value: Root Tips
  misc_feature: MA Experiment ID: 108435 Result: Down-regulated in Transcription
  misc_feature: MA Experiment 108435 PARAMETER Experiment Name: At_stm_Mutants_cDNA_P Parameter: Plant Line Value: wt Landsburg vs stm
  misc_feature: MA Experiment 108435 PARAMETER Experiment Name: At_stm_Mutants_cDNA_P Parameter: Tissue Value: Shoot Apical Meristem Region
  misc_feature: MA Experiment ID: 108461 Result: Up-regulated in Transcription
  misc_feature: MA Experiment 108461 PARAMETER Experiment Name: At_Germinating_Seeds_cDNA_P Parameter: Age (day) Value: 1 vs. 0
  misc_feature: MA Experiment 108461 PARAMETER Experiment Name: At_Germinating_Seeds_cDNA_P Parameter: Tissue Value: Germinating Seeds
  misc_feature: MA Experiment ID: 108462 Result: Up-regulated in Transcription
  misc_feature: MA Experiment 108462 PARAMETER Experiment Name: At_Germinating_Seeds_cDNA_P Parameter: Age (day) Value: 2 vs. 0
  misc_feature: MA Experiment 108462 PARAMETER Experiment Name: At_Germinating_Seeds_cDNA_P Parameter: Tissue Value: Germinating Seeds
  misc_feature: MA Experiment ID: 108464 Result: Up-regulated in Transcription
  misc_feature: MA Experiment 108464 PARAMETER Experiment Name: At_Germinating_Seeds_cDNA_P Parameter: Age (day) Value: 4 vs. 0
  misc_feature: MA Experiment 108464 PARAMETER Experiment Name: At_Germinating_Seeds_cDNA_P Parameter: Tissue Value: Germinating Seeds
  misc_feature: MA Experiment ID: 108501 Result: Down-regulated in Transcription
  misc_feature: MA Experiment 108501 PARAMETER Experiment Name: At_ap2_floral_buds_cDNA_P Parameter: Plant Line Value: ap2 (Ler.)
  misc_feature: MA Experiment 108501 PARAMETER Experiment Name: At_ap2_floral_buds_cDNA_P Parameter: Tissue Value: Closed Flower
  misc_feature: MA Experiment ID: 108577 Result: Down-regulated in Transcription
  misc_feature: MA Experiment 108577 PARAMETER Experiment Name: At_42deg_Heat_cDNA_P Parameter: Temperature (deg C) Value: 42 vs. 22
  misc_feature: MA Experiment 108577 PARAMETER Experiment Name: At_42deg_Heat_cDNA_P Parameter: Timepoint (hr) Value: 6
  misc_feature: MA Experiment 108577 PARAMETER Experiment Name: At_42deg_Heat_cDNA_P Parameter: Tissue Value: Aerial
  misc_feature: MA Experiment ID: 108607 Result: Up-regulated in Transcription
  misc_feature: MA Experiment 108607 PARAMETER Experiment Name: At_100uM_ABA_cDNA_P Parameter: Timepoint (hr) Value: 4
  misc_feature: MA Experiment 108607 PARAMETER Experiment Name: At_100uM_ABA_cDNA_P Parameter: Tissue Value: Aerial
  misc_feature: MA Experiment 108607 PARAMETER Experiment Name: At_100uM_ABA_cDNA_P Parameter: Treatment Value: 100uM ABA vs. No Treatment
  misc_feature: MA Experiment ID: 20000072 Result: Up-regulated in Transcription
  misc_feature: MA Experiment 20000072 PARAMETER Experiment Name: At_100uM_ABA_Mutants_cDNA_P Parameter: Plant Line Value: CS8105
  misc_feature: MA Experiment 20000072 PARAMETER Experiment Name: At_100uM_ABA_Mutants_cDNA_P Parameter: Timepoint (hr) Value: 6
  misc_feature: MA Experiment 20000072 PARAMETER Experiment Name: At_100uM_ABA_Mutants_cDNA_P Parameter: Tissue Value: Aerial
  misc_feature: MA Experiment 20000072 PARAMETER Experiment Name: At_100uM_ABA_Mutants_cDNA_P Parameter: Treatment Value: 100uM ABA vs. No Treatment
  misc_feature: MA Experiment ID: 20000087 Result: Up-regulated in Transcription
  misc_feature: MA Experiment 20000087 PARAMETER Experiment Name: At_100uM_ABA_Mutants_cDNA_P Parameter: Plant Line Value: WS
  misc_feature: MA Experiment 20000087 PARAMETER Experiment Name: At_100uM_ABA_Mutants_cDNA_P Parameter: Timepoint (hr) Value: 6
  misc_feature: MA Experiment 20000087 PARAMETER Experiment Name: At_100uM_ABA_Mutants_cDNA_P Parameter: Tissue Value: Aerial
  misc_feature: MA Experiment 20000087 PARAMETER Experiment Name: At_100uM_ABA_Mutants_cDNA_P Parameter: Treatment Value: 100uM ABA vs. No Treatment
  misc_feature: MA Experiment ID: 20000111 Result: Down-regulated in Transcription
  misc_feature: MA Experiment 20000111 PARAMETER Experiment Name: At_42deg_Heat_cDNA_P Parameter: Temperature (deg C) Value: 42 vs. 22
  misc_feature: MA Experiment 20000111 PARAMETER Experiment Name: At_42deg_Heat_cDNA_P Parameter: Timepoint (hr) Value: 6
  misc_feature: MA Experiment 20000111 PARAMETER Experiment Name: At_42deg_Heat_cDNA_P Parameter: Tissue Value: Aerial
  misc_feature: MA Experiment ID: 20000112 Result: Down-regulated in Transcription
  misc_feature: MA Experiment 20000112 PARAMETER Experiment Name: At_42deg_Heat_cDNA_P Parameter: Temperature (deg C) Value: 42 vs. 22
  misc_feature: MA Experiment 20000112 PARAMETER Experiment Name: At_42deg_Heat_cDNA_P Parameter: Timepoint (hr) Value: 2
  misc_feature: MA Experiment 20000112 PARAMETER Experiment Name: At_42deg_Heat_cDNA_P Parameter: Tissue Value: Aerial
  misc_feature: MA Experiment ID: 20000113 Result: Down-regulated in Transcription
  misc_feature: MA Experiment 20000113 PARAMETER Experiment Name: At_42deg_Heat_cDNA_P Parameter: Temperature (deg C) Value: 42 vs. 22
  misc_feature: MA Experiment 20000113 PARAMETER Experiment Name: At_42deg_Heat_cDNA_P Parameter: Timepoint (hr) Value: 8
  misc_feature: MA Experiment 20000113 PARAMETER Experiment Name: At_42deg_Heat_cDNA_P Parameter: Tissue Value: Aerial
  misc_feature: MA Experiment ID: 20000117 Result: Up-regulated in Transcription
  misc_feature: MA Experiment 20000117 PARAMETER Experiment Name: At_100uM_ABA_Mutants_cDNA_P Parameter: Plant Line Value: Columbia
  misc_feature: MA Experiment 20000117 PARAMETER Experiment Name: At_100uM_ABA_Mutants_cDNA_P Parameter: Timepoint (hr) Value: 6
  misc_feature: MA Experiment 20000117 PARAMETER Experiment Name: At_100uM_ABA_Mutants_cDNA_P Parameter: Tissue Value: Aerial
  misc_feature: MA Experiment 20000117 PARAMETER Experiment Name: At_100uM_ABA_Mutants_cDNA_P Parameter: Treatment Value: 100uM ABA vs. No Treatment
  misc_feature: MA Experiment ID: 20000144 Result: Down-regulated in Transcription
  misc_feature: MA Experiment 20000144 PARAMETER Experiment Name: At_42deg_Heat_cDNA_P Parameter: Temperature (deg C) Value: 42 vs. 22
  misc_feature: MA Experiment 20000144 PARAMETER Experiment Name: At_42deg_Heat_cDNA_P Parameter: Timepoint (hr) Value: 1
  misc_feature: MA Experiment 20000144 PARAMETER Experiment Name: At_42deg_Heat_cDNA_P Parameter: Tissue Value: Aerial
  misc_feature: MA Experiment ID: 20000234 Result: Down-regulated in Transcription
  misc_feature: MA Experiment 20000234 PARAMETER Experiment Name: At_Siliques_P Parameter: Age (day) Value: 21
  misc_feature: MA Experiment 20000234 PARAMETER Experiment Name: At_Siliques_P Parameter: Organism Value: A. thaliana
  misc_feature: MA Experiment 20000234 PARAMETER Experiment Name: At_Siliques_P Parameter: Plant Line Value: WS
  misc_feature: MA Experiment 20000234 PARAMETER Experiment Name: At_Siliques_P Parameter: Tissue Value: Less Than 5mm Siliques vs. Whole Plant
  misc_feature: MA Experiment ID: 20000235 Result: Down-regulated in Transcription
  misc_feature: MA Experiment 20000235 PARAMETER Experiment Name: At_Siliques_P Parameter: Age (day) Value: 21
  misc_feature: MA Experiment 20000235 PARAMETER Experiment Name: At_Siliques_P Parameter: Organism Value: A. thaliana
  misc_feature: MA Experiment 20000235 PARAMETER Experiment Name: At_Siliques_P Parameter: Plant Line Value: WS
  misc_feature: MA Experiment 20000235 PARAMETER Experiment Name: At_Siliques_P Parameter: Tissue Value: 5-10mm Siliques vs. Whole Plant
  misc_feature: MA Experiment ID: 20001247 Result: Up-regulated in Transcription
  misc_feature: MA Experiment 20001247 PARAMETER Experiment Name: At_Far-red-induction_P Parameter: Age (day) Value: 7
  misc_feature: MA Experiment 20001247 PARAMETER Experiment Name: At_Far-red-induction_P Parameter: Light Value: Far-red vs. White
  misc_feature: MA Experiment 20001247 PARAMETER Experiment Name: At_Far-red-induction_P Parameter: Organism Value: A. thaliana
  misc_feature: MA Experiment 20001247 PARAMETER Experiment Name: At_Far-red-induction_P Parameter: Plant Line Value: Columbia
  misc_feature: MA Experiment 20001247 PARAMETER Experiment Name: At_Far-red-induction_P Parameter: Timepoint (hr) Value: 1
  misc_feature: MA Experiment 20001247 PARAMETER Experiment Name: At_Far-red-induction_P Parameter: Tissue Value: Whole Plant
  misc_feature: MA Experiment ID: 20001248 Result: Up-regulated in Transcription
  misc_feature: MA Experiment 20001248 PARAMETER Experiment Name: At_Far-red-induction_P Parameter: Age (day) Value: 7
  misc_feature: MA Experiment 20001248 PARAMETER Experiment Name: At_Far-red-induction_P Parameter: Light Value: Far-red vs. White
  misc_feature: MA Experiment 20001248 PARAMETER Experiment Name: At_Far-red-induction_P Parameter: Organism Value: A. thaliana
  misc_feature: MA Experiment 20001248 PARAMETER Experiment Name: At_Far-red-induction_P Parameter: Plant Line Value: Columbia
  misc_feature: MA Experiment 20001248 PARAMETER Experiment Name: At_Far-red-induction_P Parameter: Timepoint (hr) Value: 4
  misc_feature: MA Experiment 20001248 PARAMETER Experiment Name: At_Far-red-induction_P Parameter: Tissue Value: Whole Plant
  misc_feature: MA Experiment ID: 20001450 Result: Up-regulated in Transcription
  misc_feature: MA Experiment 20001450 PARAMETER Experiment Name: At_Far-red-induction_P Parameter: Age (day) Value: 7
  misc_feature: MA Experiment 20001450 PARAMETER Experiment Name: At_Far-red-induction_P Parameter: Light Value: Far-red vs. White
  misc_feature: MA Experiment 20001450 PARAMETER Experiment Name: At_Far-red-induction_P Parameter: Organism Value: A. thaliana
  misc_feature: MA Experiment 20001450 PARAMETER Experiment Name: At_Far-red-induction_P Parameter: Plant Line Value: Columbia
  misc_feature: MA Experiment 20001450 PARAMETER Experiment Name: At_Far-red-induction_P Parameter: Timepoint (hr) Value: 8
  misc_feature: MA Experiment 20001450 PARAMETER Experiment Name: At_Far-red-induction_P Parameter: Tissue Value: Whole Plant
  misc_feature: MA Experiment ID: 20001560 Result: Down-regulated in Transcription
  misc_feature: MA Experiment 20001560 PARAMETER Experiment Name: At_Drought_Soil_Dry_P Parameter: Age (day) Value: 28
  misc_feature: MA Experiment 20001560 PARAMETER Experiment Name: At_Drought_Soil_Dry_P Parameter: Organism Value: A. thaliana
  misc_feature: MA Experiment 20001560 PARAMETER Experiment Name: At_Drought_Soil_Dry_P Parameter: Plant Line Value: WS
  misc_feature: MA Experiment 20001560 PARAMETER Experiment Name: At_Drought_Soil_Dry_P Parameter: Post Timepoint (hr) Value: None
  misc_feature: MA Experiment 20001560 PARAMETER Experiment Name: At_Drought_Soil_Dry_P Parameter: Post-Treatment Value: None
  misc_feature: MA Experiment 20001560 PARAMETER Experiment Name: At_Drought_Soil_Dry_P Parameter: Timepoint (day) Value: 14
  misc_feature: MA Experiment 20001560 PARAMETER Experiment Name: At_Drought_Soil_Dry_P Parameter: Treatment Value: Drought vs. No Drought
atggcgatggtatcaggaagacgatctactctaaaccccgacgcacctctttttattccggcagctgtacgacaagtggaagatttctcaccggagtggtggcaattggtgacaacttcgacttggtaccctgattactggatcagtcagcagcagcaaggcgcggatggtttctatgacaacggagagaatgagaatggtggaggtcatatcgatgtagctgatcttcttccagaatcatttgattttgatgatatggaagatttctttgacactgatgctgctgagtttgatcaaggattcgatggaagaatgtattaccaagcaccttccgaatttggctttggaaagaatggtgagatggttaagaaatcaagtggaaacaggagcccgagatcgattgtggaaccagctaagtatgcggaaaagccagcgaaatggggaaaccagagggttgctgctgctccgagaaacatccaccagcctcgctgaagagatatgttgttaactagtcagagaagtcagagcagttcggtctgtgtatctttagccaccactgtacctttg

SEQ ID NO: 85043 - protein, 163 aa, Arabidopsis thaliana; identical to SEQ ID NO: 20801
  peptide (1)..(163): Ceres Seq. ID no. 12678482
  misc_feature (1)..(163): Homolog of NCBI NO: 15227351 NR Description: ERD15 protein; protein id: At2g41430.1, supported cDNA: 31388., supported by cDNA: gi_13926319, supported by cDNA: supported by cDNA: gi_17473678, supported by cDNA:
  misc_feature (1)..(163): Homolog of NCBI NO: 21592689 NR Description: ERD15 protein [Arabidopsis thaliana]
  misc_feature (1)..(163): Homolog of NCBI NO: 8489786 NR Description: dehydration-induced protein ERD15 [Lycopersicon
  misc_feature (9)..(163): Homolog of NCBI NO: 34395186 NR Description: unknown protein [Oryza sativa (japonica
  misc_feature (9)..(163): Homolog of NCBI NO: 34899128 NR Description: P0496C02.30 [Oryza sativa (japonica
  misc_feature (2)..(82): Homolog of NCBI NO: 18414176 NR Description: Expressed protein; protein id: At4g14270.1, by cDNA: 30129., supported by cDNA: gi_15028002, supported by gi_20259214 [Arabidopsis thaliana] >gi|15028003|gb|AAK76532.1|
  misc_feature (2)..(58): Homolog of NCBI NO: 21592596 NR Description: unknown [Arabidopsis thaliana]

SEQ ID NO: 85044 - protein, 161 aa, Arabidopsis thaliana; identical to SEQ ID NO: 20802
  peptide (1)..(161): Ceres Seq. ID no. 12678483
  misc_feature (1)..(161): Homolog of NCBI NO: 15227351 NR Description: ERD15 protein; protein id: At2g41430.1, supported cDNA: 31388., supported by cDNA: gi_13926319, supported by cDNA: supported by cDNA: gi_17473678, supported by cDNA:
  misc_feature (1)..(161): Homolog of NCBI NO: 21592689 NR Description: ERD15 protein [Arabidopsis thaliana]
  misc_feature (1)..(161): Homolog of NCBI NO: 8489786 NR Description: dehydration-induced protein ERD15 [Lycopersicon
  misc_feature (7)..(161): Homolog of NCBI NO: 34395186 NR Description: unknown protein [Oryza sativa (japonica
  misc_feature (7)..(161): Homolog of NCBI NO: 34899128 NR Description: P0496C02.30 [Oryza sativa (japonica
  misc_feature (1)..(80): Homolog of NCBI NO: 18414176 NR Description: Expressed protein; protein id: At4g14270.1, by cDNA: 30129., supported by cDNA: gi_15028002, supported by gi_20259214 [Arabidopsis thaliana] >gi|15028003|gb|AAK76532.1|
  misc_feature (1)..(56): Homolog of NCBI NO: 21592596 NR Description: unknown [Arabidopsis thaliana]

SEQ ID NO: 85045 - protein, 85 aa, Arabidopsis thaliana; identical to SEQ ID NO: 20803
  peptide (1)..(85): Ceres Seq. ID no. 12678484

SEQ ID NO: 85046 - DNA, 1313 bp, Arabidopsis thaliana
  misc_feature (1)..(1313): Ceres Seq. ID no. 12678501
  misc_feature: MA Experiment ID: 20000173 Result: Down-regulated in Transcription
  misc_feature: MA Experiment 20000173 PARAMETER Experiment Name: At_42deg_Heat_P Parameter: Age (day) Value: 14
  misc_feature: MA Experiment 20000173 PARAMETER Experiment Name: At_42deg_Heat_P Parameter: Organism Value: A. thaliana
  misc_feature: MA Experiment 20000173 PARAMETER Experiment Name: At_42deg_Heat_P Parameter: Plant Line Value: WS
  misc_feature: MA Experiment 20000173 PARAMETER Experiment Name: At_42deg_Heat_P Parameter: Temperature (deg C) Value: 42 vs. 22
  misc_feature: MA Experiment 20000173 PARAMETER Experiment Name: At_42deg_Heat_P Parameter: Timepoint (hr) Value: 6
  misc_feature: MA Experiment 20000173 PARAMETER Experiment Name: At_42deg_Heat_P Parameter: Tissue Value: Aerial
  misc_feature: MA Experiment ID: 20000185 Result: Down-regulated in Transcription
  misc_feature: MA Experiment 20000185 PARAMETER Experiment Name: At_Roots__P Parameter: Age (day) Value: 7 vs. 21
  misc_feature: MA Experiment 20000185 PARAMETER Experiment Name: At_Roots__P Parameter: Organism Value: A. thaliana
  misc_feature: MA Experiment 20000185 PARAMETER Experiment Name: At_Roots__P Parameter: Tissue Value: Roots vs. Whole Plant
  misc_feature: MA Experiment ID: 20000234 Result: Up-regulated in Transcription
  misc_feature: MA Experiment 20000234 PARAMETER Experiment Name: At_Siliques_P Parameter: Age (day) Value: 21
  misc_feature: MA Experiment 20000234 PARAMETER Experiment Name: At_Siliques_P Parameter: Organism Value: A. thaliana
  misc_feature: MA Experiment 20000234 PARAMETER Experiment Name: At_Siliques_P Parameter: Plant Line Value: WS
  misc_feature: MA Experiment 20000234 PARAMETER Experiment Name: At_Siliques_P Parameter: Tissue Value: Less Than 5mm Siliques vs. Whole Plant
  misc_feature: MA Experiment ID: 20000264 Result: Up-regulated in Transcription
  misc_feature: MA Experiment 20000264 PARAMETER Experiment Name: At_Open_Flower_P Parameter: Age (day) Value: 21
  misc_feature: MA Experiment 20000264 PARAMETER Experiment Name: At_Open_Flower_P Parameter: Plant Line Value: WS
  misc_feature: MA Experiment 20000264 PARAMETER Experiment Name: At_Open_Flower_P Parameter: Tissue Value: Open Flower vs. Whole Plant
  misc_feature: MA Experiment ID: 20000265 Result: Up-regulated in Transcription
  misc_feature: MA Experiment 20000265 PARAMETER Experiment Name: At_Open_Flower_P Parameter: Age (day) Value: 21
  misc_feature: MA Experiment 20000265 PARAMETER Experiment Name: At_Open_Flower_P Parameter: Plant Line Value: WS
  misc_feature: MA Experiment 20000265 PARAMETER Experiment Name: At_Open_Flower_P Parameter: Tissue Value: Closed Flower vs. Whole Plant
  misc_feature: MA Experiment ID: 20000286 Result: Up-regulated in Transcription
  misc_feature: MA Experiment 20000286 PARAMETER Experiment Name: At_Open_Flower_P Parameter: Age (day) Value: 21
  misc_feature: MA Experiment 20000286 PARAMETER Experiment Name: At_Open_Flower_P Parameter: Plant Line Value: WS
  misc_feature: MA Experiment 20000286 PARAMETER Experiment Name: At_Open_Flower_P Parameter: Tissue Value: Half Open vs. Whole Plant
  misc_feature: MA Experiment ID: 20000439 Result: Down-regulated in Transcription
  misc_feature: MA Experiment 20000439 PARAMETER Experiment Name: At_Roots__P Parameter: Age (day) Value: 14 vs. 21
  misc_feature: MA Experiment 20000439 PARAMETER Experiment Name: At_Roots__P Parameter: Organism Value: A. thaliana
  misc_feature: MA Experiment 20000439 PARAMETER Experiment Name: At_Roots__P Parameter: Tissue Value: Roots vs. Whole Plant
  misc_feature: MA Experiment ID: 20001247 Result: Down-regulated in Transcription
  misc_feature: MA Experiment 20001247 PARAMETER Experiment Name: At_Far-red-induction_P Parameter: Age (day) Value: 7
  misc_feature: MA Experiment 20001247 PARAMETER Experiment Name: At_Far-red-induction_P Parameter: Light Value: Far-red vs. White
  misc_feature: MA Experiment 20001247 PARAMETER Experiment Name: At_Far-red-induction_P Parameter: Organism Value: A. thaliana
  misc_feature: MA Experiment 20001247 PARAMETER Experiment Name: At_Far-red-induction_P Parameter: Plant Line Value: Columbia
  misc_feature: MA Experiment 20001247 PARAMETER Experiment Name: At_Far-red-induction_P Parameter: Timepoint (hr) Value: 1
  misc_feature: MA Experiment 20001247 PARAMETER Experiment Name: At_Far-red-induction_P Parameter: Tissue Value: Whole Plant
  misc_feature: MA Experiment ID: 20001248 Result: Down-regulated in Transcription
  misc_feature: MA Experiment 20001248 PARAMETER Experiment Name: At_Far-red-induction_P Parameter: Age (day) Value: 7
  misc_feature: MA Experiment 20001248 PARAMETER Experiment Name: At_Far-red-induction_P Parameter: Light Value: Far-red vs. White
  misc_feature: MA Experiment 20001248 PARAMETER Experiment Name: At_Far-red-induction_P Parameter: Organism Value: A. thaliana
  misc_feature: MA Experiment 20001248 PARAMETER Experiment Name: At_Far-red-induction_P Parameter: Plant Line Value: Columbia
  misc_feature: MA Experiment 20001248 PARAMETER Experiment Name: At_Far-red-induction_P Parameter: Timepoint (hr) Value: 4
  misc_feature: MA Experiment 20001248 PARAMETER Experiment Name: At_Far-red-induction_P Parameter: Tissue Value: Whole Plant
  misc_feature: MA Experiment ID: 20001905 Result: Down-regulated in Transcription
  misc_feature: MA Experiment 20001905 PARAMETER Experiment Name: At_Drought_Reproduction_P Parameter: Age (day) Value: 40
  misc_feature: MA Experiment 20001905 PARAMETER Experiment Name: At_Drought_Reproduction_P Parameter: Organism Value: A. thaliana
  misc_feature: MA Experiment 20001905 PARAMETER Experiment Name: At_Drought_Reproduction_P Parameter: Plant Line Value: WS
  misc_feature: MA Experiment 20001905 PARAMETER Experiment Name: At_Drought_Reproduction_P Parameter: Timepoint (day) Value: 10
  misc_feature: MA Experiment 20001905 PARAMETER Experiment Name: At_Drought_Reproduction_P Parameter: Tissue Value: Rosettes
  misc_feature: MA Experiment 20001905 PARAMETER Experiment Name: At_Drought_Reproduction_P Parameter: Treatment Value: Drought vs. No Drought
  misc_feature: MA Experiment ID: 20001906 Result: Down-regulated in Transcription
  misc_feature: MA Experiment 20001906 PARAMETER Experiment Name: At_Drought_Reproduction_P Parameter: Age (day) Value: 35
  misc_feature: MA Experiment 20001906 PARAMETER Experiment Name: At_Drought_Reproduction_P Parameter: Organism Value: A. thaliana
  misc_feature: MA Experiment 20001906 PARAMETER Experiment Name: At_Drought_Reproduction_P Parameter: Plant Line Value: WS
  misc_feature: MA Experiment 20001906 PARAMETER Experiment Name: At_Drought_Reproduction_P Parameter: Timepoint (day) Value: 5
  misc_feature: MA Experiment 20001906 PARAMETER Experiment Name: At_Drought_Reproduction_P Parameter: Tissue Value: Siliques
  misc_feature: MA Experiment 20001906 PARAMETER Experiment Name: At_Drought_Reproduction_P Parameter: Treatment Value: Drought vs. No Drought
gagtaaaaccctttctgtctgagtaagaggaaaccaacatggagatgggttccaactcgggtccgggtcatggtccgggtcaggcagagtcgggtggttcctccactgagtcatcctctttcagtggagggctcatgtttggccagaagatctacttcgaggacggtggtggtggatccgggtcttcttcctcaggtggtcgttcaaacagacgtgtccgtggaggcgggtcgggtcagtcgggtcagataccaaggtgccaagtggaaggttgtgggatggatctaaccaatgcaaaaggttattactcgagacaccgagtttgtggagtgcactctaaaacacctaaagtcactgtggctggtatcgaacagaggttttgtcaacagtgcagcaggtttcatcagcttccggaatttgacctagagaaaaggagttgccgcaggagactcgctggtcataatgagcgacgaaggaagccacagcctgcgtctctctctgtgttagcttctcgttacgggaggatcgcaccttcgctttacgaaaatggtgatgctggaatgaatggaagctttcttgggaaccaagagataggatggccaagttcaagaacattggatacaagagtgatgaggcggccagtgtcgtcaccgtcatggcagatcaatccaatgaatgtatttagtcaaggttcagttggtggaggagggacaagcttctcatctccagagattatggacactaaactagagagctacaagggaattggcgactcaaactgtgctctctctcttctgtcaaatccacatcaaccacatgacaacaacaacaacaacaacaacaacaacaacaacaacaacaatacatggcgagcttcttcaggttttggcccgatgacggttacaatggctcaaccaccacctgcacctagccagcatcagtatctgaacccgccttgggtattcaaggacaatgataatgatatgtctcctgttttgaatttaggtcagataagtagtggcacggcaatgggtgagttcgagttatctgatcaccatcatcaaagtaggagacagtacatggaagatgagaacacaagggcttatgactcttcttctcaccataccaactggtctctctgacttgtctttgcatcagagaatcttcttacaatgaacgattctgcaatatcttatctttttgcttctttgtttattctgttatctgctatcaataaaccagacaattgttgccagataatggcttttgattttgatttgttgttttatctccatgaaaatccaagttatgag

SEQ ID NO: 85047 - protein, 367 aa, Arabidopsis thaliana
  peptide (1)..(367): Ceres Seq. ID no. 12678502
  misc_feature (73)..(151): Pfam Name: SBP domain Pfam Description: SBP domain
  misc_feature (1)..(367): Homolog of NCBI NO: 30688933 NR Description: squamosa-promoter binding protein -related
  misc_feature (1)..(367): Homolog of NCBI NO: 25352586 NR Description: squamosa promoter binding protein homolog 9 - Arabidopsis thaliana >gi|5931675|emb|CAB56591.1| squamosa
  misc_feature (1)..(367): Homolog of NCBI NO: 15227896 NR Description: putative squamosa-promoter binding protein; id: At2g42200.1, supported by cDNA: gi_15028114 [Arabidopsis
  misc_feature (1)..(367): Homolog of NCBI NO: 15028115 NR Description: putative squamosa-promoter binding protein
  misc_feature (14)..(367): Homolog of NCBI NO: 15230904 NR Description: squamosa promoter-binding protein homolog; id: At3g57920.1, supported by cDNA: 247919. [Arabidopsis
  misc_feature (25)..(273): Homolog of NCBI NO: 25352584 NR Description: squamosa promoter binding protein-homolog 4 - garden snapdragon (fragment) >gi|5931641|emb|CAB56569.1|
  misc_feature (45)..(367): Homolog of NCBI NO: 25352582 NR Description: squamosa promoter binding protein-homolog 5 - garden snapdragon (fragment) >gi|5931643|emb|CAB56570.1|
  misc_feature (16)..(307): Homolog of NCBI NO: 28411864 NR Description: putative SBP-domain protein 5 [Oryza sativa
  misc_feature (73)..(334): Homolog of NCBI NO: 5931786 NR Description: SBP-domain protein 5 [Zea mays]
  misc_feature (13)..(255): Homolog of NCBI NO: 25456646 NR Description: squamosa promoter binding protein 2 [imported] -
MEMGSNSGPGHGPGQAESGGSSTESSSFSGGLMFGQKIYFEDGGGGSGSSSSGGRSNRRVRGGGSGQSGQIPRCQVEGCGMDLTNAKGYYSRHRVCGVHSKTPKVTVAGIEQRFCQQCSRFHQLPEFDLEKRSCRRRLAGHNERRRKPQPASLSVLASRYGRIAPSLYENGDAGMNGSFLGNQEIGWPSSRTLDTRVMRRPVSSPSWQINPMNVFSQGSVGGGGTSFSSPEIMDTKLESYKGIGDSNCALSLLSNPHQPHDNNNNNNNNNNNNNNTWRASSGFGPMTVTMAQPPPAPSQHQYLNPPWVFKDNDNDMSPVLNLGQISSGTAMGEFELSDHHHQSRRQYMEDENTRAYDSSSHHTNWSL

SEQ ID NO: 85048 - protein, 365 aa, Arabidopsis thaliana
  peptide (1)..(365): Ceres Seq. ID no. 12678503
  misc_feature (71)..(149): Pfam Name: SBP domain Pfam Description: SBP domain
  misc_feature (1)..(365): Homolog of NCBI NO: 30688933 NR Description: squamosa-promoter binding protein -related
  misc_feature (1)..(365): Homolog of NCBI NO: 25352586 NR Description: squamosa promoter binding protein homolog 9 - Arabidopsis thaliana >gi|5931675|emb|CAB56591.1| squamosa
  misc_feature (1)..(365): Homolog of NCBI NO: 15227896 NR Description: putative squamosa-promoter binding protein; id: At2g42200.1, supported by cDNA: gi_15028114 [Arabidopsis
  misc_feature (1)..(365): Homolog of NCBI NO: 15028115 NR Description: putative squamosa-promoter binding protein
  misc_feature (12)..(365): Homolog of NCBI NO: 15230904 NR Description: squamosa promoter-binding protein homolog; id: At3g57920.1, supported by cDNA: 247919. [Arabidopsis
  misc_feature (23)..(271): Homolog of NCBI NO: 25352584 NR Description: squamosa promoter binding protein-homolog 4 - garden snapdragon (fragment) >gi|5931641|emb|CAB56569.1|
  misc_feature (43)..(365): Homolog of NCBI NO: 25352582 NR Description: squamosa promoter binding protein-homolog 5 - garden snapdragon (fragment) >gi|5931643|emb|CAB56570.1|
  misc_feature (14)..(305): Homolog of NCBI NO: 28411864 NR Description: putative SBP-domain protein 5 [Oryza sativa
  misc_feature (71)..(332): Homolog of NCBI NO: 5931786 NR Description: SBP-domain protein 5 [Zea mays]
  misc_feature (11)..(253): Homolog of NCBI NO: 25456646 NR Description: squamosa promoter binding protein 2 [imported] -
MGSNSGPGHGPGQAESGGSSTESSSFSGGLMFGQKIYFEDGGGGSGSSSSGGRSNRRVRGGGSGQSGQIPRCQVEGCGMDLTNAKGYYSRHRVCGVHSKTPKVTVAGIEQRFCQQCSRFHQLPEFDLEKRSCRRRLAGHNERRRKPQPASLSVLASRYGRIAPSLYENGDAGMNGSFLGNQEIGWPSSRTLDTRVMRRPVSSPSWQINPMNVFSQGSVGGGGTSFSSPEIMDTKLESYKGIGDSNCALSLLSNPHQPHDNNNNNNNNNNNNNNTWRASSGFGPMTVTMAQPPPAPSQHQYLNPPWVFKDNDNDMSPVLNLGQISSGTAMGEFELSDHHHQSRRQYMEDENTRAYDSSSHHTNWSL

SEQ ID NO: 85049 - protein, 335 aa, Arabidopsis thaliana
  peptide (1)..(335): Ceres Seq. ID no. 12678504
  misc_feature (41)..(119): Pfam Name: SBP domain Pfam Description: SBP domain
  misc_feature (1)..(335): Homolog of NCBI NO: 30688933 NR Description: squamosa-promoter binding protein -related
  misc_feature (1)..(335): Homolog of NCBI NO: 25352586 NR Description: squamosa promoter binding protein homolog 9 - Arabidopsis thaliana >gi|5931675|emb|CAB56591.1| squamosa
  misc_feature (1)..(335): Homolog of NCBI NO: 15227896 NR Description: putative squamosa-promoter binding protein; id: At2g42200.1, supported by cDNA: gi_15028114 [Arabidopsis
  misc_feature (1)..(335): Homolog of NCBI NO: 15028115 NR Description: putative squamosa-promoter binding protein
  misc_feature (1)..(335): Homolog of NCBI NO: 15230904 NR Description: squamosa promoter-binding protein homolog; id: At3g57920.1, supported by cDNA: 247919. [Arabidopsis
  misc_feature (1)..(241): Homolog of NCBI NO: 25352584 NR Description: squamosa promoter binding protein-homolog 4 - garden snapdragon (fragment) >gi|5931641|emb|CAB56569.1|
  misc_feature (13)..(335): Homolog of NCBI NO: 25352582 NR Description: squamosa promoter binding protein-homolog 5 - garden snapdragon (fragment) >gi|5931643|emb|CAB56570.1|
  misc_feature (1)..(275): Homolog of NCBI NO: 28411864 NR Description: putative SBP-domain protein 5 [Oryza sativa
  misc_feature (41)..(302): Homolog of NCBI NO: 5931786 NR Description: SBP-domain protein 5 [Zea mays]
  misc_feature (1)..(223): Homolog of NCBI NO: 25456646 NR Description: squamosa promoter binding protein 2 [imported] -
MFGQKIYFEDGGGGSGSSSSGGRSNRRVRGGGSGQSGQIPRCQVEGCGMDLTNAKGYYSRHRVCGVHSKTPKVTVAGIEQRFCQQCSRFHQLPEFDLEKRSCRRRLAGHNERRRKPQPASLSVLASRYGRIAPSLYENGDAGMNGSFLGNQEIGWPSSRTLDTRVMRRPVSSPSWQINPMNVFSQGSVGGGGTSFSSPEIMDTKLESYKGIGDSNCALSLLSNPHQPHDNNNNNNNNNNNNNNTWRASSGFGPMTVTMAQPPPAPSQHQYLNPPWVFKDNDNDMSPVLNLGQISSGTAMGEFELSDHHHQSRRQYMEDENTRAYDSSSHHTNWSL

SEQ ID NO: 85050 - DNA, 2013 bp, Arabidopsis thaliana
  misc_feature (1)..(2013): Ceres Seq. ID no. 12678525
  misc_feature: MA Experiment ID: 20000496 Result: Down-regulated in Transcription
  misc_feature: MA Experiment 20000496 PARAMETER Experiment Name: At_Guard_Cells_P Parameter: Harvest Date Value: 7/19/2002
  misc_feature: MA Experiment 20000496 PARAMETER Experiment Name: At_Guard_Cells_P Parameter: Organism Value: Canola
  misc_feature: MA Experiment 20000496 PARAMETER Experiment Name: At_Guard_Cells_P Parameter: Tissue Value: Guard Cells vs. Leaves
aatctaatctagggtttctagtcacttgaagcttctcttaaaaaacctgtctcactcctcgtcaacctcttcctctcccgctgtcgccaagattgaatcttttttcagttgtggcttcaccggataataaggaattcagtaagagataagttcatcctgacaacatggagaccaagaatgagaattctgatgtttcacgggcagaggagtttaaaagtcaggccaacgaagcttttaaaggtcacaaatactccagtgctattgatctatatacaaaagctattgaactcaacagcaacaacgctgtgtattgggcaaatcgtgcatttgctcacacaaaactggaggaatatggcagtgcaatacaggatgcatcgaaggccattgaagttgattcaagatactctaagggctattacaggcgtggtgctgcgtatcttgccatgggaaaatttaaggatgccttgaaggacttccaacaggtaaaaaggctttctcctaatgaccctgatgccacaagaaagctaaaggaatgtgagaaagcagtgatgaaactcaaatttgaagaagcaatctctgtgccagtatctgaaaggcgttcagtagctgagtccattgacttccatacaatagaggttgagccacaatattctggtgctagaattgagggagaggaagttaccttagattttgtgaaaacgatgatggaggattttaagaaccaaaaaacattgcataaacggtatgcctatcaaatcgtcttacagactaggcaaatcttgctagcactgccttctcttgttgatataagtgttccacatggcaaacatatcactgtttgcggtgacgttcatggtcagttctacgatcttctcaatatctttgagcttaatggcctcccttcggaggagaacccatacctatttaatggcgactttgtggacagaggctcattctccgttgagatcatcctcactttgtttgctttcaagtgcatgtgcccatcatccatatatctagccagaggaaaccatgaaagcaagagcatgaacaaaatttatggttttgagggtgaggttcggtccaagttgagtgaaaaattcgtggatctctttgctgaagttttctgttacctcccgttggctcatgttataaatgggaaggtcttcgtggtacatggaggtcttttcagtgttgacggcgtgaaactctcagacatcagagccattgacagattctgtgagccaccagaggaaggactaatgtgtgaactattgtggagtgatcctcaacctctccctggaagaggcccaagcaagcgaggagttggtctatcatttggtggagatgtgacaaagaggtttttgcaagataacaatttagatttgttggtccggtcacatgaagtaaaagatgaaggttatgaggttgaacatgacggtaaactcataactgtcttctctgcgccaaattactgtgatcagatgggtaataagggagccttcattcgttttgaagctcctgatatgaagccaaacattgttacattctcagcagtgcctcatccggatgtgaagcctatggcatatgcaaacaactttctcaggatgttcaactaaccagcaaaaagcttcttctactcaaaatgctattctaaagactcaagaccagaagtggttcagaaacataatgatataagtttttttttccctttatcttctgcagttttttcatgttgttccagaaaagggaggccatgataattaaaggtacagtatccggatttgatcgttttttttcttcttccttcttttctgataaagattttcactcttcctttaagcttatccagcaacttttgtcccttttgtcttatgttgtaagagggggtaatgtatcattcttattttagatgaaaatcttgtgattactcaacaaaagagtgaccaaatgaccccccaaaactttgtacttaaaatggtttcttgaatcaaaaatcaaaaggtgtttctt

SEQ ID NO: 85051 - protein, 484 aa, Arabidopsis thaliana; identical to SEQ ID NO: 76043
  peptide (1)..(484): Ceres Seq. ID no. 12678526
  misc_feature (221)..(417): Pfam Name: Calcineurin-like phosphoesterase Pfam Description: Calcineurin-like phosphoesterase
  misc_feature (1)..(484): Homolog of NCBI NO: 18406066 NR Description: putative phosphoprotein phosphatase; protein id: supported by cDNA: gi_16930440 [Arabidopsis thaliana] At2g42810/F7D19.19 [Arabidopsis thaliana]
  misc_feature (157)..(484): Homolog of NCBI NO: 28141302 NR Description: type 5 protein serine/threonine phosphatase 60
  misc_feature (1)..(163): Homolog of NCBI NO: 28141302 NR Description: type 5 protein serine/threonine phosphatase 60
  misc_feature (6)..(484): Homolog of NCBI NO: 24954813 NR Description: type 5 serine/threonine phosphatase 55 kDa [Lycopersicon esculentum] >gi|28141084|gb|AAO26214.1| type 5 serine/threonine phosphatase 55 kDa isoform [Lycopersicon
  misc_feature (156)..(484): Homolog of NCBI NO: 28141004 NR Description: type 5 protein serine/threonine phosphatase 62 isoform [Lycopersicon esculentum] >gi|28141085|gb|AAO26215.1|
  misc_feature (6)..(160): Homolog of NCBI NO: 28141004 NR Description: type 5 protein serine/threonine phosphatase 62 isoform [Lycopersicon esculentum] >gi|28141085|gb|AAO26215.1|
  misc_feature (1)..(484): Homolog of NCBI NO: 25289020 NR Description: phosphoprotein phosphatase (EC 3.1.3.16) At2g42810
  misc_feature (160)..(484): Homolog of NCBI NO: 19347799 NR Description: putative phosphoprotein phosphatase [Arabidopsis
  misc_feature (1)..(482): Homolog of NCBI NO: 1083755 NR Description: phosphoprotein phosphatase (EC 3.1.3.16) PPT - rat
  misc_feature (1)..(482): Homolog of NCBI NO: 13929024 NR Description: protein phosphatase 5, catalytic subunit [Rattus >gi|1709745|sp|P53042|PPP5_RAT Serine/threonine protein

SEQ ID NO: 85052 - protein, 391 aa, Arabidopsis thaliana; identical to SEQ ID NO: 76044
  peptide (1)..(391): Ceres Seq. ID no. 12678527
  misc_feature (128)..(324): Pfam Name: Calcineurin-like phosphoesterase Pfam Description: Calcineurin-like phosphoesterase
  misc_feature (1)..(391): Homolog of NCBI NO: 18406066 NR Description: putative phosphoprotein phosphatase; protein id: supported by cDNA: gi_16930440 [Arabidopsis thaliana] At2g42810/F7D19.19 [Arabidopsis thaliana]
  misc_feature (64)..(391): Homolog of NCBI NO: 28141302 NR Description: type 5 protein serine/threonine phosphatase 60
  misc_feature (1)..(70): Homolog of NCBI NO: 28141302 NR Description: type 5 protein serine/threonine phosphatase 60
  misc_feature (1)..(391): Homolog of NCBI NO: 24954813 NR Description: type 5 serine/threonine phosphatase 55 kDa [Lycopersicon esculentum] >gi|28141084|gb|AAO26214.1| type 5 serine/threonine phosphatase 55 kDa isoform [Lycopersicon
  misc_feature (63)..(391): Homolog of NCBI NO: 28141004 NR Description: type 5 protein serine/threonine phosphatase 62 isoform [Lycopersicon esculentum] >gi|28141085|gb|AAO26215.1|
  misc_feature (1)..(67): Homolog of NCBI NO: 28141004 NR Description: type 5 protein serine/threonine phosphatase 62 isoform [Lycopersicon esculentum] >gi|28141085|gb|AAO26215.1|
  misc_feature (1)..(391): Homolog of NCBI NO: 25289020 NR Description: phosphoprotein phosphatase (EC 3.1.3.16) At2g42810
  misc_feature (67)..(391): Homolog of NCBI NO: 19347799 NR Description: putative phosphoprotein phosphatase [Arabidopsis
  misc_feature (1)..(389): Homolog of NCBI NO: 1083755 NR Description: phosphoprotein phosphatase (EC 3.1.3.16) PPT - rat
  misc_feature (1)..(389): Homolog of NCBI NO: 13929024 NR Description: protein phosphatase 5, catalytic subunit [Rattus >gi|1709745|sp|P53042|PPP5_RAT Serine/threonine protein

SEQ ID NO: 85053 - protein, 356 aa, Arabidopsis thaliana; identical to SEQ ID NO: 76045
  peptide (1)..(356): Ceres Seq. ID no. 12678528
  misc_feature (93)..(289): Pfam Name: Calcineurin-like phosphoesterase Pfam Description: Calcineurin-like phosphoesterase
  misc_feature (1)..(356): Homolog of NCBI NO: 18406066 NR Description: putative phosphoprotein phosphatase; protein id: supported by cDNA: gi_16930440 [Arabidopsis thaliana] At2g42810/F7D19.19 [Arabidopsis thaliana]
  misc_feature (29)..(356): Homolog of NCBI NO: 28141302 NR Description: type 5 protein serine/threonine phosphatase 60
  misc_feature (1)..(35): Homolog of NCBI NO: 28141302 NR Description: type 5 protein serine/threonine phosphatase 60
  misc_feature (1)..(356): Homolog of NCBI NO: 24954813 NR Description: type 5 serine/threonine phosphatase 55 kDa [Lycopersicon esculentum] >gi|28141084|gb|AAO26214.1| type 5 serine/threonine phosphatase 55 kDa isoform [Lycopersicon
  misc_feature (28)..(356): Homolog of NCBI NO: 28141004 NR Description: type 5 protein serine/threonine phosphatase 62 isoform [Lycopersicon esculentum] >gi|28141085|gb|AAO26215.1|
  misc_feature (1)..(32): Homolog of NCBI NO: 28141004 NR Description: type 5 protein serine/threonine phosphatase 62 isoform [Lycopersicon esculentum] >gi|28141085|gb|AAO26215.1|
  misc_feature (1)..(356): Homolog of NCBI NO: 25289020 NR Description: phosphoprotein phosphatase (EC 3.1.3.16) At2g42810
  misc_feature (32)..(356): Homolog of NCBI NO: 19347799 NR Description: putative phosphoprotein phosphatase [Arabidopsis
  misc_feature (1)..(354): Homolog of NCBI NO: 1083755 NR Description: phosphoprotein phosphatase (EC 3.1.3.16) PPT - rat
  misc_feature (1)..(354): Homolog of NCBI NO: 13929024 NR Description: protein phosphatase 5, catalytic subunit [Rattus >gi|1709745|sp|P53042|PPP5_RAT Serine/threonine protein

SEQ ID NO: 85054 - DNA, 1240 bp, Arabidopsis thaliana
  misc_feature (1)..(1240): Ceres Seq. ID no. 12678568
  misc_feature: MA Experiment ID: 108433 Result: Down-regulated in Transcription
  misc_feature: MA Experiment 108433 PARAMETER Experiment Name: At_rhl_Mutant2_cDNA_P Parameter: Age (day) Value: 7
  misc_feature: MA Experiment 108433 PARAMETER Experiment Name: At_rhl_Mutant2_cDNA_P Parameter: Organism Value: A. thaliana
  misc_feature: MA Experiment 108433 PARAMETER Experiment Name: At_rhl_Mutant2_cDNA_P Parameter: Plant Line Value: rhl Mutant vs. wt landsburg
  misc_feature: MA Experiment 108433 PARAMETER Experiment Name: At_rhl_Mutant2_cDNA_P Parameter: Tissue Value: Roots
  misc_feature: MA Experiment ID: 108434 Result: Down-regulated in Transcription
  misc_feature: MA Experiment 108434 PARAMETER Experiment Name: At_Root_Tips_cDNA_P Parameter: Tissue Value: Root Tips
  misc_feature: MA Experiment ID: 108461 Result: Up-regulated in Transcription
  misc_feature: MA Experiment 108461 PARAMETER Experiment Name: At_Germinating_Seeds_cDNA_P Parameter: Age (day) Value: 1 vs. 0
  misc_feature: MA Experiment 108461 PARAMETER Experiment Name: At_Germinating_Seeds_cDNA_P Parameter: Tissue Value: Germinating Seeds
  misc_feature: MA Experiment ID: 108462 Result: Up-regulated in Transcription
  misc_feature: MA Experiment 108462 PARAMETER Experiment Name: At_Germinating_Seeds_cDNA_P Parameter: Age (day) Value: 2 vs. 0
  misc_feature: MA Experiment 108462 PARAMETER Experiment Name: At_Germinating_Seeds_cDNA_P Parameter: Tissue Value: Germinating Seeds
  misc_feature: MA Experiment ID: 108463 Result: Up-regulated in Transcription
  misc_feature: MA Experiment 108463 PARAMETER Experiment Name: At_Germinating_Seeds_cDNA_P Parameter: Age (day) Value: 3 vs. 0
  misc_feature: MA Experiment 108463 PARAMETER Experiment Name: At_Germinating_Seeds_cDNA_P Parameter: Tissue Value: Germinating Seeds
  misc_feature: MA Experiment ID: 108464 Result: Up-regulated in Transcription
  misc_feature: MA Experiment 108464 PARAMETER Experiment Name: At_Germinating_Seeds_cDNA_P Parameter: Age (day) Value: 4 vs. 0
  misc_feature: MA Experiment 108464 PARAMETER Experiment Name: At_Germinating_Seeds_cDNA_P Parameter: Tissue Value: Germinating Seeds
  misc_feature: MA Experiment ID: 108561 Result: Down-regulated in Transcription
  misc_feature: MA Experiment 108561 PARAMETER Experiment Name: At_100uM_ABA_cDNA_P Parameter: Timepoint (hr) Value: 6
  misc_feature: MA Experiment 108561 PARAMETER Experiment Name: At_100uM_ABA_cDNA_P Parameter: Tissue Value: Aerial
  misc_feature: MA Experiment 108561 PARAMETER Experiment Name: At_100uM_ABA_cDNA_P Parameter: Treatment Value: 100uM ABA vs. No Treatment
  misc_feature: MA Experiment ID: 108573 Result: Down-regulated in Transcription
  misc_feature: MA Experiment 108573 PARAMETER Experiment Name: At_Drought_cDNA_P Parameter: Timepoint (hr) Value: 6
  misc_feature: MA Experiment 108573 PARAMETER Experiment Name: At_Drought_cDNA_P Parameter: Tissue Value: Aerial
  misc_feature: MA Experiment 108573 PARAMETER Experiment Name: At_Drought_cDNA_P Parameter: Treatment Value: Drought vs. No Drought
  misc_feature: MA Experiment ID: 108574 Result: Up-regulated in Transcription
  misc_feature: MA Experiment 108574 PARAMETER Experiment Name: At_Wounding__cDNA_P Parameter: Timepoint (hr) Value: 1
  misc_feature: MA Experiment 108574 PARAMETER Experiment Name: At_Wounding__cDNA_P Parameter: Tissue Value: Aerial
  misc_feature: MA Experiment 108574 PARAMETER Experiment Name: At_Wounding__cDNA_P Parameter: Treatment Value: Wounding vs. No Wounding
  misc_feature: MA Experiment ID: 108594 Result: Up-regulated in Transcription
  misc_feature: MA Experiment 108594 PARAMETER Experiment Name: At_Ler-rhl_Root_cDNA_P Parameter: Plant Line Value: null
  misc_feature: MA Experiment ID: 20000070 Result: Down-regulated in Transcription
  misc_feature: MA Experiment 20000070 PARAMETER Experiment Name: At_100uM_ABA_Mutants_cDNA_P Parameter: Plant Line Value: CS24
  misc_feature: MA Experiment 20000070 PARAMETER Experiment Name: At_100uM_ABA_Mutants_cDNA_P Parameter: Timepoint (hr) Value: 6
  misc_feature: MA Experiment 20000070 PARAMETER Experiment Name: At_100uM_ABA_Mutants_cDNA_P Parameter: Tissue Value: Aerial
  misc_feature: MA Experiment 20000070 PARAMETER Experiment Name: At_100uM_ABA_Mutants_cDNA_P Parameter: Treatment Value: 100uM ABA vs. No Treatment
  misc_feature: MA Experiment ID: 20000173 Result: Down-regulated in Transcription
  misc_feature: MA Experiment 20000173 PARAMETER Experiment Name: At_42deg_Heat_P Parameter: Age (day) Value: 14
  misc_feature: MA Experiment 20000173 PARAMETER Experiment Name: At_42deg_Heat_P Parameter: Organism Value: A. thaliana
  misc_feature: MA Experiment 20000173 PARAMETER Experiment Name: At_42deg_Heat_P Parameter: Plant Line Value: WS
  misc_feature: MA Experiment 20000173 PARAMETER Experiment Name: At_42deg_Heat_P Parameter: Temperature (deg C) Value: 42 vs. 22
  misc_feature: MA Experiment 20000173 PARAMETER Experiment Name: At_42deg_Heat_P Parameter: Timepoint (hr) Value: 6
  misc_feature: MA Experiment 20000173 PARAMETER Experiment Name: At_42deg_Heat_P Parameter: Tissue Value: Aerial
  misc_feature: MA Experiment ID: 20000180 Result: Up-regulated in Transcription
  misc_feature: MA Experiment 20000180 PARAMETER Experiment Name: At_Germinating_Seeds_P Parameter: Age (hr) Value: 24 vs. 0
  misc_feature: MA Experiment 20000180 PARAMETER Experiment Name: At_Germinating_Seeds_P Parameter: Tissue Value: Germinating Seeds
  misc_feature: MA Experiment ID: 20000185 Result: Up-regulated in Transcription
  misc_feature: MA Experiment 20000185 PARAMETER Experiment Name: At_Roots__P Parameter: Age (day) Value: 7 vs. 21
  misc_feature: MA Experiment 20000185 PARAMETER Experiment Name: At_Roots__P Parameter: Organism Value: A. thaliana
  misc_feature: MA Experiment 20000185 PARAMETER Experiment Name: At_Roots__P Parameter: Tissue Value: Roots vs. Whole Plant
  misc_feature: MA Experiment ID: 20000227 Result: Down-regulated in Transcription
  misc_feature: MA Experiment 20000227 PARAMETER Experiment Name: At_Root-Tips-vs-Tops_P Parameter: Tissue Value: Root Tips vs. Root Tops
  misc_feature: MA Experiment ID: 20000269 Result: Up-regulated in Transcription
  misc_feature: MA Experiment 20000269 PARAMETER Experiment Name: At_1mM_KNO3_L-vs-H_Roots_P Parameter: Age (day) Value: 7,10,12
  misc_feature: MA Experiment 20000269 PARAMETER Experiment Name: At_1mM_KNO3_L-vs-H_Roots_P Parameter: Organism Value: A. thaliana
  misc_feature: MA Experiment 20000269 PARAMETER Experiment Name: At_1mM_KNO3_L-vs-H_Roots_P Parameter: Plant Line Value: WS
  misc_feature: MA Experiment 20000269 PARAMETER Experiment Name: At_1mM_KNO3_L-vs-H_Roots_P Parameter: Timepoint (day) Value: 7,10,12
  misc_feature: MA Experiment 20000269 PARAMETER Experiment Name: At_1mM_KNO3_L-vs-H_Roots_P Parameter: Tissue Value: Roots
  misc_feature: MA Experiment 20000269 PARAMETER Experiment Name: At_1mM_KNO3_L-vs-H_Roots_P Parameter: Treatment Value: 1mM KNO3 vs. 50mM KNO3
  misc_feature: MA Experiment ID: 20000436 Result: Down-regulated in Transcription
  misc_feature: MA Experiment 20000436 PARAMETER Experiment Name: At_Drought_P Parameter: Age (day) Value: 7
  misc_feature: MA Experiment 20000436 PARAMETER Experiment Name: At_Drought_P Parameter: Organism Value: A. thaliana
  misc_feature: MA Experiment 20000436 PARAMETER Experiment Name: At_Drought_P Parameter: Plant Line Value: WS
  misc_feature: MA Experiment 20000436 PARAMETER Experiment Name: At_Drought_P Parameter: Timepoint (hr) Value: 12
  misc_feature: MA Experiment 20000436 PARAMETER Experiment Name: At_Drought_P Parameter: Tissue Value: Whole Plant
  misc_feature: MA Experiment 20000436 PARAMETER Experiment Name: At_Drought_P Parameter: Treatment Value: Drought vs. No Drought
  misc_feature: MA Experiment ID: 20000437 Result: Down-regulated in Transcription
  misc_feature: MA Experiment 20000437 PARAMETER Experiment Name: At_Drought_P Parameter: Age (day) Value: 8
  misc_feature: MA Experiment 20000437 PARAMETER Experiment Name: At_Drought_P Parameter: Organism Value: A. thaliana
  misc_feature: MA Experiment 20000437 PARAMETER Experiment Name: At_Drought_P Parameter: Plant Line Value: WS
  misc_feature: MA Experiment 20000437 PARAMETER Experiment Name: At_Drought_P Parameter: Timepoint (hr) Value: 24
  misc_feature: MA Experiment 20000437 PARAMETER Experiment Name: At_Drought_P Parameter: Tissue Value: Whole Plant
  misc_feature: MA Experiment 20000437 PARAMETER Experiment Name: At_Drought_P Parameter: Treatment Value: Drought vs. No Drought
  misc_feature: MA Experiment ID: 20000439 Result: Up-regulated in Transcription
  misc_feature: MA Experiment 20000439 PARAMETER Experiment Name: At_Roots__P Parameter: Age (day) Value: 14 vs. 21
  misc_feature: MA Experiment 20000439 PARAMETER Experiment Name: At_Roots__P Parameter: Organism Value: A. thaliana
  misc_feature: MA Experiment 20000439 PARAMETER Experiment Name: At_Roots__P Parameter: Tissue Value: Roots vs. Whole Plant
  misc_feature: MA Experiment ID: 20000441 Result: Up-regulated in Transcription
  misc_feature: MA Experiment 20000441 PARAMETER Experiment Name: At_1uM_BR-BRZ__P Parameter: Tissue Value: Shoot Apices
  misc_feature: MA Experiment 20000441 PARAMETER Experiment Name: At_1uM_BR-BRZ__P Parameter: Treatment Value: 1uM BR vs. No Treatment
  misc_feature: MA Experiment ID: 20000443 Result: Up-regulated in Transcription
  misc_feature: MA Experiment 20000443 PARAMETER Experiment Name: At_1uM_BR-BRZ__P Parameter: Tissue Value: Shoot Apices
  misc_feature: MA Experiment 20000443 PARAMETER Experiment Name: At_1uM_BR-BRZ__P Parameter: Treatment Value: 1uM BRZ vs. No Treatment
  misc_feature: MA Experiment ID: 20001554 Result: Down-regulated in Transcription
  misc_feature: MA Experiment 20001554 PARAMETER Experiment Name: At_Drought_Soil_Dry_P Parameter: Age (day) Value: 21
  misc_feature: MA Experiment 20001554 PARAMETER Experiment Name: At_Drought_Soil_Dry_P Parameter: Organism Value: A. thaliana
  misc_feature: MA Experiment 20001554 PARAMETER Experiment Name: At_Drought_Soil_Dry_P Parameter: Plant Line Value: WS
  misc_feature: MA Experiment 20001554 PARAMETER Experiment Name: At_Drought_Soil_Dry_P Parameter: Post Timepoint (hr) Value: None
  misc_feature: MA Experiment 20001554 PARAMETER Experiment Name: At_Drought_Soil_Dry_P Parameter: Post-Treatment Value: None
  misc_feature: MA Experiment 20001554 PARAMETER Experiment Name: At_Drought_Soil_Dry_P Parameter: Timepoint (day) Value: 7
  misc_feature: MA Experiment 20001554 PARAMETER Experiment Name: At_Drought_Soil_Dry_P Parameter: Treatment Value: Drought vs. No Drought
  misc_feature: MA Experiment ID: 20001556 Result: Down-regulated in Transcription
  misc_feature: MA Experiment 20001556 PARAMETER Experiment Name: At_Drought_Soil_Dry_P Parameter: Age (day) Value: 26
  misc_feature: MA Experiment 20001556 PARAMETER Experiment Name: At_Drought_Soil_Dry_P Parameter: Organism Value: A. thaliana
  misc_feature: MA Experiment 20001556 PARAMETER Experiment Name: At_Drought_Soil_Dry_P Parameter: Plant Line Value: WS
  misc_feature: MA Experiment 20001556 PARAMETER Experiment Name: At_Drought_Soil_Dry_P Parameter: Post Timepoint (hr) Value: None
  misc_feature: MA Experiment 20001556 PARAMETER Experiment Name: At_Drought_Soil_Dry_P Parameter: Post-Treatment Value: None
  misc_feature: MA Experiment 20001556 PARAMETER Experiment Name: At_Drought_Soil_Dry_P Parameter: Timepoint (day) Value: 12
  misc_feature: MA Experiment 20001556 PARAMETER Experiment Name: At_Drought_Soil_Dry_P Parameter: Treatment Value: Drought vs. No Drought
  misc_feature: MA Experiment ID: 20001557 Result: Up-regulated in Transcription
  misc_feature: MA Experiment 20001557 PARAMETER Experiment Name: At_Drought_Soil_Dry_P Parameter: Age (day) Value: 27
  misc_feature: MA Experiment 20001557 PARAMETER Experiment Name: At_Drought_Soil_Dry_P Parameter: Organism Value: A. thaliana
  misc_feature: MA Experiment 20001557 PARAMETER Experiment Name: At_Drought_Soil_Dry_P Parameter: Plant Line Value: WS
  misc_feature: MA Experiment 20001557 PARAMETER Experiment Name: At_Drought_Soil_Dry_P Parameter: Post Timepoint (hr) Value: 3
  misc_feature: MA Experiment 20001557 PARAMETER Experiment Name: At_Drought_Soil_Dry_P Parameter: Post-Treatment Value: Re-Water vs. No Drought
  misc_feature: MA Experiment 20001557 PARAMETER Experiment Name: At_Drought_Soil_Dry_P Parameter: Timepoint (day) Value: 13
  misc_feature: MA Experiment 20001557 PARAMETER Experiment Name: At_Drought_Soil_Dry_P Parameter: Treatment Value: Drought vs. No Drought
  misc_feature: MA Experiment ID: 20001558 Result: Up-regulated in Transcription
  misc_feature: MA Experiment 20001558 PARAMETER Experiment Name: At_Drought_Soil_Dry_P Parameter: Age (day) Value: 27
  misc_feature: MA Experiment 20001558 PARAMETER Experiment Name: At_Drought_Soil_Dry_P Parameter: Organism Value: A. thaliana
  misc_feature: MA Experiment 20001558 PARAMETER Experiment Name: At_Drought_Soil_Dry_P Parameter: Plant Line Value: WS
  misc_feature: MA Experiment 20001558 PARAMETER Experiment Name: At_Drought_Soil_Dry_P Parameter: Post Timepoint (hr) Value: 6
  misc_feature: MA Experiment 20001558 PARAMETER Experiment Name: At_Drought_Soil_Dry_P Parameter: Post-Treatment Value: Re-Water vs. No Drought
  misc_feature: MA Experiment 20001558 PARAMETER Experiment Name: At_Drought_Soil_Dry_P Parameter: Timepoint (day) Value: 13
  misc_feature: MA Experiment 20001558 PARAMETER Experiment Name: At_Drought_Soil_Dry_P Parameter: Treatment Value: Drought vs. No Drought
  misc_feature: MA Experiment ID: 20001560 Result: Up-regulated in Transcription
  misc_feature: MA Experiment 20001560 PARAMETER Experiment Name: At_Drought_Soil_Dry_P Parameter: Age (day) Value: 28
  misc_feature: MA Experiment 20001560 PARAMETER Experiment Name: At_Drought_Soil_Dry_P Parameter: Organism Value: A. thaliana
  misc_feature: MA Experiment 20001560 PARAMETER Experiment Name: At_Drought_Soil_Dry_P Parameter: Plant Line Value: WS
  misc_feature: MA Experiment 20001560 PARAMETER Experiment Name: At_Drought_Soil_Dry_P Parameter: Post Timepoint (hr) Value: None
  misc_feature: MA Experiment 20001560 PARAMETER Experiment Name: At_Drought_Soil_Dry_P Parameter: Post-Treatment Value: None
  misc_feature: MA Experiment 20001560 PARAMETER Experiment Name: At_Drought_Soil_Dry_P Parameter: Timepoint (day) Value: 14
  misc_feature: MA Experiment 20001560 PARAMETER Experiment Name: At_Drought_Soil_Dry_P Parameter: Treatment Value: Drought vs. No Drought
acacatatacattcacattactaatctctcaagatttcacaattttcttgtgattttctctcagtttcttatttcgtttcataacatggatgccatgagtagcgtagacgagagctctacaactacagattccattccggcgagaaagtcatcgtctccggcgagtttactatatagaatgggaagcggaacaagcgtggtacttgattcagagaacggtgtcgaagtcgaagtcgaagccgaatcaagaaagcttccttcttcaagattcaaaggtgttgttcctcaaccaaatggaagatggggagctcagatttacgagaaacatcaacgcgtgtggcttggtactttcaacgaggaagacgaagcagctcgtgcttacgacgtcgcggctcaccgtttccgtggccgcgatgccgttactaatttcaaagacacgacgttcgaagaagaggttgagttcttaaacgcgcattcgaaatcagagatcgtagatatgttgagaaaacacacttacaaagaagagttagaccaaaggaaacgtaaccgtgacggtaacggaaaagagacgacggcgtttgctttggcttcgatggtggttatgacggggtttaaaacggcggagttactgtttgagaaaacggtaacgccaagtgacgtcgggaaactaaaccgtttagttataccaaaacaccaagcggagaaacattttccgttaccgttaggtaataataacgtctccgttaaaggtatgctgttgaatttcgaagacgttaacgggaaagtgtggaggttccgttactcttattggaatagtagtcaaagttatgtgttgaccaaaggttggagtagattcgttaaagagaagagactttgtgctggtgatttgatcagttttaaaagatccaacgatcaagatcaaaaattctttatcgggtggaaatcgaaatccgggttggatctagagacgggtcgggttatgagattgtttggggttgatatttctttaaacgccgtcgttgtagtgaaggaaacaacggaggtgttaatgtcgtcgttaaggtgtaagaagcaacgagttttgtaataacaatttaacaacttgggaaagaaaaaaaagctttttgattttaatttctcttcaacgttaatcttgctgagattatttatgttgtaagttgtaacaagtggaaaaaattaattaggtgtcaaacaaatcttgtgttaatattctttgtat

SEQ ID NO: 85055 - protein, 361 aa, Arabidopsis thaliana
  peptide (1)..(361): Ceres Seq. ID no. 12678569
  misc_feature (210)..(319): Pfam Name: B3 DNA binding domain Pfam Description: B3 DNA binding domain
  misc_feature (29)..(361): Homolog of NCBI NO: 15230871 NR Description: AP2 domain transcription factor RAV, putative;
  misc_feature (29)..(361): Homolog of NCBI NO: 21593532 NR Description: AP2 domain transcription factor [Arabidopsis
  misc_feature (33)..(360): Homolog of NCBI NO: 15222217 NR Description: DNA-binding protein (RAV1); protein id: supported by cDNA: gi_17380761, supported by cDNA: gi_20259028,
  misc_feature (29)..(361): Homolog of NCBI NO: 18409138 NR Description: AP2 domain protein RAP2.8 (RAV2); protein id: supported by cDNA: 19561., supported by cDNA: gi_13430799,
  misc_feature (29)..(361): Homolog of NCBI NO: 21554039 NR Description: putative RAV2-like DNA-binding protein
  misc_feature (47)..(361): Homolog of NCBI NO: 2281641 NR Description: AP2 domain containing protein RAP2.8 [Arabidopsis
  misc_feature (33)..(361): Homolog of NCBI NO: 15222622 NR Description: DNA-binding protein RAV2, putative; protein id: supported by cDNA: gi_15810260, supported by cDNA: gi_20259538
  misc_feature (84)..(344): Homolog of NCBI NO: 34911404 NR Description: DNA-binding protein RAV2-like [Oryza sativa
  misc_feature (86)..(335): Homolog of NCBI NO: 34895676 NR Description: putative DNA binding protein RAV2 [Oryza sativa
  misc_feature (68)..(299): Homolog of NCBI NO: 15223618 NR Description: RAV-like DNA-binding protein, putative; protein
HIYIHITNLSRFHNFLVIFSQFLISFHNMDAMSSVDESSTTTDSIPARKSSSPASLLYRMGSGTSVVLDSENGVEVEVEAESRKLPSSRFKGVVPQPNGRWGAQIYEKHQRVWLGTFNEEDEAARAYDVAAHRFRGRDAVTNFKDTTFEEEVEFLNAHSKSEIVDMLRKHTYKEELDQRKRNRDGNGKETTAFALASMVVMTGFKTAELLFEKTVTPSDVGKLNRLVIPKHQAEKHFPLPLGNNNVSVKGMLLNFEDVNGKVWRFRYSYWNSSQSYVLTKGWSRFVKEKRLCAGDLISFKRSNDQDQKFFIGWKSKSGLDLETGRVMRLFGVDISLNAVVVVKETTEVLMSSLRCKKQRVL

SEQ ID NO: 85056 - protein, 333 aa, Arabidopsis thaliana
  peptide (1)..(333): Ceres Seq. ID no. 12678570
  misc_feature (182)..(291): Pfam Name: B3 DNA binding domain Pfam Description: B3 DNA binding domain
  misc_feature (1)..(333): Homolog of NCBI NO: 15230871 NR Description: AP2 domain transcription factor RAV, putative;
  misc_feature (1)..(333): Homolog of NCBI NO: 21593532 NR Description: AP2 domain transcription factor [Arabidopsis
  misc_feature (5)..(332): Homolog of NCBI NO: 15222217 NR Description: DNA-binding protein (RAV1); protein id: supported by cDNA: gi_17380761, supported by cDNA: gi_20259028,
  misc_feature (1)..(333): Homolog of NCBI NO: 18409138 NR Description: AP2 domain protein RAP2.8 (RAV2); protein id: supported by cDNA: 19561., supported by cDNA: gi_13430799,
  misc_feature (1)..(333): Homolog of NCBI NO: 21554039 NR Description: putative RAV2-like DNA-binding protein
  misc_feature (19)..(333): Homolog of NCBI NO: 2281641 NR Description: AP2 domain containing protein RAP2.8 [Arabidopsis
  misc_feature (5)..(333): Homolog of NCBI NO: 15222622 NR Description: DNA-binding protein RAV2, putative; protein id: supported by cDNA: gi_15810260, supported by cDNA: gi_20259538
  misc_feature (56)..(316): Homolog of NCBI NO: 34911404 NR Description: DNA-binding protein RAV2-like [Oryza sativa
  misc_feature (58)..(307): Homolog of NCBI NO: 34895676 NR Description: putative DNA binding protein RAV2 [Oryza sativa
  misc_feature (40)..(271): Homolog of NCBI NO: 15223618 NR Description: RAV-like DNA-binding protein, putative; protein
MDAMSSVDESSTTTDSIPARKSSSPASLLYRMGSGTSVVLDSENGVEVEVEAESRKLPSSRFKGVVPQPNGRWGAQIYEKHQRVWLGTFNEEDEAARAYDVAAHRFRGRDAVTNFKDTTFEEEVEFLNAHSKSEIVDMLRKHTYKEELDQRKRNRDGNGKETTAFALASMVVMTGFKTAELLFEKTVTPSDVGKLNRLVIPKHQAEKHFPLPLGNNNVSVKGMLLNFEDVNGKVWRFRYSYWNSSQSYVLTKGWSRFVKEKRLCAGDLISFKRSNDQDQKFFIGWKSKSGLDLETGRVMRLFGVDISLNAVVVVKETTEVLMSSLRCKKQRVL

SEQ ID NO: 85057 - protein, 330 aa, Arabidopsis thaliana
  peptide (1)..(330): Ceres Seq. ID no. 12678571
  misc_feature (179)..(288): Pfam Name: B3 DNA binding domain Pfam Description: B3 DNA binding domain
  misc_feature (1)..(330): Homolog of NCBI NO: 15230871 NR Description: AP2 domain transcription factor RAV, putative;
  misc_feature (1)..(330): Homolog of NCBI NO: 21593532 NR Description: AP2 domain transcription factor [Arabidopsis
  misc_feature (2)..(329): Homolog of NCBI NO: 15222217 NR Description: DNA-binding protein (RAV1); protein id: supported by cDNA: gi_17380761, supported by cDNA: gi_20259028,
  misc_feature (1)..(330): Homolog of NCBI NO: 18409138 NR Description: AP2 domain protein RAP2.8 (RAV2); protein id: supported by cDNA: 19561., supported by cDNA: gi_13430799,
  misc_feature (1)..(330): Homolog of NCBI NO: 21554039 NR Description: putative RAV2-like DNA-binding protein
  misc_feature (16)..(330): Homolog of NCBI NO: 2281641 NR Description: AP2 domain containing protein RAP2.8 [Arabidopsis
  misc_feature (2)..(330): Homolog of NCBI NO: 15222622 NR Description: DNA-binding protein RAV2, putative; protein id: supported by cDNA: gi_15810260, supported by cDNA: gi_20259538
  misc_feature (53)..(313): Homolog of NCBI NO: 34911404 NR Description: DNA-binding protein RAV2-like [Oryza sativa
  misc_feature (55)..(304): Homolog of NCBI NO: 34895676 NR Description: putative DNA binding protein RAV2 [Oryza sativa
  misc_feature (37)..(268): Homolog of NCBI NO: 15223618 NR Description: RAV-like DNA-binding protein, putative; protein
MSSVDESSTTTDSIPARKSSSPASLLYRMGSGTSVVLDSENGVEVEVEAESRKLPSSRFKGVVPQPNGRWGAQIYEKHQRVWLGTFNEEDEAARAYDVAAHRFRGRDAVTNFKDTTFEEEVEFLNAHSKSEIVDMLRKHTYKEELDQRKRNRDGNGKETTAFALASMVVMTGFKTAELLFEKTVTPSDVGKLNRLVIPKHQAEKHFPLPLGNNNVSVKGMLLNFEDVNGKVWRFRYSYWNSSQSYVLTKGWSRFVKEKRLCAGDLISFKRSNDQDQKFFIGWKSKSGLDLETGRVMRLFGVDISLNAVVVVKETTEVLMSSLRCKKQRVL

SEQ ID NO: 85058 - DNA, 816 bp, Arabidopsis thaliana
  misc_feature (1)..(816): Ceres Seq. ID no. 12678588
  misc_feature: MA Experiment ID: 108435 Result: Down-regulated in Transcription
  misc_feature: MA Experiment 108435 PARAMETER Experiment Name: At_stm_Mutants_cDNA_P Parameter: Plant Line Value: wt Landsburg vs stm
  misc_feature: MA Experiment 108435 PARAMETER Experiment Name: At_stm_Mutants_cDNA_P Parameter: Tissue Value: Shoot Apical Meristem Region
  misc_feature: MA Experiment ID: 108461 Result: Up-regulated in Transcription
  misc_feature: MA Experiment 108461 PARAMETER Experiment Name: At_Germinating_Seeds_cDNA_P Parameter: Age (day) Value: 1 vs. 0
  misc_feature: MA Experiment 108461 PARAMETER Experiment Name: At_Germinating_Seeds_cDNA_P Parameter: Tissue Value: Germinating Seeds
  misc_feature: MA Experiment ID: 108462 Result: Up-regulated in Transcription
  misc_feature: MA Experiment 108462 PARAMETER Experiment Name: At_Germinating_Seeds_cDNA_P Parameter: Age (day) Value: 2 vs. 0
  misc_feature: MA Experiment 108462 PARAMETER Experiment Name: At_Germinating_Seeds_cDNA_P Parameter: Tissue Value: Germinating Seeds
  misc_feature: MA Experiment ID: 108595 Result: Down-regulated in Transcription
  misc_feature: MA Experiment 108595 PARAMETER Experiment Name: At_Ler-pi_Ovule_cDNA_P Parameter: Plant Line Value: null
  misc_feature: MA Experiment ID: 20000069 Result: Down-regulated in Transcription
  misc_feature: MA Experiment 20000069 PARAMETER Experiment Name: At_100uM_ABA_Mutants_cDNA_P Parameter: Plant Line Value: CS23
  misc_feature: MA Experiment 20000069 PARAMETER Experiment Name: At_100uM_ABA_Mutants_cDNA_P Parameter: Timepoint (hr) Value: 6
  misc_feature: MA Experiment 20000069 PARAMETER Experiment Name: At_100uM_ABA_Mutants_cDNA_P Parameter: Tissue Value: Aerial
  misc_feature: MA Experiment 20000069 PARAMETER Experiment Name: At_100uM_ABA_Mutants_cDNA_P Parameter: Treatment Value: 100uM ABA vs. No Treatment
  misc_feature: MA Experiment ID: 20000071 Result: Down-regulated in Transcription
  misc_feature: MA Experiment 20000071 PARAMETER Experiment Name: At_100uM_ABA_Mutants_cDNA_P Parameter: Plant Line Value: CS8104
  misc_feature: MA Experiment 20000071 PARAMETER Experiment Name: At_100uM_ABA_Mutants_cDNA_P Parameter: Timepoint (hr) Value: 6
  misc_feature: MA Experiment 20000071 PARAMETER Experiment Name: At_100uM_ABA_Mutants_cDNA_P Parameter: Tissue Value: Aerial
  misc_feature: MA Experiment 20000071 PARAMETER Experiment Name: At_100uM_ABA_Mutants_cDNA_P Parameter: Treatment Value: 100uM ABA vs. No Treatment
  misc_feature: MA Experiment ID: 20000072 Result: Down-regulated in Transcription
  misc_feature: MA Experiment 20000072 PARAMETER Experiment Name: At_100uM_ABA_Mutants_cDNA_P Parameter: Plant Line Value: CS8105
  misc_feature: MA Experiment 20000072 PARAMETER Experiment Name: At_100uM_ABA_Mutants_cDNA_P Parameter: Timepoint (hr) Value: 6
  misc_feature: MA Experiment 20000072 PARAMETER Experiment Name: At_100uM_ABA_Mutants_cDNA_P Parameter: Tissue Value: Aerial
  misc_feature: MA Experiment 20000072 PARAMETER Experiment Name: At_100uM_ABA_Mutants_cDNA_P Parameter: Treatment Value: 100uM ABA vs. No Treatment
  misc_feature: MA Experiment ID: 20000086 Result: Down-regulated in Transcription
  misc_feature: MA Experiment 20000086 PARAMETER Experiment Name: At_100uM_ABA_Mutants_cDNA_P Parameter: Plant Line Value: CS22
  misc_feature: MA Experiment 20000086 PARAMETER Experiment Name: At_100uM_ABA_Mutants_cDNA_P Parameter: Timepoint (hr) Value: 6
  misc_feature: MA Experiment 20000086 PARAMETER Experiment Name: At_100uM_ABA_Mutants_cDNA_P Parameter: Tissue Value: Aerial
  misc_feature: MA Experiment 20000086 PARAMETER Experiment Name: At_100uM_ABA_Mutants_cDNA_P Parameter: Treatment Value: 100uM ABA vs. No Treatment
  misc_feature: MA Experiment ID: 20000087 Result: Down-regulated in Transcription
  misc_feature: MA Experiment 20000087 PARAMETER Experiment Name: At_100uM_ABA_Mutants_cDNA_P Parameter: Plant Line Value: WS
  misc_feature: MA Experiment 20000087 PARAMETER Experiment Name: At_100uM_ABA_Mutants_cDNA_P Parameter: Timepoint (hr) Value: 6
  misc_feature: MA Experiment 20000087 PARAMETER Experiment Name: At_100uM_ABA_Mutants_cDNA_P Parameter: Tissue Value: Aerial
  misc_feature: MA Experiment 20000087 PARAMETER Experiment Name: At_100uM_ABA_Mutants_cDNA_P Parameter: Treatment Value: 100uM ABA vs. No Treatment
  misc_feature: MA Experiment ID: 20000117 Result: Down-regulated in Transcription
  misc_feature: MA Experiment 20000117 PARAMETER Experiment Name: At_100uM_ABA_Mutants_cDNA_P Parameter: Plant Line Value: Columbia
  misc_feature: MA Experiment 20000117 PARAMETER Experiment Name: At_100uM_ABA_Mutants_cDNA_P Parameter: Timepoint (hr) Value: 6
  misc_feature: MA Experiment 20000117 PARAMETER Experiment Name: At_100uM_ABA_Mutants_cDNA_P Parameter: Tissue Value: Aerial
  misc_feature: MA Experiment 20000117 PARAMETER Experiment Name: At_100uM_ABA_Mutants_cDNA_P Parameter: Treatment Value: 100uM ABA vs. No Treatment
  misc_feature: MA Experiment ID: 20000180 Result: Up-regulated in Transcription
  misc_feature: MA Experiment 20000180 PARAMETER Experiment Name: At_Germinating_Seeds_P Parameter: Age (hr) Value: 24 vs. 0
  misc_feature: MA Experiment 20000180 PARAMETER Experiment Name: At_Germinating_Seeds_P Parameter: Tissue Value: Germinating Seeds
  misc_feature: MA Experiment ID: 20000184 Result: Up-regulated in Transcription
  misc_feature: MA Experiment 20000184 PARAMETER Experiment Name: At_Shoots__P Parameter: Age (day) Value: 7
  misc_feature: MA Experiment 20000184 PARAMETER Experiment Name: At_Shoots__P Parameter: Tissue Value: Shoots vs. Whole Plant
  misc_feature: MA Experiment ID: 20000234 Result: Up-regulated in Transcription
  misc_feature: MA Experiment 20000234 PARAMETER Experiment Name: At_Siliques_P Parameter: Age (day) Value: 21
  misc_feature: MA Experiment 20000234 PARAMETER Experiment Name: At_Siliques_P Parameter: Organism Value: A. thaliana
  misc_feature: MA Experiment 20000234 PARAMETER Experiment Name: At_Siliques_P Parameter: Plant Line Value: WS
  misc_feature: MA Experiment 20000234 PARAMETER Experiment Name: At_Siliques_P Parameter: Tissue Value: Less Than 5mm Siliques vs. Whole Plant
  misc_feature: MA Experiment ID: 20000265 Result: Up-regulated in Transcription
  misc_feature: MA Experiment 20000265 PARAMETER Experiment Name: At_Open_Flower_P Parameter: Age (day) Value: 21
  misc_feature: MA Experiment 20000265 PARAMETER Experiment Name: At_Open_Flower_P Parameter: Plant Line Value: WS
  misc_feature: MA Experiment 20000265 PARAMETER Experiment Name: At_Open_Flower_P Parameter: Tissue Value: Closed Flower vs. Whole Plant
  misc_feature: MA Experiment ID: 20000437 Result: Down-regulated in Transcription
  misc_feature: MA Experiment 20000437 PARAMETER Experiment Name: At_Drought_P Parameter: Age (day) Value: 8
  misc_feature: MA Experiment 20000437 PARAMETER Experiment Name: At_Drought_P Parameter: Organism Value: A. thaliana
  misc_feature: MA Experiment 20000437 PARAMETER Experiment Name: At_Drought_P Parameter: Plant Line Value: WS
  misc_feature: MA Experiment 20000437 PARAMETER Experiment Name: At_Drought_P Parameter: Timepoint (hr) Value: 24
  misc_feature: MA Experiment 20000437 PARAMETER Experiment Name: At_Drought_P Parameter: Tissue Value: Whole Plant
  misc_feature: MA Experiment 20000437 PARAMETER Experiment Name: At_Drought_P Parameter: Treatment Value: Drought vs. No Drought
  misc_feature: MA Experiment ID: 20000439 Result: Down-regulated in Transcription
  misc_feature: MA Experiment 20000439 PARAMETER Experiment Name: At_Roots__P Parameter: Age (day) Value: 14 vs. 21
  misc_feature: MA Experiment 20000439 PARAMETER Experiment Name: At_Roots__P Parameter: Organism Value: A. thaliana
  misc_feature: MA Experiment 20000439 PARAMETER Experiment Name: At_Roots__P Parameter: Tissue Value: Roots vs. Whole Plant
  misc_feature: MA Experiment ID: 20000794 Result: Down-regulated in Transcription
  misc_feature: MA Experiment 20000794 PARAMETER Experiment Name: At_Petals_P Parameter: Age (day) Value: 23-25 days
  misc_feature: MA Experiment 20000794 PARAMETER Experiment Name: At_Petals_P Parameter: Plant Line Value: WS
  misc_feature: MA Experiment 20000794 PARAMETER Experiment Name: At_Petals_P Parameter: Tissue Value: Petals vs. Whole plant
  misc_feature: MA Experiment ID: 20001248 Result: Down-regulated in Transcription
  misc_feature: MA Experiment 20001248 PARAMETER Experiment Name: At_Far-red-induction_P Parameter: Age (day) Value: 7
  misc_feature: MA Experiment 20001248 PARAMETER Experiment Name: At_Far-red-induction_P Parameter: Light Value: Far-red vs. White
  misc_feature: MA Experiment 20001248 PARAMETER Experiment Name: At_Far-red-induction_P Parameter: Organism Value: A. thaliana
  misc_feature: MA Experiment 20001248 PARAMETER Experiment Name: At_Far-red-induction_P Parameter: Plant Line Value: Columbia
  misc_feature: MA Experiment 20001248 PARAMETER Experiment Name: At_Far-red-induction_P Parameter: Timepoint (hr) Value: 4
  misc_feature: MA Experiment 20001248 PARAMETER Experiment Name: At_Far-red-induction_P Parameter: Tissue Value: Whole Plant
  misc_feature: MA Experiment ID: 20001450 Result: Down-regulated in Transcription
  misc_feature: MA Experiment 20001450 PARAMETER Experiment Name: At_Far-red-induction_P Parameter: Age (day) Value: 7
  misc_feature: MA Experiment 20001450 PARAMETER Experiment Name: At_Far-red-induction_P Parameter: Light Value: Far-red vs. White
  misc_feature: MA Experiment 20001450 PARAMETER Experiment Name: At_Far-red-induction_P Parameter: Organism Value: A. thaliana
  misc_feature: MA Experiment 20001450 PARAMETER Experiment Name: At_Far-red-induction_P Parameter: Plant Line Value: Columbia
  misc_feature: MA Experiment 20001450 PARAMETER Experiment Name: At_Far-red-induction_P Parameter: Timepoint (hr) Value: 8
  misc_feature: MA Experiment 20001450 PARAMETER Experiment Name: At_Far-red-induction_P Parameter: Tissue Value: Whole Plant
  misc_feature: MA Experiment ID: 20001906 Result: Down-regulated in Transcription
  misc_feature: MA Experiment 20001906 PARAMETER Experiment Name: At_Drought_Reproduction_P Parameter: Age (day) Value: 35
  misc_feature: MA Experiment 20001906 PARAMETER Experiment Name: At_Drought_Reproduction_P Parameter: Organism Value: A. thaliana
  misc_feature: MA Experiment 20001906 PARAMETER Experiment Name: At_Drought_Reproduction_P Parameter: Plant Line Value: WS
  misc_feature: MA Experiment 20001906 PARAMETER Experiment Name: At_Drought_Reproduction_P Parameter: Timepoint (day) Value: 5
  misc_feature: MA Experiment 20001906 PARAMETER Experiment Name: At_Drought_Reproduction_P Parameter: Tissue Value: Siliques
  misc_feature: MA Experiment 20001906 PARAMETER Experiment Name: At_Drought_Reproduction_P Parameter: Treatment Value: Drought vs. No Drought
tactacatgctctaatcacgtccttgtagaggaaaagaaaaaaaatggctgcttcatcttcctctttcactctctgtaatcacaccacacttcgtactctccctctgagaaagacccttgtcaccaaaacccaattttcagttcccacaaaatcatcagaatctaacttctttggctccacactcactcactcatcgtatatctccccagtctcttcctcttctctcaaaggcttaatctttgccaaggttaacaagggtcaggctgcaccagacttcacactaaaggatcaaaacggaaagccggtgagcctcaaaaagtataaagggaagcctgttgttctctacttctaccctgcagatgaaacccctggctgcaccaagcaggcttgtgctttcagagactcttatgagaaattcaagaaagctggtgcagaggtcattggcattagtggagatgactctgcttctcacaaggcgtttgcaagcaaatacaaactaccgtatacattgttaagcgacgaagggaataaggtgagaaaagattggggagtgcctggagacctgtttggagcattgccagggagacagacttacgttcttgacaaaaacggtgttgttcagctcatctacaacaaccagttccagcctgagaaacacatcgacgagaccttgaagtttctcaaagctgcttgatcattctctctttctcttctttctcttctttcatgcatgtctcatgtctgtctccatgagaccatgaccttcttatattgtttctgttgagtatgaattttcaataataccatgttatacc

SEQ ID NO: 85059 - protein, 216 aa, Arabidopsis thaliana; identical to SEQ ID NO: 77633
  peptide (1)..(216): Ceres Seq. ID no. 12678589
  misc_feature (71)..(210): Pfam Name: AhpC/TSA family Pfam Description: AhpC/TSA family
  misc_feature (1)..(216): Homolog of NCBI NO: 15230982 NR Description: putative peroxiredoxin; protein id: At3g26060.1, by cDNA: gi_15081742, supported by cDNA: gi_18252272 [Arabidopsis
  misc_feature (37)..(215): Homolog of NCBI NO: 6899842 NR Description: peroxiredoxin Q [Sedum lineare]
  misc_feature (23)..(216): Homolog of NCBI NO: 39748708 NR Description: peroxiredoxin Q [Gentiana triflora]
  misc_feature (69)..(214): Homolog of NCBI NO: 17230675 NR Description: bacterioferritin comigratory protein [Nostoc sp.
  misc_feature (69)..(214): Homolog of NCBI NO: 23125049 NR Description: hypothetical protein [Nostoc punctiforme]
  misc_feature (68)..(214): Homolog of NCBI NO: 28850433 NR Description: similar to Anabaena sp. (strain PCC 7120).
  misc_feature (68)..(214): Homolog of NCBI NO: 23041480 NR Description: hypothetical protein [Trichodesmium erythraeum
  misc_feature (69)..(214): Homolog of NCBI NO: 15898858 NR Description: Peroxiredoxin, bacterioferritin comigratory
  misc_feature (67)..(214): Homolog of NCBI NO: 21673494 NR Description: bacterioferritin comigratory protein, thiol putative [Chlorobium tepidum TLS] >gi|21646601|gb|AAM71901.1| comigratory protein, thiol peroxidase, putative [Chlorobium
  misc_feature (69)..(214): Homolog of NCBI NO: 16081486 NR Description: thiol-specific antioxidant related protein

SEQ ID NO: 85060 - DNA, 1387 bp, Arabidopsis thaliana
  misc_feature (1)..(1387): Ceres Seq. ID no. 12678593
  misc_feature: MA Experiment ID: 20000180 Result: Up-regulated in Transcription
  misc_feature: MA Experiment 20000180 PARAMETER Experiment Name: At_Germinating_Seeds_P Parameter: Age (hr) Value: 24 vs. 0
  misc_feature: MA Experiment 20000180 PARAMETER Experiment Name: At_Germinating_Seeds_P Parameter: Tissue Value: Germinating Seeds
  misc_feature: MA Experiment ID: 20000182 Result: Up-regulated in Transcription
  misc_feature: MA Experiment 20000182 PARAMETER Experiment Name: At_2mM_SA_P Parameter: Age (day) Value: 14
  misc_feature: MA Experiment 20000182 PARAMETER Experiment Name: At_2mM_SA_P Parameter: Organism Value: A. thaliana
  misc_feature: MA Experiment 20000182 PARAMETER Experiment Name: At_2mM_SA_P Parameter: Plant Line Value: WS
  misc_feature: MA Experiment 20000182 PARAMETER Experiment Name: At_2mM_SA_P Parameter: Timepoint (hr) Value: 6
  misc_feature: MA Experiment 20000182 PARAMETER Experiment Name: At_2mM_SA_P Parameter: Tissue Value: Aerial
  misc_feature: MA Experiment 20000182 PARAMETER Experiment Name: At_2mM_SA_P Parameter: Treatment Value: 2mM SA vs. No Treatment
  misc_feature: MA Experiment ID: 20000184 Result: Down-regulated in Transcription
  misc_feature: MA Experiment 20000184 PARAMETER Experiment Name: At_Shoots__P Parameter: Age (day) Value: 7
  misc_feature: MA Experiment 20000184 PARAMETER Experiment Name: At_Shoots__P Parameter: Tissue Value: Shoots vs. Whole Plant
  misc_feature: MA Experiment ID: 20000185 Result: Up-regulated in Transcription
  misc_feature: MA Experiment 20000185 PARAMETER Experiment Name: At_Roots__P Parameter: Age (day) Value: 7 vs. 21
  misc_feature: MA Experiment 20000185 PARAMETER Experiment Name: At_Roots__P Parameter: Organism Value: A. thaliana
  misc_feature: MA Experiment 20000185 PARAMETER Experiment Name: At_Roots__P Parameter: Tissue Value: Roots vs. Whole Plant
  misc_feature: MA Experiment ID: 20000439 Result: Up-regulated in Transcription
  misc_feature: MA Experiment 20000439 PARAMETER Experiment Name: At_Roots__P Parameter: Age (day) Value: 14 vs. 21
  misc_feature: MA Experiment 20000439 PARAMETER Experiment Name: At_Roots__P Parameter: Organism Value: A. thaliana
  misc_feature: MA Experiment 20000439 PARAMETER Experiment Name: At_Roots__P Parameter: Tissue Value: Roots vs. Whole Plant
  misc_feature: MA Experiment ID: 20000453 Result: Up-regulated in Transcription
  misc_feature: MA Experiment 20000453 PARAMETER Experiment Name: At_100uM_ABA_P Parameter: Age (day) Value: 15
  misc_feature: MA Experiment 20000453 PARAMETER Experiment Name: At_100uM_ABA_P Parameter: Organism Value: A. thaliana
  misc_feature: MA Experiment 20000453 PARAMETER Experiment Name: At_100uM_ABA_P Parameter: Plant Line Value: WS
  misc_feature: MA Experiment 20000453 PARAMETER Experiment Name: At_100uM_ABA_P Parameter: Timepoint (hr) Value: 24
  misc_feature: MA Experiment 20000453 PARAMETER Experiment Name: At_100uM_ABA_P Parameter: Tissue Value: Aerial
  misc_feature: MA Experiment 20000453 PARAMETER Experiment Name: At_100uM_ABA_P Parameter: Treatment Value: 100uM ABA vs. No Treatment
  misc_feature: MA Experiment ID: 20000527 Result: Down-regulated in Transcription
  misc_feature: MA Experiment 20000527 PARAMETER Experiment Name: At_10percent_PEG_P Parameter: Age (day) Value: 20
  misc_feature: MA Experiment 20000527 PARAMETER Experiment Name: At_10percent_PEG_P Parameter: Organism Value: A. thaliana
  misc_feature: MA Experiment 20000527 PARAMETER Experiment Name: At_10percent_PEG_P Parameter: Plant Line Value: WS
  misc_feature: MA Experiment 20000527 PARAMETER Experiment Name: At_10percent_PEG_P Parameter: Timepoint (day) Value: 20
  misc_feature: MA Experiment 20000527 PARAMETER Experiment Name: At_10percent_PEG_P Parameter: Tissue Value: Whole Plant
  misc_feature: MA Experiment 20000527 PARAMETER Experiment Name: At_10percent_PEG_P Parameter: Treatment Value: 10percent PEG vs. No Treatment
  misc_feature: MA Experiment ID: 20000794 Result: Up-regulated in Transcription
  misc_feature: MA Experiment 20000794 PARAMETER Experiment Name: At_Petals_P Parameter: Age (day) Value: 23-25 days
  misc_feature: MA Experiment 20000794 PARAMETER Experiment Name: At_Petals_P Parameter: Plant Line Value: WS
  misc_feature: MA Experiment 20000794 PARAMETER Experiment Name: At_Petals_P Parameter: Tissue Value: Petals vs. Whole plant
  misc_feature: MA Experiment ID: 20001451 Result: Up-regulated in Transcription
  misc_feature: MA Experiment 20001451 PARAMETER Experiment Name: At_Far-red-induction_P Parameter: Age (day) Value: 7
  misc_feature: MA Experiment 20001451 PARAMETER Experiment Name: At_Far-red-induction_P Parameter: Light Value: Far-red vs. White
  misc_feature: MA Experiment 20001451 PARAMETER Experiment Name: At_Far-red-induction_P Parameter: Organism Value: A. thaliana
  misc_feature: MA Experiment 20001451 PARAMETER Experiment Name: At_Far-red-induction_P Parameter: Plant Line Value: Columbia
  misc_feature: MA Experiment 20001451 PARAMETER Experiment Name: At_Far-red-induction_P Parameter: Timepoint (hr) Value: 24
  misc_feature: MA Experiment 20001451 PARAMETER Experiment Name: At_Far-red-induction_P Parameter: Tissue Value: Whole Plant
  misc_feature: MA Experiment ID: 20001560 Result: Down-regulated in Transcription
  misc_feature: MA Experiment 20001560 PARAMETER Experiment Name: At_Drought_Soil_Dry_P Parameter: Age (day) Value: 28
  misc_feature: MA Experiment 20001560 PARAMETER Experiment Name: At_Drought_Soil_Dry_P Parameter: Organism Value: A. thaliana
  misc_feature: MA Experiment 20001560 PARAMETER Experiment Name: At_Drought_Soil_Dry_P Parameter: Plant Line Value: WS
  misc_feature: MA Experiment 20001560 PARAMETER Experiment Name: At_Drought_Soil_Dry_P Parameter: Post Timepoint (hr) Value: None
  misc_feature: MA Experiment 20001560 PARAMETER Experiment Name: At_Drought_Soil_Dry_P Parameter: Post-Treatment Value: None
  misc_feature: MA Experiment 20001560 PARAMETER Experiment Name: At_Drought_Soil_Dry_P Parameter: Timepoint (day) Value: 14
  misc_feature: MA Experiment 20001560 PARAMETER Experiment Name: At_Drought_Soil_Dry_P Parameter: Treatment Value: Drought vs. No Drought
  misc_feature: MA Experiment ID: 20001904 Result: Up-regulated in Transcription
  misc_feature: MA Experiment 20001904 PARAMETER Experiment Name: At_Drought_Reproduction_P Parameter: Age (day) Value: 37
  misc_feature: MA Experiment 20001904 PARAMETER Experiment Name: At_Drought_Reproduction_P Parameter: Organism Value: A. thaliana
  misc_feature: MA Experiment 20001904 PARAMETER Experiment Name: At_Drought_Reproduction_P Parameter: Plant Line Value: WS
  misc_feature: MA Experiment 20001904 PARAMETER Experiment Name: At_Drought_Reproduction_P Parameter: Timepoint (day) Value: 7
  misc_feature: MA Experiment 20001904 PARAMETER Experiment Name: At_Drought_Reproduction_P Parameter: Tissue Value: Rosettes
  misc_feature: MA Experiment 20001904 PARAMETER Experiment Name: At_Drought_Reproduction_P Parameter: Treatment Value: Drought vs. No Drought
  misc_feature: MA Experiment ID: 20001905 Result: Up-regulated in Transcription
  misc_feature: MA Experiment 20001905 PARAMETER Experiment Name: At_Drought_Reproduction_P Parameter: Age (day) Value: 40
  misc_feature: MA Experiment 20001905 PARAMETER Experiment Name: At_Drought_Reproduction_P Parameter: Organism Value: A. thaliana
  misc_feature: MA Experiment 20001905 PARAMETER Experiment Name: At_Drought_Reproduction_P Parameter: Plant Line Value: WS
  misc_feature: MA Experiment 20001905 PARAMETER Experiment Name: At_Drought_Reproduction_P Parameter: Timepoint (day) Value: 10
  misc_feature: MA Experiment 20001905 PARAMETER Experiment Name: At_Drought_Reproduction_P Parameter: Tissue Value: Rosettes
  misc_feature: MA Experiment 20001905 PARAMETER Experiment Name: At_Drought_Reproduction_P Parameter: Treatment Value: Drought vs. No Drought
  misc_feature: MA Experiment ID: 20001906 Result: Up-regulated in Transcription
  misc_feature: MA Experiment 20001906 PARAMETER Experiment Name: At_Drought_Reproduction_P Parameter: Age (day) Value: 35
  misc_feature: MA Experiment 20001906 PARAMETER Experiment Name: At_Drought_Reproduction_P Parameter: Organism Value: A. thaliana
  misc_feature: MA Experiment 20001906 PARAMETER Experiment Name: At_Drought_Reproduction_P Parameter: Plant Line Value: WS
  misc_feature: MA Experiment 20001906 PARAMETER Experiment Name: At_Drought_Reproduction_P Parameter: Timepoint (day) Value: 5
  misc_feature: MA Experiment 20001906 PARAMETER Experiment Name: At_Drought_Reproduction_P Parameter: Tissue Value: Siliques
  misc_feature: MA Experiment 20001906 PARAMETER Experiment Name: At_Drought_Reproduction_P Parameter: Treatment Value: Drought vs. No Drought
tttttgtgcagttcaaatagtaagaaaccgaatgacggtatgatgctcgtaatatcgattttcgcgggaatagttatcggatttttattaggcatatctttccctacattgtcactaactaagatgaattttccatcaagcattcttccttctgttgctactgtctacatagaaaatgagaaaccggagaaatcatctaagacgagttcacaaaacgaaagtgatgcatcacatcatcataagatttgggttccatcgaatcctcgaggtgcagagatgttacctccaagttttgttgcagccgaatcggatttttacttacgaagattgtggggattgcctaaagatgatttaccagtggtgaagcctaagtatcttgttgcttttactgtttcttatgaacaaagaaaaaacatcgatgcttgtgtcaaaaaattctcagataacttcaccattgttctgtttcattacgatggaaaaacctcggagtatgatgaatttgaatggtctaaacgggcgatacacgtcagtgtacctaagcaaaccaagtggtggtatgctaaaaggtttctgcatcctgatatcatagcaccatatgaatatatattcatttgggatgaagatcttggcgttgaaaacttcgacgcagaagagtacatcaagattgtgaataagcatggtctagaaatatcgcaacccgctgtggaatcaagaaaatcaatcacatggaagataacaaagagaatacccggaatcgaagttcacaaagaagtcgaagagaaaccaggccgctgcaatgaccctcacctacctccttgtgcagggtttatagagattatggctccagttttctctagagaggcatggcgttgtgtgtggcatatgattcagaatgacttggttcacggttggggtcttgactttgcgctaagaaaatgcgtcgagcctgcacatgagaagattggtgttgtggattctcaatggatcattcatcaaaagattccttctttaggcagccagggaaccgcgcaggaagggaaaaccgcgttccaaggggtaagagagagatgtaaacgggaatggacaatgtttcagaaaagaatgacccgatcagagcagaagtatctgaaagaaattgcatctgcctcttcaaactctacacgtacttaaaccaaaagagtagaggaactgaataacaacctttagtgttcagatagcactttcagtaagaaaaaaagagaaatagaatgttgatatgataagcacataagcaagcatacacacacaagacacattctttgaaaagagcaatatagctctgttctagaaacagttatactgtagtaacaaaacagttaataaagttcttaataaactcttcatttct

SEQ ID NO: 85061 - protein, 389 aa, Arabidopsis thaliana
  peptide (1)..(389): Ceres Seq. ID no. 12678594
  misc_feature (81)..(259): Pfam Name: Protein of unknown function (DUF707) Pfam Description: Protein of unknown function (DUF707)
  misc_feature (5)..(389): Homolog of NCBI NO: 18404941 NR Description: expressed protein; protein id: At3g26440.1,
  misc_feature (5)..(389): Homolog of NCBI NO: 16612300 NR Description: AT3g26440/F20C19_16 [Arabidopsis thaliana]
  misc_feature (81)..(259): Homolog of NCBI NO: 9294303 NR Description: gb|AAD31054.1~gene_id:F20C19.17~strong similarity
  misc_feature (276)..(389): Homolog of NCBI NO: 9294303 NR Description: gb|AAD31054.1~gene_id:F20C19.17~strong similarity
  misc_feature (5)..(47): Homolog of NCBI NO: 9294303 NR Description: gb|AAD31054.1~gene_id:F20C19.17~strong similarity
  misc_feature (5)..(383): Homolog of NCBI NO: 22329525 NR Description: unknown protein; protein id: At1g13000.1, by cDNA: gi_18175818, supported by cDNA: gi_20465546 [Arabidopsis >gi|18175819|gb|AAL59933.1| unknown protein [Arabidopsis
  misc_feature (81)..(277): Homolog of NCBI NO: 25402748 NR Description: protein F3F19.3 [imported] - Arabidopsis thaliana
  misc_feature (276)..(383): Homolog of NCBI NO: 25402748 NR Description: protein F3F19.3 [imported] - Arabidopsis thaliana
  misc_feature (5)..(47): Homolog of NCBI NO: 25402748 NR Description: protein F3F19.3 [imported] - Arabidopsis thaliana
  misc_feature (1)..(389): Homolog of NCBI NO: 18408876 NR Description: F12A21.2; protein id: At1g67850.1, supported by gi_14326581 [Arabidopsis thaliana] At1g67850/F12A21_2 [Arabidopsis thaliana]
FLCSSNSKKPNDGMMLVISIFAGIVIGFLLGISFPTLSLTKMNFPSSILPSVATVYIENEKPEKSSKTSSQNESDASHHHKIWVPSNPRGAEMLPPSFVAAESDFYLRRLWGLPKDDLPVVKPKYLVAFTVSYEQRKNIDACVKKFSDNFTIVLFHYDGKTSEYDEFEWSKRAIHVSVPKQTKWWYAKRFLHPDIIAPYEYIFIWDEDLGVENFDAEEYIKIVNKHGLEISQPAVESRKSITWKITKRIPGIEVHKEVEEKPGRCNDPHLPPCAGFIEIMAPVFSREAWRCVWHMIQNDLVHGWGLDFALRKCVEPAHEKIGVVDSQWIIHQKIPSLGSQGTAQEGKTAFQGVRERCKREWTMFQKRMTRSEQKYLKEIASASSNSTRT

SEQ ID NO: 85062 - protein, 376 aa, Arabidopsis thaliana
  peptide (1)..(376): Ceres Seq. ID no. 12678595
  misc_feature (68)..(246): Pfam Name: Protein of unknown function (DUF707) Pfam Description: Protein of unknown function (DUF707)
  misc_feature (1)..(376): Homolog of NCBI NO: 18404941 NR Description: expressed protein; protein id: At3g26440.1,
  misc_feature (1)..(376): Homolog of NCBI NO: 16612300 NR Description: AT3g26440/F20C19_16 [Arabidopsis thaliana]
  misc_feature (68)..(246): Homolog of NCBI NO: 9294303 NR Description: gb|AAD31054.1~gene_id:F20C19.17~strong similarity
  misc_feature (263)..(376): Homolog of NCBI NO: 9294303 NR Description: gb|AAD31054.1~gene_id:F20C19.17~strong similarity
  misc_feature (1)..(34): Homolog of NCBI NO: 9294303 NR Description: gb|AAD31054.1~gene_id:F20C19.17~strong similarity
  misc_feature (1)..(370): Homolog of NCBI NO: 22329525 NR Description: unknown protein; protein id: At1g13000.1, by cDNA: gi_18175818, supported by cDNA: gi_20465546 [Arabidopsis >gi|18175819|gb|AAL59933.1| unknown protein [Arabidopsis
  misc_feature (68)..(264): Homolog of NCBI NO: 25402748 NR Description: protein F3F19.3 [imported] - Arabidopsis thaliana
  misc_feature (263)..(370): Homolog of NCBI NO: 25402748 NR Description: protein F3F19.3 [imported] - Arabidopsis thaliana
  misc_feature (1)..(34): Homolog of NCBI NO: 25402748 NR Description: protein F3F19.3 [imported] - Arabidopsis thaliana
  misc_feature (1)..(376): Homolog of NCBI NO: 18408876 NR Description: F12A21.2; protein id: At1g67850.1, supported by gi_14326581 [Arabidopsis thaliana] At1g67850/F12A21_2 [Arabidopsis thaliana]
MMLVISIFAGIVIGFLLGISFPTLSLTKMNFPSSILPSVATVYIENEKPEKSSKTSSQNESDASHHHKIWVPSNPRGAEMLPPSFVAAESDFYLRRLWGLPKDDLPVVKPKYLVAFTVSYEQRKNIDACVKKFSDNFTIVLFHYDGKTSEYDEFEWSKRAIHVSVPKQTKWWYAKRFLHPDIIAPYEYIFIWDEDLGVENFDAEEYIKIVNKHGLEISQPAVESRKSITWKITKRIPGIEVHKEVEEKPGRCNDPHLPPCAGFIEIMAPVFSREAWRCVWHMIQNDLVHGWGLDFALRKCVEPAHEKIGVVDSQWIIHQKIPSLGSQGTAQEGKTAFQGVRERCKREWTMFQKRMTRSEQKYLKEIASASSNSTRT

SEQ ID NO: 85063 - protein, 375 aa, Arabidopsis thaliana
  peptide (1)..(375): Ceres Seq. ID no. 12678596
  misc_feature (67)..(245): Pfam Name: Protein of unknown function (DUF707) Pfam Description: Protein of unknown function (DUF707)
  misc_feature (1)..(375): Homolog of NCBI NO: 18404941 NR Description: expressed protein; protein id: At3g26440.1,
  misc_feature (1)..(375): Homolog of NCBI NO: 16612300 NR Description: AT3g26440/F20C19_16 [Arabidopsis thaliana]
  misc_feature (67)..(245): Homolog of NCBI NO: 9294303 NR Description: gb|AAD31054.1~gene_id:F20C19.17~strong similarity
  misc_feature (262)..(375): Homolog of NCBI NO: 9294303 NR Description: gb|AAD31054.1~gene_id:F20C19.17~strong similarity
  misc_feature (1)..(33): Homolog of NCBI NO: 9294303 NR Description: gb|AAD31054.1~gene_id:F20C19.17~strong similarity
  misc_feature (1)..(369): Homolog of NCBI NO: 22329525 NR Description: unknown protein; protein id: At1g13000.1, by cDNA: gi_18175818, supported by cDNA: gi_20465546 [Arabidopsis >gi|18175819|gb|AAL59933.1| unknown protein [Arabidopsis
  misc_feature (67)..(263): Homolog of NCBI NO: 25402748 NR Description: protein F3F19.3 [imported] - Arabidopsis thaliana
  misc_feature (262)..(369): Homolog of NCBI NO: 25402748 NR Description: protein F3F19.3 [imported] - Arabidopsis thaliana
  misc_feature (1)..(33): Homolog of NCBI NO: 25402748 NR Description: protein F3F19.3 [imported] - Arabidopsis thaliana
  misc_feature (1)..(375): Homolog of NCBI NO: 18408876 NR Description: F12A21.2; protein id: At1g67850.1, supported by gi_14326581 [Arabidopsis thaliana] At1g67850/F12A21_2 [Arabidopsis thaliana]
MLVISIFAGIVIGFLLGISFPTLSLTKMNFPSSILPSVATVYIENEKPEKSSKTSSQNESDASHHHKIWVPSNPRGAEMLPPSFVAAESDFYLRRLWGLPKDDLPVVKPKYLVAFTVSYEQRKNIDACVKKFSDNFTIVLFHYDGKTSEYDEFEWSKRAIHVSVPKQTKWWYAKRFLHPDIIAPYEYIFIWDEDLGVENFDAEEYIKIVNKHGLEISQPAVESRKSITWKITKRIPGIEVHKEVEEKPGRCNDPHLPPCAGFIEIMAPVFSREAWRCVWHMIQNDLVHGWGLDFALRKCVEPAHEKIGVVDSQWIIHQKIPSLGSQGTAQEGKTAFQGVRERCKREWTMFQKRMTRSEQKYLKEIASASSNSTRT

SEQ ID NO: 85064 - DNA, 2081 bp, Arabidopsis thaliana
  misc_feature (1)..(2081): Ceres Seq. ID no. 12678624
aatcatctctctccttttttcaaacatacacagagaatggtggattcgaaaacccctgcgaaaaccaaattgttagattcgtcttcgatttctaatgtcagagtcgtccttagggttcgtccttttcttccccgggagatttcggacgagagttgtgacgggagatcgtgcgtttccgtaatcggcggcgatggaggagataccagcgaagtggcggtttacctcaaagatccagatagctgtcgtaacgaaagctatcagctggatgcgttttacgggagagaggatgataatgtgaagcatatattcgatagagaagtaagccctttgattcctgggatctttcatggtttcaatgctactgtgcttgcttatggagccaccggaagcggaaagacttttacgatgcagggaatcgatgagctaccaggtctgatgccattgaccatgtccaccattctgtctatgtgcgagaagacaaggagtagggctgagatttcatattatgaagtttacatggacagatgttgggatcttctagaagttaaagacaacgagattgctgtttgggatgataaagatggacaagttcatcttaagggactttctagtgtccctgttaagtccatgtctgagtttcaagaggcgtatttgtgtggcgttcagaggaggaaagttgcacacactggtttaaatgatgtctctagtagaagccatggagtgcttgtgatctcagtaacctcacaagggcttgtcactggtaaaatcaatctgattgatcttgcaggtaacgaagacaatagaaggacaggcaatgaagggatccgtttacaagagagtgccaagattaatcagtcattatttgcattgtccaatgtggtttatgcactgaataataacctccctagagtgccatacagggaaaccaaattgactagaatactgcaggattcacttggtggaacaagtagggctctcatggtcgcatgtctgaatcctggagaataccaagaatctcttcgcaccgttagcctggctgcaaggtcaaggcacatctcaaacaatgtttctctgaatcccaaggtagagacccccaaggttaagatagacatggaagcaaaactgcaagcttggcttgaatcaaaaggcaagatgaagagcgcgcatagaatgatggcaatacggtctccattgatgggtacaaaccagacttcaatttctcaaagctcagtcaagaaattactctgtcatagatcagccattgcagaaagtgctaagcttgccggcacaggacagagggacgcatttgtgaccgcaagaaacttatttggtgtggaaactcttgctgcttcacatttatgggaacctatacggaatctgcagttagcttctccaaccaaagaagatgagagagacacatctggcgaagagaatctattggtatcagaagcaagcttgagagataacacattggatgtcgagaagaaatatactgaactgagtcctcttcgagaagctctatctccaatagactccaatgcaaaaccaaattcagcacacggaagctctccttttctgaagccaatgaccccaaaaacaccttttctttctacaaaccctgaaattatgcagatggaaggcacttgccagaagttcaatgcatggagcaataatttaaagacctctctcataaaagagtacattcacttcttgaacacagccaacagagaggagctaagggaattaaagggaattgggcagaagatggctgagtacatcattgaactcagagaaacaagccctttaaaatcgcttaccgacttagaaaagatcggtttcacctcaagacaggtacataacctattcaaaaaagccactgaaggagtcctcgagaagccagtttctgcttcaacaacaccttagttgttgtctctagcaaacaacaacacttgtgtattatatcagttctatctcgtgtaatttcattattgtctgttcttgtatgtttaagctttataaccagagagacaatgggcttgaatcttaattgtgtagtgagcaagaaagaagcaaactttaat

SEQ ID NO: 85065 - protein, 640 aa, Arabidopsis thaliana
  peptide (1)..(640): Ceres Seq. ID no. 12678625
  misc_feature (15)..(623): Homolog of NCBI NO: 6901499 NR Description: kinesin [Xenopus laevis]
  misc_feature (15)..(623): Homolog of NCBI NO: 9049953 NR Description: chromokinesin Xkid [Xenopus laevis]
  misc_feature (30)..(623): Homolog of NCBI NO: 21704182 NR Description: kinesin family member 22, pseudo; kinesin family
  misc_feature (21)..(623): Homolog of NCBI NO: 27882016 NR Description: Similar to kinesin family member 22 [Xenopus
  misc_feature (21)..(623): Homolog of NCBI NO: 6901503 NR Description: kinesin [Xenopus laevis]
  misc_feature (29)..(623): Homolog of NCBI NO: 39645862 NR Description: Unknown (protein for MGC:75575) [Silurana
  misc_feature (70)..(623): Homolog of NCBI NO: 34859268 NR Description: similar to kinesin family member 22, pseudo
  misc_feature (31)..(623): Homolog of NCBI NO: 6453818 NR Description: kinesin family member 22; Kid; origin of plasmid
  misc_feature (31)..(623): Homolog of NCBI NO: 30584615 NR Description: Homo sapiens kinesin-like 4 [synthetic construct]
  misc_feature (205)..(375): Homolog of NCBI NO: 15237852 NR Description: kinesin-related protein; protein id: At5g23910.1 thaliana] >gi|10176858|dbj|BAB10064.1| gene_id:MRO11.5~unknown
NHLSPFFKHTQRMVDSKTPAKTKLLDSSSISNVRVVLRVRPFLPREISDESCDGRSCVSVIGGDGGDTSEVAVYLKDPDSCRNESYQLDAFYGREDDNVKHIFDREVSPLIPGIFHGFNATVLAYGATGSGKTFTMQGIDELPGLMPLTMSTILSMCEKTRSRAEISYYEVYMDRCWDLLEVKDNEIAVWDDKDGQVHLKGLSSVPVKSMSEFQEAYLCGVQRRKVAHTGLNDVSSRSHGVLVISVTSQGLVTGKINLIDLAGNEDNRRTGNEGIRLQESAKINQSLFALSNVVYALNNNLPRVPYRETKLTRILQDSLGGTSRALMVACLNPGEYQESLRTVSLAARSRHISNNVSLNPKVETPKVKIDMEAKLQAWLESKGKMKSAHRMMAIRSPLMGTNQTSISQSSVKKLLCHRSAIAESAKLAGTGQRDAFVTARNLFGVETLAASHLWEPIRNLQLASPTKEDERDTSGEENLLVSEASLRDNTLDVEKKYTELSPLREALSPIDSNAKPNSAHGSSPFLKPMTPKTPFLSTNPEIMQMEGTCQKFNAWSNNLKTSLIKEYIHFLNTANREELRELKGIGQKMAEYIIELRETSPLKSLTDLEKIGFTSRQVHNLFKKATEGVLEKPVSASTTP

SEQ ID NO: 85066 - protein, 628 aa, Arabidopsis thaliana
  peptide (1)..(628): Ceres Seq. ID no. 12678626
  misc_feature (3)..(611): Homolog of NCBI NO: 6901499 NR Description: kinesin [Xenopus laevis]
  misc_feature (3)..(611): Homolog of NCBI NO: 9049953 NR Description: chromokinesin Xkid [Xenopus laevis]
  misc_feature (18)..(611): Homolog of NCBI NO: 21704182 NR Description: kinesin family member 22, pseudo; kinesin family
  misc_feature (9)..(611): Homolog of NCBI NO: 27882016 NR Description: Similar to kinesin family member 22 [Xenopus
  misc_feature (9)..(611): Homolog of NCBI NO: 6901503 NR Description: kinesin [Xenopus laevis]
  misc_feature (17)..(611): Homolog of NCBI NO: 39645862 NR Description: Unknown (protein for MGC:75575) [Silurana
  misc_feature (58)..(611): Homolog of NCBI NO: 34859268 NR Description: similar to kinesin family member 22, pseudo
  misc_feature (19)..(611): Homolog of NCBI NO: 6453818 NR Description: kinesin family member 22; Kid; origin of plasmid
  misc_feature (19)..(611): Homolog of NCBI NO: 30584615 NR Description: Homo sapiens kinesin-like 4 [synthetic construct]
  misc_feature (193)..(363): Homolog of NCBI NO: 15237852 NR Description: kinesin-related protein; protein id: At5g23910.1 thaliana] >gi|10176858|dbj|BAB10064.1| gene_id:MRO11.5~unknown
MVDSKTPAKTKLLDSSSISNVRVVLRVRPFLPREISDESCDGRSCVSVIGGDGGDTSEVAVYLKDPDSCRNESYQLDAFYGREDDNVKHIFDREVSPLIPGIFHGFNATVLAYGATGSGKTFTMQGIDELPGLMPLTMSTILSMCEKTRSRAEISYYEVYMDRCWDLLEVKDNEIAVWDDKDGQVHLKGLSSVPVKSMSEFQEAYLCGVQRRKVAHTGLNDVSSRSHGVLVISVTSQGLVTGKINLIDLAGNEDNRRTGNEGIRLQESAKINQSLFALSNVVYALNNNLPRVPYRETKLTRILQDSLGGTSRALMVACLNPGEYQESLRTVSLAARSRHISNNVSLNPKVETPKVKIDMEAKLQAWLESKGKMKSAHRMMAIRSPLMGTNQTSISQSSVKKLLCHRSAIAESAKLAGTGQRDAFVTARNLFGVETLAASHLWEPIRNLQLASPTKEDERDTSGEENLLVSEASLRDNTLDVEKKYTELSPLREALSPIDSNAKPNSAHGSSPFLKPMTPKTPFLSTNPEIMQMEGTCQKFNAWSNNLKTSLIKEYIHFLNTANREELRELKGIGQKMAEYIIELRETSPLKSLTDLEKIGFTSRQVHNLFKKATEGVLEKPVSASTTP

SEQ ID NO: 85067 - protein, 505 aa, Arabidopsis thaliana
  peptide (1)..(505): Ceres Seq. ID no. 12678627
  misc_feature (1)..(488): Homolog of NCBI NO: 6901499 NR Description: kinesin [Xenopus laevis]
  misc_feature (1)..(488): Homolog of NCBI NO: 9049953 NR Description: chromokinesin Xkid [Xenopus laevis]
  misc_feature (1)..(488): Homolog of NCBI NO: 21704182 NR Description: kinesin family member 22, pseudo; kinesin family
  misc_feature (1)..(488): Homolog of NCBI NO: 27882016 NR Description: Similar to kinesin family member 22 [Xenopus
  misc_feature (1)..(488): Homolog of NCBI NO: 6901503 NR Description: kinesin [Xenopus laevis]
  misc_feature (1)..(488): Homolog of NCBI NO: 39645862 NR Description: Unknown (protein for MGC:75575) [Silurana
  misc_feature (1)..(488): Homolog of NCBI NO: 34859268 NR Description: similar to kinesin family member 22, pseudo
  misc_feature (1)..(488): Homolog of NCBI NO: 6453818 NR Description: kinesin family member 22; Kid; origin of plasmid
  misc_feature (1)..(488): Homolog of NCBI NO: 30584615 NR Description: Homo sapiens kinesin-like 4 [synthetic construct]
  misc_feature (70)..(240): Homolog of NCBI NO: 15237852 NR Description: kinesin-related protein; protein id: At5g23910.1 thaliana] >gi|10176858|dbj|BAB10064.1| gene_id:MRO11.5~unknown
MQGIDELPGLMPLTMSTILSMCEKTRSRAEISYYEVYMDRCWDLLEVKDNEIAVWDDKDGQVHLKGLSSVPVKSMSEFQEAYLCGVQRRKVAHTGLNDVSSRSHGVLVISVTSQGLVTGKINLIDLAGNEDNRRTGNEGIRLQESAKINQSLFALSNVVYALNNNLPRVPYRETKLTRILQDSLGGTSRALMVACLNPGEYQESLRTVSLAARSRHISNNVSLNPKVETPKVKIDMEAKLQAWLESKGKMKSAHRMMAIRSPLMGTNQTSISQSSVKKLLCHRSAIAESAKLAGTGQRDAFVTARNLFGVETLAASHLWEPIRNLQLASPTKEDERDTSGEENLLVSEASLRDNTLDVEKKYTELSPLREALSPIDSNAKPNSAHGSSPFLKPMTPKTPFLSTNPEIMQMEGTCQKFNAWSNNLKTSLIKEYIHFLNTANREELRELKGIGQKMAEYIIELRETSPLKSLTDLEKIGFTSRQVHNLFKKATEGVLEKPVSASTTP

SEQ ID NO: 85068 - DNA, 783 bp, Arabidopsis thaliana
  misc_feature (1)..(783): Ceres Seq. ID no. 12678628
  misc_feature: MA Experiment ID: 20000185 Result: Down-regulated in Transcription
  misc_feature: MA Experiment 20000185 PARAMETER Experiment Name: At_Roots__P Parameter: Age (day) Value: 7 vs. 21
  misc_feature: MA Experiment 20000185 PARAMETER Experiment Name: At_Roots__P Parameter: Organism Value: A. thaliana
  misc_feature: MA Experiment 20000185 PARAMETER Experiment Name: At_Roots__P Parameter: Tissue Value: Roots vs. Whole Plant
  misc_feature: MA Experiment ID: 20000439 Result: Down-regulated in Transcription
  misc_feature: MA Experiment 20000439 PARAMETER Experiment Name: At_Roots__P Parameter: Age (day) Value: 14 vs. 21
  misc_feature: MA Experiment 20000439 PARAMETER Experiment Name: At_Roots__P Parameter: Organism Value: A. thaliana
  misc_feature: MA Experiment 20000439 PARAMETER Experiment Name: At_Roots__P Parameter: Tissue Value: Roots vs. Whole Plant
acaatggcgaatcttcccaccgttctcgtcaccggcgctagtggcagaacaggccagattgtgtataagaagctgaaggaggggtcagacaagtttgtagcaaagggtttagttagaagtgctcaaggaaaagagaaaattggaggagaagctgatgttttcattggggatataacagatgctgatagcattaaccctgcgtttcaaggaatcgatgcgcttgtgattctcactagtgctgtgcctaaaatgaaacctggttttgatcccactaaaggtggaagacctgagttcattttcgaagatggacaaccaatccggatcatcctttgaacaaactgggaaatgggaatatactggtttggaagagaaaggctgaacagtaccttgctgattctggaactccttacacaattatcagagctggaggacttctagataaggaaggcggtgtacgagagctgctagttggtaaagacgatgagctacttcagacagacacgaaaaccgtccccagggctgatgttgcagaagtctgcattcaggcattgctgttcgaggaggccaagaacaaagctttcgatctcggctcaaagccagagggaaccagtaccccaaccaaagacttcaaggctctcttctctcaagtcacctctcgtttttaaatcattatctttgttgccaataagaacatttgggatcaaaccttctaaaataaattctgtagtgtctatttgaaaggatacgttctttcaattcaatgagaatattggggttgaatgt

SEQ ID NO: 85069 - protein, 110 aa, Arabidopsis thaliana
  peptide (1)..(110): Ceres Seq. ID no. 12678629
  misc_feature (2)..(104): Homolog of NCBI NO: 18413869 NR Description: putative protein; protein id: At5g02240.1, by cDNA: gi_15294289 [Arabidopsis thaliana] AT5g02240/T7H20_290 [Arabidopsis thaliana]
  misc_feature (2)..(104): Homolog of NCBI NO: 11358410 NR Description: hypothetical protein T7H20.290 - Arabidopsis >gi|7340698|emb|CAB82997.1| putative protein [Arabidopsis
  misc_feature (6)..(103): Homolog of NCBI NO: 34897418 NR Description: unknown protein [Oryza sativa (japonica
  misc_feature (5)..(103): Homolog of NCBI NO: 14719331 NR Description: putative 3-beta hydroxysteroid
  misc_feature (7)..(103): Homolog of NCBI NO: 7485430 NR Description: hypothetical protein At2g37660 [imported] -
  misc_feature (7)..(103): Homolog of NCBI NO: 18404496 NR Description: expressed protein; protein id: At2g37660.1, by cDNA: 13797., supported by cDNA: gi_14596078, supported by gi_20148254 [Arabidopsis thaliana]
  misc_feature (7)..(80): Homolog of NCBI NO: 29367513 NR Description: unknown [Oryza sativa (japonica cultivar-group)]
TMANLPTVLVTGASGRTGQIVYKKLKEGSDKFVAKGLVRSAQGKEKIGGEADVFIGDITDADSINPAFQGIDALVILTSAVPKMKPGFDPTKGGRPEFIFEDGQPIRIIL

SEQ ID NO: 85070 - protein, 109 aa, Arabidopsis thaliana
  peptide (1)..(109): Ceres Seq. ID no. 12678630
  misc_feature (1)..(103): Homolog of NCBI NO: 18413869 NR Description: putative protein; protein id: At5g02240.1, by cDNA: gi_15294289 [Arabidopsis thaliana] AT5g02240/T7H20_290 [Arabidopsis thaliana]
  misc_feature (1)..(103): Homolog of NCBI NO: 11358410 NR Description: hypothetical protein T7H20.290 - Arabidopsis >gi|7340698|emb|CAB82997.1| putative protein [Arabidopsis
  misc_feature (5)..(102): Homolog of NCBI NO: 34897418 NR Description: unknown protein [Oryza sativa (japonica
  misc_feature (4)..(102): Homolog of NCBI NO: 14719331 NR Description: putative 3-beta hydroxysteroid
  misc_feature (6)..(102): Homolog of NCBI NO: 7485430 NR Description: hypothetical protein At2g37660 [imported] -
  misc_feature (6)..(102): Homolog of NCBI NO: 18404496 NR Description: expressed protein; protein id: At2g37660.1, by cDNA: 13797., supported by cDNA: gi_14596078, supported by gi_20148254 [Arabidopsis thaliana]
  misc_feature (6)..(79): Homolog of NCBI NO: 29367513 NR Description: unknown [Oryza sativa (japonica cultivar-group)]
MANLPTVLVTGASGRTGQIVYKKLKEGSDKFVAKGLVRSAQGKEKIGGEADVFIGDITDADSINPAFQGIDALVILTSAVPKMKPGFDPTKGGRPEFIFEDGQPIRIIL

SEQ ID NO: 85071 - protein, 85 aa, Arabidopsis thaliana
  peptide (1)..(85): Ceres Seq. ID no. 12678631
MSYFRQTRKPSPGLMLQKSAFRHCCSRRPRTKLSISAQSQREPVPQPKTSRLSSLKSPLVFKSLSLLPIRTFGIKPSKINSVVSI

SEQ ID NO: 85072 - DNA, 630 bp, Arabidopsis thaliana
  misc_feature (1)..(630): Ceres Seq. ID no. 12678644
  misc_feature: MA Experiment ID: 108461 Result: Up-regulated in Transcription
  misc_feature: MA Experiment 108461 PARAMETER Experiment Name: At_Germinating_Seeds_cDNA_P Parameter: Age (day) Value: 1 vs. 0
  misc_feature: MA Experiment 108461 PARAMETER Experiment Name: At_Germinating_Seeds_cDNA_P Parameter: Tissue Value: Germinating Seeds
  misc_feature: MA Experiment ID: 108462 Result: Up-regulated in Transcription
  misc_feature: MA Experiment 108462 PARAMETER Experiment Name: At_Germinating_Seeds_cDNA_P Parameter: Age (day) Value: 2 vs. 0
  misc_feature: MA Experiment 108462 PARAMETER Experiment Name: At_Germinating_Seeds_cDNA_P Parameter: Tissue Value: Germinating Seeds
  misc_feature: MA Experiment ID: 108463 Result: Up-regulated in Transcription
  misc_feature: MA Experiment 108463 PARAMETER Experiment Name: At_Germinating_Seeds_cDNA_P Parameter: Age (day) Value: 3 vs. 0
  misc_feature: MA Experiment 108463 PARAMETER Experiment Name: At_Germinating_Seeds_cDNA_P Parameter: Tissue Value: Germinating Seeds
  misc_feature: MA Experiment ID: 20000180 Result: Up-regulated in Transcription
  misc_feature: MA Experiment 20000180 PARAMETER Experiment Name: At_Germinating_Seeds_P Parameter: Age (hr) Value: 24 vs. 0
  misc_feature: MA Experiment 20000180 PARAMETER Experiment Name: At_Germinating_Seeds_P Parameter: Tissue Value: Germinating Seeds
  misc_feature: MA Experiment ID: 20000185 Result: Up-regulated in Transcription
  misc_feature: MA Experiment 20000185 PARAMETER Experiment Name: At_Roots__P Parameter: Age (day) Value: 7 vs. 21
  misc_feature: MA Experiment 20000185 PARAMETER Experiment Name: At_Roots__P Parameter: Organism Value: A. thaliana
  misc_feature: MA Experiment 20000185 PARAMETER Experiment Name: At_Roots__P Parameter: Tissue Value: Roots vs. Whole Plant
  misc_feature: MA Experiment ID: 20001557 Result: Down-regulated in Transcription
  misc_feature: MA Experiment 20001557 PARAMETER Experiment Name: At_Drought_Soil_Dry_P Parameter: Age (day) Value: 27
  misc_feature: MA Experiment 20001557 PARAMETER Experiment Name: At_Drought_Soil_Dry_P Parameter: Organism Value: A. thaliana
  misc_feature: MA Experiment 20001557 PARAMETER Experiment Name: At_Drought_Soil_Dry_P Parameter: Plant Line Value: WS
  misc_feature: MA Experiment 20001557 PARAMETER Experiment Name: At_Drought_Soil_Dry_P Parameter: Post Timepoint (hr) Value: 3
  misc_feature: MA Experiment 20001557 PARAMETER Experiment Name: At_Drought_Soil_Dry_P Parameter: Post-Treatment Value: Re-Water vs. No Drought
  misc_feature: MA Experiment 20001557 PARAMETER Experiment Name: At_Drought_Soil_Dry_P Parameter: Timepoint (day) Value: 13
  misc_feature: MA Experiment 20001557 PARAMETER Experiment Name: At_Drought_Soil_Dry_P Parameter: Treatment Value: Drought vs. No Drought
  misc_feature: MA Experiment ID: 20001560 Result: Down-regulated in Transcription
  misc_feature: MA Experiment 20001560 PARAMETER Experiment Name: At_Drought_Soil_Dry_P Parameter: Age (day) Value: 28
  misc_feature: MA Experiment 20001560 PARAMETER Experiment Name: At_Drought_Soil_Dry_P Parameter: Organism Value: A. thaliana
  misc_feature: MA Experiment 20001560 PARAMETER Experiment Name: At_Drought_Soil_Dry_P Parameter: Plant Line Value: WS
  misc_feature: MA Experiment 20001560 PARAMETER Experiment Name: At_Drought_Soil_Dry_P Parameter: Post Timepoint (hr) Value: None
  misc_feature: MA Experiment 20001560 PARAMETER Experiment Name: At_Drought_Soil_Dry_P Parameter: Post-Treatment Value: None
  misc_feature: MA Experiment 20001560 PARAMETER Experiment Name: At_Drought_Soil_Dry_P Parameter: Timepoint (day) Value: 14
  misc_feature: MA Experiment 20001560 PARAMETER Experiment Name: At_Drought_Soil_Dry_P Parameter: Treatment Value: Drought vs. No Drought
  misc_feature: MA Experiment ID: 20001757 Result: Down-regulated in Transcription
  misc_feature: MA Experiment 20001757 PARAMETER Experiment Name: At_50mM_NH4NO3_L-to-H_P Parameter: Timepoint (hr) Value: 6
  misc_feature: MA Experiment 20001757 PARAMETER Experiment Name: At_50mM_NH4NO3_L-to-H_P Parameter: Tissue Value: Leaf
  misc_feature: MA Experiment 20001757 PARAMETER Experiment Name: At_50mM_NH4NO3_L-to-H_P Parameter: Treatment Value: 50mM NH4NO3 vs 100mM Mannitol
agatcaaaatcagaatcagaatcaaatttctcgtcgtgtcggagtaaatcaagccatggattccggaaccaaagtgaagaaaggagccgctggaagaagaagtggtggaggtcctaagaagaaaccggtttcccgttcggttaaatccggtctacagtttcctgtcggtaggatcggtcggtatcttaagaaaggtcgttattcgaagcgtgtcggaaccggagctccggtctatctcgccgccgtcctcgagtatcttgctgctgaggttctcgagcttgctggtaacgctgcaagagataacaaaaagaaccgtattataccacgccatgttctattagcggtgaggaacgacgaggagctagggacactactcaaaggcgtaaccattgcacacggcggtgttttaccaaacataaacccaatactcctcccaaagaagtctgagaaagcagcttcaactacaaaaacacccaaatcaccatcaaaggcaaccaaatcccctaagaaatcttagtacttctttcttcattcctctgtataacctactgtttctatctctctgtacgtttctctgtaaagacagaacagaatatctctttgttgttgtgagaaagcttagtttctctg

SEQ ID NO: 85073 - protein, 171 aa, Arabidopsis thaliana; identical to SEQ ID NO: 26064
  peptide (1)..(171): Ceres Seq. ID no. 12678645
  misc_feature (24)..(147): Pfam Name: Core histone H2A/H2B/H3/H4 Pfam Description: Core histone H2A/H2B/H3/H4
  misc_feature (19)..(171): Homolog of NCBI NO: 15241857 NR Description: putative protein; protein id: At5g02560.1, by cDNA: 1553. [Arabidopsis thaliana] >gi|11275238|pir||T48277
  misc_feature (19)..(171): Homolog of NCBI NO: 7649159 NR Description: histone H2A [Euphorbia esula]
  misc_feature (19)..(171): Homolog of NCBI NO: 122006 NR Description: HISTONE H2A >gi|81906|pir||JQ1183 histone H2A -
  misc_feature (21)..(171): Homolog of NCBI NO: 34914498 NR Description: putative histone H2A [Oryza sativa (japonica group)] >gi|13873032|dbj|BAB44136.1| putative histone H2A [Oryza
  misc_feature (19)..(171): Homolog of NCBI NO: 729669 NR Description: Histone H2A >gi|2118992|pir||S60474 histone H2A -
  misc_feature (21)..(171): Homolog of NCBI NO: 729671 NR Description: Histone H2A >gi|7439704|pir||T02076 histone H2A -
  misc_feature (19)..(171): Homolog of NCBI NO: 122007 NR Description: Histone H2A >gi|100161|pir||S11498 histone H2A -
  misc_feature (19)..(171): Homolog of NCBI NO: 121974 NR Description: HISTONE H2A.2.1 >gi|70710|pir||HSWT2A histone
  misc_feature (19)..(171): Homolog of NCBI NO: 27529852 NR Description: H2A histone [Nicotiana tabacum]
  misc_feature (19)..(171): Homolog of NCBI NO: 121982 NR Description: HISTONE H2A.2.2

SEQ ID NO: 85074 - protein, 153 aa, Arabidopsis thaliana; identical to SEQ ID NO: 26065
  peptide (1)..(153): Ceres Seq. ID no. 12678646
  misc_feature (6)..(129): Pfam Name: Core histone H2A/H2B/H3/H4 Pfam Description: Core histone H2A/H2B/H3/H4
  misc_feature (1)..(153): Homolog of NCBI NO: 15241857 NR Description: putative protein; protein id: At5g02560.1, by cDNA: 1553. [Arabidopsis thaliana] >gi|11275238|pir||T48277
  misc_feature (1)..(153): Homolog of NCBI NO: 7649159 NR Description: histone H2A [Euphorbia esula]
  misc_feature (1)..(153): Homolog of NCBI NO: 122006 NR Description: HISTONE H2A >gi|81906|pir||JQ1183 histone H2A -
  misc_feature (3)..(153): Homolog of NCBI NO: 34914498 NR Description: putative histone H2A [Oryza sativa (japonica group)] >gi|13873032|dbj|BAB44136.1| putative histone H2A [Oryza
  misc_feature (1)..(153): Homolog of NCBI NO: 729669 NR Description: Histone H2A >gi|2118992|pir||S60474 histone H2A -
  misc_feature (3)..(153): Homolog of NCBI NO: 729671 NR Description: Histone H2A >gi|7439704|pir||T02076 histone H2A -
  misc_feature (1)..(153): Homolog of NCBI NO: 122007 NR Description: Histone H2A >gi|100161|pir||S11498 histone H2A -
  misc_feature (1)..(153): Homolog of NCBI NO: 121974 NR Description: HISTONE H2A.2.1 >gi|70710|pir||HSWT2A histone
  misc_feature (1)..(153): Homolog of NCBI NO: 27529852 NR Description: H2A histone [Nicotiana tabacum]
  misc_feature (1)..(153): Homolog of NCBI NO: 121982 NR Description: HISTONE H2A.2.2

SEQ ID NO: 85075 - DNA, 2979 bp, Arabidopsis thaliana
  misc_feature (1)..(2979): Ceres Seq. ID no. 12678718
  misc_feature: MA Experiment ID: 20000184 Result: Down-regulated in Transcription
  misc_feature: MA Experiment 20000184 PARAMETER Experiment Name: At_Shoots__P Parameter: Age (day) Value: 7
  misc_feature: MA Experiment 20000184 PARAMETER Experiment Name: At_Shoots__P Parameter: Tissue Value: Shoots vs. Whole Plant
  misc_feature: MA Experiment ID: 20001451 Result: Up-regulated in Transcription
  misc_feature: MA Experiment 20001451 PARAMETER Experiment Name: At_Far-red-induction_P Parameter: Age (day) Value: 7
  misc_feature: MA Experiment 20001451 PARAMETER Experiment Name: At_Far-red-induction_P Parameter: Light Value: Far-red vs. White
  misc_feature: MA Experiment 20001451 PARAMETER Experiment Name: At_Far-red-induction_P Parameter: Organism Value: A. thaliana
  misc_feature: MA Experiment 20001451 PARAMETER Experiment Name: At_Far-red-induction_P Parameter: Plant Line Value: Columbia
  misc_feature: MA Experiment 20001451 PARAMETER Experiment Name: At_Far-red-induction_P Parameter: Timepoint (hr) Value: 24
  misc_feature: MA Experiment 20001451 PARAMETER Experiment Name: At_Far-red-induction_P Parameter: Tissue Value: Whole Plant
agggaaagatagagaatggataatggagggagcgtgttgtcgctctctgctccacacttcccttactccgccaccattctccgacgtcactctccggtggcttccatatctttctcccttaagcaaccaccaccgcaaccaccagaacctcctgagagtcctcctgacctccgccgcccggagaaatctattggttcttcttcatcttcttcctctccttcccctatcccttctcctaaaacccctcttaagattaatccactcaagggtttaaccaatcgctcttctgtgtctcctcttgttcaatcagaggtttcgagtaaagtttcttcctttggctcctctctagcatccaagctacgtttgtccagcaagctctctcctcctcctcctcctccacctccgcctcctgttgaggaaaccacccaattccgagatgagtttcggagtgacacgaaaccaccggaagaagaaactcgaaacccgcaacaggaattccgacaagaagggaagatattcgttggtaatttaccgacatggataaagaaaccagagtttgaagagttcttccgacagttcggaccgatagagaatgtgattctaatcaaaggacatcacgaggtcgagaaaaacgcgggatttgggttcattatttacgcggcagagaagtctgcaatgaaagctgtggagttcgacggcgttgagtttcacggcaggatattgacggtgaagctagacgacggaaagaggctgaaaacaaaggctgaacagagagtgaggtgggtagaggaaggagaagaagacacgaaaatgtctaataagtcgtcgtggcatcaagagagagaagggtctcgaaagtcactacagaggattttagataccaatggagataactggcaagctgttatttcagctttcgagaagatcagcaagccttcgaggacagagtttggtttgatggtgaagttctatggaagaagaggggatatgcatcgtgcacgtgagacttttgagagaatgcgcgcgaggggtatcacaccaacatcacgtatatacacaagccttattcacgcttatgcagttggtagagacatggacgaagcactgtcttgtgttcgtaaaatgaaggaagaaggaattgagatgagtttggtgacttatagtgtaatcgttggaggattctctaaagcgggacatgccgaagctgcagattactggtttgacgaggccaaacggatacacaaaacccttaatgccagtatatatggaaaaatcatatatgcacactgtcagacgtgcaatatggagcgggcagaggcattggtgagggagatggaagaagaaggtattgatgctcctattgctatctaccacaccatgatggatggttatacaatggtcgctgatgagaagaaaggcttagttgttttcaaaagacttaaggaatgtggatttactccaacagttgttacttatgggtgcctcattaatctttatactaaggttggaaagatttcaaaagccttggaagttagtagagtgatgaaggaagagggcgtaaagcataatttaaagacttattcgatgatgattaacggatttgtaaaactaaaagattgggccaatgcgtttgctgtatttgaagatatggtaaaagaaggcatgaaaccagatgttatactatacaacaacatcatctcagcattctgcgggatgggtaacatggatcgagcgatccagactgttaaggagatgcaaaagctgaggcatagaccaaccacacggacatttatgcctatcatacatggatatgcgaaatccggagacatgaggagatcactagaagtttttgatatgatgagacgatgtgggtgtgttccaaccgttcatactttcaatggtttgattaatggtttagttgagaaacgtcagatggaaaaggcggttgagatattagacgagatgacattggcgggtgtaagtgcaaacgaacatacttacacaaagatcatgcaaggctatgcatcagtcggtgataccggaaaagcctttgagtattttacaaggcttcaaaacgaaggtttggatgttgacattttcacttacgaggcgttacttaaagcttgctgcaaatcaggaagaatgcagagcgcattagctgtcacgaaagaaatgagtgcacggaatatcccgcgcaattccttcgtctataacatattaatcgacggatgggcacgaagaggcgatgtatgggaagccgcggatttgatacagcagatgaaaaaagaaggtgttaaacccgacattcatacttacacatccttcattagcgcttgttctaaggccggcgacatgaatagagctacacaaacaatcgaagaaatggaagcactaggtgtgaaacctaacatcaagacatacacgaccttaataaaaggatgggcgagagcatctcttccagagaaagccttaagttgctacgaggaaatgaaggcgatggggataaaacccgacaaagctgtgtatcattgccttctgacttcgcttctgtcgcgtgcttcaatcgcagaagcttacatttactcaggagtgatgactatctgcaaggaaatggtggaggcaggcttgattgttgatatgggaactgcggttcactggtctaaatgtctgtgtaagattgaagcttcaggtggtgagctcactgagacgttgcagaagactttcccacctgattggagctcgcatcatcatcaccatggcttcttagatcaagtttctgatgttgactccgatgaagatgatgttgatggtgaagatggtgaggacgatgaagatgttaactctgtttcggatttattatcaccttacaagtaagaaaaaactgatattgtaacaacttaaggaaagagcaatatcagcatatttttgtaattttgttttcttgtgttttacgtttttgcaaaataaaccttattgaac

SEQ ID NO: 85076 - protein, 952 aa, Arabidopsis thaliana
  peptide (1)..(952): Ceres Seq. ID no. 12678719
  misc_feature (167)..(238): Pfam Name: RNA recognition motif. (a.k.a. RRM, RBD, or RNP domain) Pfam Description: RNA recognition motif. (a.k.a. RRM, RBD, or RNP
  misc_feature (398)..(952): Homolog of NCBI NO: 18414702 NR Description: putative protein; protein id: At5g04810.1
  misc_feature (524)..(912): Homolog of NCBI NO: 7489198 NR Description: salt-inducible protein, membrane-associated -
  misc_feature (314)..(868): Homolog of NCBI NO: 34902570 NR Description: Putative indole-3-acetate
  misc_feature (347)..(846): Homolog of NCBI NO: 34906814 NR Description: similar to membrane-associated salt-inducible
  misc_feature (303)..(833): Homolog of NCBI NO: 34902570 NR Description: Putative indole-3-acetate
  misc_feature (332)..(874): Homolog of NCBI NO: 30840221 NR Description: fertility restorer [Raphanus sativus]
  misc_feature (332)..(874): Homolog of NCBI NO: 30840327 NR Description: fertility restorer homologue [Raphanus sativus]
  misc_feature (333)..(860): Homolog of NCBI NO: 34394343 NR Description: putative fertility restorer homologue [Oryza
  misc_feature (347)..(850): Homolog of NCBI NO: 15221610 NR Description: hypothetical protein; protein id: At1g62860.1
  misc_feature (342)..(877): Homolog of NCBI NO: 15221282 NR Description: hypothetical protein; protein id: At1g12300.1
MDNGGSVLSLSAPHFPYSATILRRHSPVASISFSLKQPPPQPPEPPESPPDLRRPEKSIGSSSSSSSPSPIPSPKTPLKINPLKGLTNRSSVSPLVQSEVSSKVSSFGSSLASKLRLSSKLSPPPPPPPPPPVEETTQFRDEFRSDTKPPEEETRNPQQEFRQEGKIFVGNLPTWIKKPEFEEFFRQFGPIENVILIKGHHEVEKNAGFGFIIYAAEKSAMKAVEFDGVEFHGRILTVKLDDGKRLKTKAEQRVRWVEEGEEDTKMSNKSSWHQEREGSRKSLQRILDTNGDNWQAVISAFEKISKPSRTEFGLMVKFYGRRGDMHRARETFERMRARGITPTSRIYTSLIHAYAVGRDMDEALSCVRKMKEEGIEMSLVTYSVIVGGFSKAGHAEAADYWFDEAKRIHKTLNASIYGKIIYAHCQTCNMERAEALVREMEEEGIDAPIAIYHTMMDGYTMVADEKKGLVVFKRLKECGFTPTVVTYGCLINLYTKVGKISKALEVSRVMKEEGVKHNLKTYSMMINGFVKLKDWANAFAVFEDMVKEGMKPDVILYNNIISAFCGMGNMDRAIQTVKEMQKLRHRPTTRTFMPIIHGYAKSGDMRRSLEVFDMMRRCGCVPTVHTFNGLINGLVEKRQMEKAVEILDEMTLAGVSANEHTYTKIMQGYASVGDTGKAFEYFTRLQNEGLDVDIFTYEALLKACCKSGRMQSALAVTKEMSARNIPRNSFVYNILIDGWARRGDVWEAADLIQQMKKEGVKPDIHTYTSFISACSKAGDMNRATQTIEEMEALGVKPNIKTYTTLIKGWARASLPEKALSCYEEMKAMGIKPDKAVYHCLLTSLLSRASIAEAYIYSGVMTICKEMVEAGLIVDMGTAVHWSKCLCKIEASGGELTETLQKTFPPDWSSHHHHHGFLDQVSDVDSDEDDVDGEDGEDDEDVNSVSDLLSPYK

SEQ ID NO: 85077 - protein, 732 aa, Arabidopsis thaliana
  peptide (1)..(732): Ceres Seq. ID no. 12678720
  misc_feature (370)..(404): Pfam Name: PPR repeat Pfam Description: PPR repeat
  misc_feature (178)..(732): Homolog of NCBI NO: 18414702 NR Description: putative protein; protein id: At5g04810.1
  misc_feature (304)..(692): Homolog of NCBI NO: 7489198 NR Description: salt-inducible protein, membrane-associated -
  misc_feature (94)..(648): Homolog of NCBI NO: 34902570 NR Description: Putative indole-3-acetate
  misc_feature (127)..(626): Homolog of NCBI NO: 34906814 NR Description: similar to membrane-associated salt-inducible
  misc_feature (83)..(613): Homolog of NCBI NO: 34902570 NR Description: Putative indole-3-acetate
  misc_feature (112)..(654): Homolog of NCBI NO: 30840221 NR Description: fertility restorer [Raphanus sativus]
  misc_feature (112)..(654): Homolog of NCBI NO: 30840327 NR Description: fertility restorer homologue [Raphanus sativus]
  misc_feature (113)..(640): Homolog of NCBI NO: 34394343 NR Description: putative fertility restorer homologue [Oryza
  misc_feature (127)..(630): Homolog of NCBI NO: 15221610 NR Description: hypothetical protein; protein id: At1g62860.1
  misc_feature (122)..(657): Homolog of NCBI NO: 15221282 NR Description: hypothetical protein; protein id: At1g12300.1
MKAVEFDGVEFHGRILTVKLDDGKRLKTKAEQRVRWVEEGEEDTKMSNKSSWHQEREGSRKSLQRILDTNGDNWQAVISAFEKISKPSRTEFGLMVKFYGRRGDMHRARETFERMRARGITPTSRIYTSLIHAYAVGRDMDEALSCVRKMKEEGIEMSLVTYSVIVGGFSKAGHAEAADYWFDEAKRIHKTLNASIYGKIIYAHCQTCNMERAEALVREMEEEGIDAPIAIYHTMMDGYTMVADEKKGLVVFKRLKECGFTPTVVTYGCLINLYTKVGKISKALEVSRVMKEEGVKHNLKTYSMMINGFVKLKDWANAFAVFEDMVKEGMKPDVILYNNIISAFCGMGNMDRAIQTVKEMQKLRHRPTTRTFMPIIHGYAKSGDMRRSLEVFDMMRRCGCVPTVHTFNGLINGLVEKRQMEKAVEILDEMTLAGVSANEHTYTKIMQGYASVGDTGKAFEYFTRLQNEGLDVDIFTYEALLKACCKSGRMQSALAVTKEMSARNIPRNSFVYNILIDGWARRGDVWEAADLIQQMKKEGVKPDIHTYTSFISACSKAGDMNRATQTIEEMEALGVKPNIKTYTTLIKGWARASLPEKALSCYEEMKAMGIKPDKAVYHCLLTSLLSRASIAEAYIYSGVMTICKEMVEAGLIVDMGTAVHWSKCLCKIEASGGELTETLQKTFPPDWSSHHHHHGFLDQVSDVDSDEDDVDGEDGEDDEDVNSVSDLLSPYK

SEQ ID NO: 85078 - protein, 687 aa, Arabidopsis thaliana
  peptide (1)..(687): Ceres Seq. ID no. 12678721
  misc_feature (325)..(359): Pfam Name: PPR repeat Pfam Description: PPR repeat
  misc_feature (133)..(687): Homolog of NCBI NO: 18414702 NR Description: putative protein; protein id: At5g04810.1
  misc_feature (259)..(647): Homolog of NCBI NO: 7489198 NR Description: salt-inducible protein, membrane-associated -
  misc_feature (49)..(603): Homolog of NCBI NO: 34902570 NR Description: Putative indole-3-acetate
  misc_feature (82)..(581): Homolog of NCBI NO: 34906814 NR Description: similar to membrane-associated salt-inducible
  misc_feature (38)..(568): Homolog of NCBI NO: 34902570 NR Description: Putative indole-3-acetate
  misc_feature (67)..(609): Homolog of NCBI NO: 30840221 NR Description: fertility restorer [Raphanus sativus]
  misc_feature (67)..(609): Homolog of NCBI NO: 30840327 NR Description: fertility restorer homologue [Raphanus sativus]
  misc_feature (68)..(595): Homolog of NCBI NO: 34394343 NR Description: putative fertility restorer homologue [Oryza
  misc_feature (82)..(585): Homolog of NCBI NO: 15221610 NR Description: hypothetical protein; protein id: At1g62860.1
  misc_feature (77)..(612): Homolog of NCBI NO: 15221282 NR Description: hypothetical protein; protein id: At1g12300.1
MSNKSSWHQEREGSRKSLQRILDTNGDNWQAVISAFEKISKPSRTEFGLMVKFYGRRGDMHRARETFERMRARGITPTSRIYTSLIHAYAVGRDMDEALSCVRKMKEEGIEMSLVTYSVIVGGFSKAGHAEAADYWFDEAKRIHKTLNASIYGKIIYAHCQTCNMERAEALVREMEEEGIDAPIAIYHTMMDGYTMVADEKKGLVVFKRLKECGFTPTVVTYGCLINLYTKVGKISKALEVSRVMKEEGVKHNLKTYSMMINGFVKLKDWANAFAVFEDMVKEGMKPDVILYNNIISAFCGMGNMDRAIQTVKEMQKLRHRPTTRTFMPIIHGYAKSGDMRRSLEVFDMMRRCGCVPTVHTFNGLINGLVEKRQMEKAVEILDEMTLAGVSANEHTYTKIMQGYASVGDTGKAFEYFTRLQNEGLDVDIFTYEALLKACCKSGRMQSALAVTKEMSARNIPRNSFVYNILIDGWARRGDVWEAADLIQQMKKEGVKPDIHTYTSFISACSKAGDMNRATQTIEEMEALGVKPNIKTYTTLIKGWARASLPEKALSCYEEMKAMGIKPDKAVYHCLLTSLLSRASIAEAYIYSGVMTICKEMVEAGLIVDMGTAVHWSKCLCKIEASGGELTETLQKTFPPDWSSHHHHHGFLDQVSDVDSDEDDVDGEDGEDDEDVNSVSDLLSPYK

SEQ ID NO: 85079 - DNA, 1831 bp, Arabidopsis thaliana
  misc_feature (1)..(1831): Ceres Seq. ID no. 12678733
  misc_feature: MA Experiment ID: 108434 Result: Down-regulated in Transcription
  misc_feature: MA Experiment 108434 PARAMETER Experiment Name: At_Root_Tips_cDNA_P Parameter: Tissue Value: Root Tips
  misc_feature: MA Experiment ID: 108461 Result: Up-regulated in Transcription
  misc_feature: MA Experiment 108461 PARAMETER Experiment Name: At_Germinating_Seeds_cDNA_P Parameter: Age (day) Value: 1 vs. 0
  misc_feature: MA Experiment 108461 PARAMETER Experiment Name: At_Germinating_Seeds_cDNA_P Parameter: Tissue Value: Germinating Seeds
  misc_feature: MA Experiment ID: 108462 Result: Up-regulated in Transcription
  misc_feature: MA Experiment 108462 PARAMETER Experiment Name: At_Germinating_Seeds_cDNA_P Parameter: Age (day) Value: 2 vs. 0
  misc_feature: MA Experiment 108462 PARAMETER Experiment Name: At_Germinating_Seeds_cDNA_P Parameter: Tissue Value: Germinating Seeds
  misc_feature: MA Experiment ID: 108463 Result: Up-regulated in Transcription
  misc_feature: MA Experiment 108463 PARAMETER Experiment Name: At_Germinating_Seeds_cDNA_P Parameter: Age (day) Value: 3 vs. 0
  misc_feature: MA Experiment 108463 PARAMETER Experiment Name: At_Germinating_Seeds_cDNA_P Parameter: Tissue Value: Germinating Seeds
  misc_feature: MA Experiment ID: 108464 Result: Up-regulated in Transcription
  misc_feature: MA Experiment 108464 PARAMETER Experiment Name: At_Germinating_Seeds_cDNA_P Parameter: Age (day) Value: 4 vs. 0
  misc_feature: MA Experiment 108464 PARAMETER Experiment Name: At_Germinating_Seeds_cDNA_P Parameter: Tissue Value: Germinating Seeds
  misc_feature: MA Experiment ID: 108474 Result: Down-regulated in Transcription
  misc_feature: MA Experiment 108474 PARAMETER Experiment Name: At_Drought_Flowers_cDNA_P Parameter: Timepoint (hr) Value: null
  misc_feature: MA Experiment 108474 PARAMETER Experiment Name: At_Drought_Flowers_cDNA_P Parameter: Treatment Value: Drought vs. No Drought
  misc_feature: MA Experiment ID: 108489 Result: Up-regulated in Transcription
  misc_feature: MA Experiment ID: 20000227 Result: Down-regulated in Transcription
  misc_feature: MA Experiment 20000227 PARAMETER Experiment Name: At_Root-Tips-vs-Tops_P Parameter: Tissue Value: Root Tips vs. Root Tops
  misc_feature: MA Experiment ID: 20000264 Result: Up-regulated in Transcription
  misc_feature: MA Experiment 20000264 PARAMETER Experiment Name: At_Open_Flower_P Parameter: Age (day) Value: 21
  misc_feature: MA Experiment 20000264 PARAMETER Experiment Name: At_Open_Flower_P Parameter: Plant Line Value: WS
  misc_feature: MA Experiment 20000264 PARAMETER Experiment Name: At_Open_Flower_P Parameter: Tissue Value: Open Flower vs. Whole Plant
  misc_feature: MA Experiment ID: 20000286 Result: Up-regulated in Transcription
  misc_feature: MA Experiment 20000286 PARAMETER Experiment Name: At_Open_Flower_P Parameter: Age (day) Value: 21
  misc_feature: MA Experiment 20000286 PARAMETER Experiment Name: At_Open_Flower_P Parameter: Plant Line Value: WS
  misc_feature: MA Experiment 20000286 PARAMETER Experiment Name: At_Open_Flower_P Parameter: Tissue Value: Half Open vs. Whole Plant
  misc_feature: MA Experiment ID: 20000451 Result: Down-regulated in Transcription
  misc_feature: MA Experiment 20000451 PARAMETER Experiment Name: At_CS6879_Shoots-Roots_P Parameter: Age (day) Value: 14
  misc_feature: MA Experiment 20000451 PARAMETER Experiment Name: At_CS6879_Shoots-Roots_P Parameter: Organism Value: A. thaliana
  misc_feature: MA Experiment 20000451 PARAMETER Experiment Name: At_CS6879_Shoots-Roots_P Parameter: Plant Line Value: CS6879 vs. WS
  misc_feature: MA Experiment 20000451 PARAMETER Experiment Name: At_CS6879_Shoots-Roots_P Parameter: Tissue Value: Roots
  misc_feature: MA Experiment ID: 20000460 Result: Up-regulated in Transcription
  misc_feature: MA Experiment 20000460 PARAMETER Experiment Name: At_10percent_PEG_P Parameter: Age (day) Value: 12
  misc_feature: MA Experiment 20000460 PARAMETER Experiment Name: At_10percent_PEG_P Parameter: Organism Value: A. thaliana
  misc_feature: MA Experiment 20000460 PARAMETER Experiment Name: At_10percent_PEG_P Parameter: Plant Line Value: WS
  misc_feature: MA Experiment 20000460 PARAMETER Experiment Name: At_10percent_PEG_P Parameter: Timepoint (day) Value: 12
  misc_feature: MA Experiment 20000460 PARAMETER Experiment Name: At_10percent_PEG_P Parameter: Tissue Value: Whole Plant
  misc_feature: MA Experiment 20000460 PARAMETER Experiment Name: At_10percent_PEG_P Parameter: Treatment Value: 10percent PEG vs. No Treatment
  misc_feature: MA Experiment ID: 20000527 Result: Up-regulated in Transcription
  misc_feature: MA Experiment 20000527 PARAMETER Experiment Name: At_10percent_PEG_P Parameter: Age (day) Value: 20
  misc_feature: MA Experiment 20000527 PARAMETER Experiment Name: At_10percent_PEG_P Parameter: Organism Value: A. thaliana
  misc_feature: MA Experiment 20000527 PARAMETER Experiment Name: At_10percent_PEG_P Parameter: Plant Line Value: WS
  misc_feature: MA Experiment 20000527 PARAMETER Experiment Name: At_10percent_PEG_P Parameter: Timepoint (day) Value: 20
  misc_feature: MA Experiment 20000527 PARAMETER Experiment Name: At_10percent_PEG_P Parameter: Tissue Value: Whole Plant
  misc_feature: MA Experiment 20000527 PARAMETER Experiment Name: At_10percent_PEG_P Parameter: Treatment Value: 10percent PEG vs. No Treatment
  misc_feature: MA Experiment ID: 20001248 Result: Up-regulated in Transcription
  misc_feature: MA Experiment 20001248 PARAMETER Experiment Name: At_Far-red-induction_P Parameter: Age (day) Value: 7
  misc_feature: MA Experiment 20001248 PARAMETER Experiment Name: At_Far-red-induction_P Parameter: Light Value: Far-red vs. White
  misc_feature: MA Experiment 20001248 PARAMETER Experiment Name: At_Far-red-induction_P Parameter: Organism Value: A. thaliana
  misc_feature: MA Experiment 20001248 PARAMETER Experiment Name: At_Far-red-induction_P Parameter: Plant Line Value: Columbia
  misc_feature: MA Experiment 20001248 PARAMETER Experiment Name: At_Far-red-induction_P Parameter: Timepoint (hr) Value: 4
  misc_feature: MA Experiment 20001248 PARAMETER Experiment Name: At_Far-red-induction_P Parameter: Tissue Value: Whole Plant
  misc_feature: MA Experiment ID: 20001450 Result: Up-regulated in Transcription
  misc_feature: MA Experiment 20001450 PARAMETER Experiment Name: At_Far-red-induction_P Parameter: Age (day) Value: 7
  misc_feature: MA Experiment 20001450 PARAMETER Experiment Name: At_Far-red-induction_P Parameter: Light Value: Far-red vs. White
  misc_feature: MA Experiment 20001450 PARAMETER Experiment Name: At_Far-red-induction_P Parameter: Organism Value: A. thaliana
  misc_feature: MA Experiment 20001450 PARAMETER Experiment Name: At_Far-red-induction_P Parameter: Plant Line Value: Columbia
  misc_feature: MA Experiment 20001450 PARAMETER Experiment Name: At_Far-red-induction_P Parameter: Timepoint (hr) Value: 8
  misc_feature: MA Experiment 20001450 PARAMETER Experiment Name: At_Far-red-induction_P Parameter: Tissue Value: Whole Plant
aaagatcaactctttcaaacacttactctgcatgtaacttcatagattgaacgaagaaccaaaaaaacagagcaaaacaaacaaaagatggttcaaaaccaccaaacagttctcgccgtcgatatgccacaaaccggcggctccaagtacttggacgacgacgggaaaaacaaaagaactgggagtgtttggacggcgagtgcacacataataacggcagtgataggttcgggagttttgtcactagcgtgggctacggcgcagctaggttggctcgccggaccggtggtgatgttgctcttctctgccgtcacttatttcacttcttctcttcttgctgcttgttaccgctccggcgaccctatctccggcaagaggaactacacttatatggatgctgtccgatcaaatctcggtggcgtgaaggtgacgctatgtgggattgttcagtatcttaatatctttggtgttgctattggctacacaattgcttcagctataagcatgatggcaataaagagatcaaactgtttccacaagagtggagggaaagatccatgtcacatgaacagtaatccttacatgatagcttttggattagtccagattctattctctcagattccagattttgatcaactttggtggctctcaatcctcgccgccgttatgtccttcacttattcctcagccggtctcgccctcggcatagcccaagttgtcgttaatgggaaggtgaagggaagtctcactgggattagcataggagcagtaacagagacacagaagatatggaggacctttcaagctcttggagacattgcttttgcttactcttactccattatcctcatcgagattcaggacacagtgaagtcaccaccatcagaagagaagacgatgaagaaggcaacacttgtgagcgtcagtgtaacgactatgttctatatgttgtgtggatgtatgggatatgcagcctttggagacttgtctccgggaaatctcttaaccggtttcgggttttataatccttattggcttcttgacattgcaaatgcagccattgtgattcaccttattggtgcataccaagtctattgccaacctctgtttgctttcatcgagaagcaagcttccattcaattccctgatagtgagttcattgcaaaagatatcaaaattccaattcctggtttcaagcctctccgcttgaatgtcttcaggttgatatggaggacagtgtttgtgatcataacgacagttatctcaatgcttcttccgtttttcaacgacgttgtgggtctgctcggggcactagggttttggccattgacggtgtattttccagtggaaatgtacatcgcgcagaagaagatacctagatggagcaccagatgggtttgccttcaagtcttcagcttagggtgtctagtagttagcattgctgcagctgcagggtccatagctggagtacttcttgatctaaagtcctacaagccatttcgaagcgaatactgatcaacttgaatagtagccaattcaaagcgatgactaagtcagttttaaacacaatggatttatcaagaacagtcaagagaaccaagaaccatgaatttgggaattttgatcagcttttttttatatagatagaagcaataatgctgttagttcttctctataatcttctctgtaccctgaaggcaagaattgtagtcctaatgagtaaatcttcgattaatgacagagtcatgtgctgcaacagaatcatgaactagcaccataatagtatattaccattgtggtaaaatttcaataacaagttcttgtactt

SEQ ID NO: 85080 - protein, 476 aa, Arabidopsis thaliana
  peptide (1)..(476): Ceres Seq. ID no. 12678734
  misc_feature (1)..(476): Homolog of NCBI NO: 15223930 NR Description: amino acid carrier, putative; protein id: supported by cDNA: 15825., supported by cDNA: gi_20466643
  misc_feature (1)..(476): Homolog of NCBI NO: 21553710 NR Description: amino acid carrier, putative [Arabidopsis
  misc_feature (5)..(476): Homolog of NCBI NO: 7442735 NR Description: amino acid transport protein AAP1 - castor bean
  misc_feature (13)..(476): Homolog of NCBI NO: 4164408 NR Description: amino acid carrier [Ricinus communis]
  misc_feature (13)..(476): Homolog of NCBI NO: 15242347 NR Description: amino acid transport protein AAP2; protein id: supported by cDNA: 114602., supported by cDNA: gi_19699270 thaliana] >gi|1076287|pir||S52421 amino acid transport amine acid
  misc_feature (13)..(476): Homolog of NCBI NO: 21536895 NR Description: amino acid transport protein AAP2 [Arabidopsis
  misc_feature (11)..(476): Homolog of NCBI NO: 15237539 NR Description: amino acid transporter AAP4 (pir||S51169); id: At5g63850.1, supported by cDNA: 116681., supported by cDNA: [Arabidopsis thaliana] >gi|10177673|dbj|BAB11033.1| amino acid
  misc_feature (11)..(476): Homolog of NCBI NO: 20260650 NR Description: amino acid transporter AAP4 [Arabidopsis >gi|28059439|gb|AAO30058.1| amino acid transporter AAP4
  misc_feature (11)..(476): Homolog of NCBI NO: 608671 NR Description: amino acid transporter [Arabidopsis thaliana]
  misc_feature (17)..(474): Homolog of NCBI NO: 27447657 NR Description: amino acid transporter [Lycopersicon esculentum]
MVQNHQTVLAVDMPQTGGSKYLDDDGKNKRTGSVWTASAHIITAVIGSGVLSLAWATAQLGWLAGPVVMLLFSAVTYFTSSLLAACYRSGDPISGKRNYTYMDAVRSNLGGVKVTLCGIVQYLNIFGVAIGYTIASAISMMAIKRSNCFHKSGGKDPCHMNSNPYMIAFGLVQILFSQIPDFDQLWWLSILAAVMSFTYSSAGLALGIAQVVVNGKVKGSLTGISIGAVTETQKIWRTFQALGDIAFAYSYSIILIEIQDTVKSPPSEEKTMKKATLVSVSVTTMFYMLCGCMGYAAFGDLSPGNLLTGFGFYNPYWLLDIANAAIVIHLIGAYQVYCQPLFAFIEKQASIQFPDSEFIAKDIKIPIPGFKPLRLNVFRLIWRTVFVIITTVISMLLPFFNDVVGLLGALGFWPLTVYFPVEMYIAQKKIPRWSTRWVCLQVFSLGCLVVSIAAAAGSIAGVLLDLKSYKPFRSEY

SEQ ID NO: 85081 - protein, 464 aa, Arabidopsis thaliana
  peptide (1)..(464): Ceres Seq. ID no. 12678735
  misc_feature (1)..(464): Homolog of NCBI NO: 15223930 NR Description: amino acid carrier, putative; protein id: supported by cDNA: 15825., supported by cDNA: gi_20466643
  misc_feature (1)..(464): Homolog of NCBI NO: 21553710 NR Description: amino acid carrier, putative [Arabidopsis
  misc_feature (1)..(464): Homolog of NCBI NO: 7442735 NR Description: amino acid transport protein AAP1 - castor bean
  misc_feature (1)..(464): Homolog of NCBI NO: 4164408 NR Description: amino acid carrier [Ricinus communis]
  misc_feature (1)..(464): Homolog of NCBI NO: 15242347 NR Description: amino acid transport protein AAP2; protein id: supported by cDNA: 114602., supported by cDNA: gi_19699270 thaliana] >gi|1076287|pir||S52421 amino acid transport amine acid
  misc_feature (1)..(464): Homolog of NCBI NO: 21536895 NR Description: amino acid transport protein AAP2 [Arabidopsis
  misc_feature (1)..(464): Homolog of NCBI NO: 15237539 NR Description: amino acid transporter AAP4 (pir||S51169); id: At5g63850.1, supported by cDNA: 116681., supported by cDNA: [Arabidopsis thaliana] >gi|10177673|dbj|BAB11033.1| amino acid
  misc_feature (1)..(464): Homolog of NCBI NO: 20260650 NR Description: amino acid transporter AAP4 [Arabidopsis >gi|28059439|gb|AAO30058.1| amino acid transporter AAP4
  misc_feature (1)..(464): Homolog of NCBI NO: 608671 NR Description: amino acid transporter [Arabidopsis thaliana]
  misc_feature (5)..(462): Homolog of NCBI NO: 27447657 NR Description: amino acid transporter [Lycopersicon esculentum]
MPQTGGSKYLDDDGKNKRTGSVWTASAHIITAVIGSGVLSLAWATAQLGWLAGPVVMLLFSAVTYFTSSLLAACYRSGDPISGKRNYTYMDAVRSNLGGVKVTLCGIVQYLNIFGVAIGYTIASAISMMAIKRSNCFHKSGGKDPCHMNSNPYMIAFGLVQILFSQIPDFDQLWWLSILAAVMSFTYSSAGLALGIAQVVVNGKVKGSLTGISIGAVTETQKIWRTFQALGDIAFAYSYSIILIEIQDTVKSPPSEEKTMKKATLVSVSVTTMFYMLCGCMGYAAFGDLSPGNLLTGFGFYNPYWLLDIANAAIVIHLIGAYQVYCQPLFAFIEKQASIQFPDSEFIAKDIKIPIPGFKPLRLNVFRLIWRTVFVIITTVISMLLPFFNDVVGLLGALGFWPLTVYFPVEMYIAQKKIPRWSTRWVCLQVFSLGCLVVSIAAAAGSIAGVLLDLKSYKPFRSEY

SEQ ID NO: 85082 - protein, 408 aa, Arabidopsis thaliana
  peptide (1)..(408): Ceres Seq. ID no. 12678736
  misc_feature (1)..(408): Homolog of NCBI NO: 15223930 NR Description: amino acid carrier, putative; protein id: supported by cDNA: 15825., supported by cDNA: gi_20466643
  misc_feature (1)..(408): Homolog of NCBI NO: 21553710 NR Description: amino acid carrier, putative [Arabidopsis
  misc_feature (1)..(408): Homolog of NCBI NO: 7442735 NR Description: amino acid transport protein AAP1 - castor bean
  misc_feature (1)..(408): Homolog of NCBI NO: 4164408 NR Description: amino acid carrier [Ricinus communis]
  misc_feature (1)..(408): Homolog of NCBI NO: 15242347 NR Description: amino acid transport protein AAP2; protein id: supported by cDNA: 114602., supported by cDNA: gi_19699270 thaliana] >gi|1076287|pir||S52421 amino acid transport amine acid
  misc_feature (1)..(408): Homolog of NCBI NO: 21536895 NR Description: amino acid transport protein AAP2 [Arabidopsis
  misc_feature (1)..(408): Homolog of NCBI NO: 15237539 NR Description: amino acid transporter AAP4 (pir||S51169); id: At5g63850.1, supported by cDNA: 116681., supported by cDNA: [Arabidopsis thaliana] >gi|10177673|dbj|BAB11033.1| amino acid
  misc_feature (1)..(408): Homolog of NCBI NO: 20260650 NR Description: amino acid transporter AAP4 [Arabidopsis >gi|28059439|gb|AAO30058.1| amino acid transporter AAP4
  misc_feature (1)..(408): Homolog of NCBI NO: 608671 NR Description: amino acid transporter [Arabidopsis thaliana]
  misc_feature (1)..(406): Homolog of NCBI NO: 27447657 NR Description: amino acid transporter [Lycopersicon esculentum]
MLLFSAVTYFTSSLLAACYRSGDPISGKRNYTYMDAVRSNLGGVKVTLCGIVQYLNIFGVAIGYTIASAISMMAIKRSNCFHKSGGKDPCHMNSNPYMIAFGLVQILFSQIPDFDQLWWLSILAAVMSFTYSSAGLALGIAQVVVNGKVKGSLTGISIGAVTETQKIWRTFQALGDIAFAYSYSIILIEIQDTVKSPPSEEKTMKKATLVSVSVTTMFYMLCGCMGYAAFGDLSPGNLLTGFGFYNPYWLLDIANAAIVIHLIGAYQVYCQPLFAFIEKQASIQFPDSEFIAKDIKIPIPGFKPLRLNVFRLIWRTVFVIITTVISMLLPFFNDVVGLLGALGFWPLTVYFPVEMYIAQKKIPRWSTRWVCLQVFSLGCLVVSIAAAAGSIAGVLLDLKSYKPFRSEY

SEQ ID NO: 85083 - DNA, 2253 bp, Arabidopsis thaliana
  misc_feature (1)..(2253): Ceres Seq. ID no. 12678739
  misc_feature: MA Experiment ID: 20000173 Result: Down-regulated in Transcription
  misc_feature: MA Experiment 20000173 PARAMETER Experiment Name: At_42deg_Heat_P Parameter: Age (day) Value: 14
  misc_feature: MA Experiment 20000173 PARAMETER Experiment Name: At_42deg_Heat_P Parameter: Organism Value: A. thaliana
  misc_feature: MA Experiment 20000173 PARAMETER Experiment Name: At_42deg_Heat_P Parameter: Plant Line Value: WS
  misc_feature: MA Experiment 20000173 PARAMETER Experiment Name: At_42deg_Heat_P Parameter: Temperature (deg C) Value: 42 vs. 22
  misc_feature: MA Experiment 20000173 PARAMETER Experiment Name: At_42deg_Heat_P Parameter: Timepoint (hr) Value: 6
  misc_feature: MA Experiment 20000173 PARAMETER Experiment Name: At_42deg_Heat_P Parameter: Tissue Value: Aerial
  misc_feature: MA Experiment ID: 20000180 Result: Up-regulated in Transcription
  misc_feature: MA Experiment 20000180 PARAMETER Experiment Name: At_Germinating_Seeds_P Parameter: Age (hr) Value: 24 vs. 0
  misc_feature: MA Experiment 20000180 PARAMETER Experiment Name: At_Germinating_Seeds_P Parameter: Tissue Value: Germinating Seeds
  misc_feature: MA Experiment ID: 20000182 Result: Up-regulated in Transcription
  misc_feature: MA Experiment 20000182 PARAMETER Experiment Name: At_2mM_SA_P Parameter: Age (day) Value: 14
  misc_feature: MA Experiment 20000182 PARAMETER Experiment Name: At_2mM_SA_P Parameter: Organism Value: A. thaliana
  misc_feature: MA Experiment 20000182 PARAMETER Experiment Name: At_2mM_SA_P Parameter: Plant Line Value: WS
  misc_feature: MA Experiment 20000182 PARAMETER Experiment Name: At_2mM_SA_P Parameter: Timepoint (hr) Value: 6
  misc_feature: MA Experiment 20000182 PARAMETER Experiment Name: At_2mM_SA_P Parameter: Tissue Value: Aerial
  misc_feature: MA Experiment 20000182 PARAMETER Experiment Name: At_2mM_SA_P Parameter: Treatment Value: 2mM SA vs. No Treatment
  misc_feature: MA Experiment ID: 20000184 Result: Down-regulated in Transcription
  misc_feature: MA Experiment 20000184 PARAMETER Experiment Name: At_Shoots__P Parameter: Age (day) Value: 7
  misc_feature: MA Experiment 20000184 PARAMETER Experiment Name: At_Shoots__P Parameter: Tissue Value: Shoots vs. Whole Plant
  misc_feature: MA Experiment ID: 20000185 Result: Up-regulated in Transcription
  misc_feature: MA Experiment 20000185 PARAMETER Experiment Name: At_Roots__P Parameter: Age (day) Value: 7 vs. 21
  misc_feature: MA Experiment 20000185 PARAMETER Experiment Name: At_Roots__P Parameter: Organism Value: A. thaliana
  misc_feature: MA Experiment 20000185 PARAMETER Experiment Name: At_Roots__P Parameter: Tissue Value: Roots vs. Whole Plant
  misc_feature: MA Experiment ID: 20000438 Result: Down-regulated in Transcription
  misc_feature: MA Experiment 20000438 PARAMETER Experiment Name: At_Shoots__P Parameter: Age (day) Value: 14
  misc_feature: MA Experiment 20000438 PARAMETER Experiment Name: At_Shoots__P Parameter: Tissue Value: Shoots vs. Whole Plant
ttttccaaccggagaatcatcgagtggaggagaacgcgcaatggccgtcggattctggatttagaaacacaggagtgcaacggagatcgccgtctccgttacctcctccgtcaccacctacggtttcaacttgggattttttgaatgtgtttgatacttatgattacagcaacgcccgttctcgtgcttcgggatattatccgatgggaatggcgtcaatctcaagcagtcctgattcgaaggaagttagagaaagagaagggattcctgagctagaagaagtaacagagcaagaagttatcaagcaagtgtatagacgtcccaagagaccaggattggagaaggttaaagaacacagagacgagcacaagcacaacgtttttcctgagaggaacattaacaaaagggaagttccaatgccagaacaagtcactgagagctcattggattcagagacaatttcgtctttttcaggaagtgatgtagaatcggagtttcactatgttaatggtggtgaaggaaagagtagcagcatcagttcaatcagtcatggggctgggacaaagagctcgagagaagtagaagaacagtatgggaggaaaaaaggagtgagctttgagttggaggaaacaacgagcacttcgtcttttgatgttgaatcttccaagataagtagcttatccagtttgtcgattcatgccactagggatctcagagaagttgttaaggagatcaagagtgagttcgagattgcttcttcttgtgggaaggaggttgctttgttacttgaagtcggcaagttgccttatcagcataaaaacaatggcgttaaagttatcttatccaggatcatgtatctggtagcaccatccacacggtcatcgcactctcagcccagactatcaatacgtttaacatctagaactcgaaaaatggcgaaatcatacaatggacaagatgttaatggaggcttcaatggaaacctctcatcaaccttagagaaactgtatgcgtgggaaaagaaactgtacaaggaagtcaaggacgaagaaaagcttcgtgctatctatgaagagaagtgcaggagactaaaaaaaatggatagtcatggagcagaatctatcaagatcgatgctactcgggcagccattaggaagcttctgaccaaaatcgatgtttgtataagatcagttgattcgatttccagcagaatccataaacttagagatgaagagttgcagccacagttgatacagttaattcacgggttgataagaatgtggaggtcaatgctgaggtgccaccagaaacagtttcaggcgatcagggagagcaaggttcgatctctaaaggcgaacacaaccttacaaaatgactctggctctacagcaattcttgatcttgagatagagcttagagaatggtgcatcagcttcaacaactgggtcaacacccagaaatcatacgtccagttcctaagcggatggctcacgaaatgccttcactatgaacccgaggcaaccgatgacggaatcgctcctttctctcctagccagatcggtgcaccgcccatctttatcatttgcaaagattggcaagaagcaatgtgtagaatatctggagagaatgtgaccaatgcaatgcaaggttttgcttcaagcctacacgagctatgggagaagcaagaagaagagcaaagggtaaaagcgcaatctgagcagcgagatgcagagtcagagagaagtgtggtttcgaaaggtcggtcagagagcgggatatcagctttggatgatttgaaagtggatttagattcaatgaggaagaggctagtcgaggagagaggtaagggtaaagaaaccattaagcttgtgaacaacgcgtcttcgagcagcttaaaagctggtttagttcccattttcggggcactgagaaaattcacatcagaagttgtgaaagctcatgaaattgttaggcttcaacatcctcagacctcttcttgagtagagagtgtggacttaccacatttttgcaccgttttgaagttttgttacttgcaaattagacataggtctatatagaaggaaattgttgtatagatgagttcatattcaattattggttggttagtttcccttgtaaaccgtttttaaatggtgaagaagaagatatctagtttgccttgtaagccgttacttgctgaattaaaaagaatgtaatatgactgttcctggttgagattaaaaggaaaatagg

SEQ ID NO: 85084 - protein, 665 aa, Arabidopsis thaliana
  peptide (1)..(665): Ceres Seq. ID no. 12678740
  misc_feature (217)..(558): Pfam Name: Protein of unknown function (DUF632) Pfam Description: Protein of unknown function (DUF632)
  misc_feature (30)..(665): Homolog of NCBI NO: 15219083 NR Description: putative bzip-like transcription factor; protein At1g21740.1 [Arabidopsis thaliana] >gi|25518309|pir||A86351
  misc_feature (148)..(657): Homolog of NCBI NO: 34905788 NR Description: bzip-like transcription factor-like [Oryza sativa
  misc_feature (327)..(654): Homolog of NCBI NO: 15236929 NR Description: putative protein; protein id: At4g35240.1
  misc_feature (18)..(108): Homolog of NCBI NO: 15236929 NR Description: putative protein; protein id: At4g35240.1
  misc_feature (235)..(623): Homolog of NCBI NO: 32526673 NR Description: bzip-like transcription factor-like protein
  misc_feature (29)..(98): Homolog of NCBI NO: 32526673 NR Description: bzip-like transcription factor-like protein
  misc_feature (595)..(662): Homolog of NCBI NO: 32526673 NR Description: bzip-like transcription factor-like protein
  misc_feature (261)..(660): Homolog of NCBI NO: 18398315 NR Description: expressed protein; protein id: At2g17110.1, by cDNA: gi_15724285 [Arabidopsis thaliana] AT4g35240/F23E12_200 [Arabidopsis thaliana]
  misc_feature (349)..(657): Homolog of NCBI NO: 38345928 NR Description: OSJNBb0078D11.3 [Oryza sativa (japonica
  misc_feature (13)..(103): Homolog of NCBI NO: 38345928 NR Description: OSJNBb0078D11.3 [Oryza sativa (japonica
FQPENHRVEENAQWPSDSGFRNTGVQRRSPSPLPPPSPPTVSTWDFLNVFDTYDYSNARSRASGYYPMGMASISSSPDSKEVREREGIPELEEVTEQEVIKQVYRRPKRPGLEKVKEHRDEHKHNVFPERNINKREVPMPEQVTESSLDSETISSFSGSDVESEFHYVNGGEGKSSSISSISHGAGTKSSREVEEQYGRKKGVSFELEETTSTSSFDVESSKISSLSSLSIHATRDLREVVKEIKSEFEIASSCGKEVALLLEVGKLPYQHKNNGVKVILSRIMYLVAPSTRSSHSQPRLSIRLTSRTRKMAKSYNGQDVNGGFNGNLSSTLEKLYAWEKKLYKEVKDEEKLRAIYEEKCRRLKKMDSHGAESIKIDATRAAIRKLLTKIDVCIRSVDSISSRIHKLRDEELQPQLIQLIHGLIRMWRSMLRCHQKQFQAIRESKVRSLKANTTLQNDSGSTAILDLEIELREWCISFNNWVNTQKSYVQFLSGWLTKCLHYEPEATDDGIAPFSPSQIGAPPIFIICKDWQEAMCRISGENVTNAMQGFASSLHELWEKQEEEQRVKAQSEQRDAESERSVVSKGRSESGISALDDLKVDLDSMRKRLVEERGKGKETIKLVNNASSSSLKAGLVPIFGALRKFTSEVVKAHEIVRLQHPQTSS

SEQ ID NO: 85085 - protein, 598 aa, Arabidopsis thaliana
  peptide (1)..(598): Ceres Seq. ID no. 12678741
  misc_feature (150)..(491): Pfam Name: Protein of unknown function (DUF632) Pfam Description: Protein of unknown function (DUF632)
  misc_feature (1)..(598): Homolog of NCBI NO: 15219083 NR Description: putative bzip-like transcription factor; protein At1g21740.1 [Arabidopsis thaliana] >gi|25518309|pir||A86351
  misc_feature (81)..(590): Homolog of NCBI NO: 34905788 NR Description: bzip-like transcription factor-like [Oryza sativa
  misc_feature (260)..(587): Homolog of NCBI NO: 15236929 NR Description: putative protein; protein id: At4g35240.1
  misc_feature (1)..(41): Homolog of NCBI NO: 15236929 NR Description: putative protein; protein id: At4g35240.1
  misc_feature (168)..(556): Homolog of NCBI NO: 32526673 NR Description: bzip-like transcription factor-like protein
  misc_feature (1)..(31): Homolog of NCBI NO: 32526673 NR Description: bzip-like transcription factor-like protein
  misc_feature (528)..(595): Homolog of NCBI NO: 32526673 NR Description: bzip-like transcription factor-like protein
  misc_feature (194)..(593): Homolog of NCBI NO: 18398315 NR Description: expressed protein; protein id: At2g17110.1, by cDNA: gi_15724285 [Arabidopsis thaliana] AT4g35240/F23E12_200 [Arabidopsis thaliana]
  misc_feature (282)..(590): Homolog of NCBI NO: 38345928 NR Description: OSJNBb0078D11.3 [Oryza sativa (japonica
  misc_feature (1)..(36): Homolog of NCBI NO: 38345928 NR Description: OSJNBb0078D11.3 [Oryza sativa (japonica
MGMASISSSPDSKEVREREGIPELEEVTEQEVIKQVYRRPKRPGLEKVKEHRDEHKHNVFPERNINKREVPMPEQVTESSLDSETISSFSGSDVESEFHYVNGGEGKSSSISSISHGAGTKSSREVEEQYGRKKGVSFELEETTSTSSFDVESSKISSLSSLSIHATRDLREVVKEIKSEFEIASSCGKEVALLLEVGKLPYQHKNNGVKVILSRIMYLVAPSTRSSHSQPRLSIRLTSRTRKMAKSYNGQDVNGGFNGNLSSTLEKLYAWEKKLYKEVKDEEKLRAIYEEKCRRLKKMDSHGAESIKIDATRAAIRKLLTKIDVCIRSVDSISSRIHKLRDEELQPQLIQLIHGLIRMWRSMLRCHQKQFQAIRESKVRSLKANTTLQNDSGSTAILDLEIELREWCISFNNWVNTQKSYVQFLSGWLTKCLHYEPEATDDGIAPFSPSQIGAPPIFIICKDWQEAMCRISGENVTNAMQGFASSLHELWEKQEEEQRVKAQSEQRDAESERSVVSKGRSESGISALDDLKVDLDSMRKRLVEERGKGKETIKLVNNASSSSLKAGLVPIFGALRKFTSEVVKAHEIVRLQHPQTSS

SEQ ID NO: 85086 - protein, 596 aa, Arabidopsis thaliana
  peptide (1)..(596): Ceres Seq. ID no. 12678742
  misc_feature (148)..(489): Pfam Name: Protein of unknown function (DUF632) Pfam Description: Protein of unknown function (DUF632)
  misc_feature (1)..(596): Homolog of NCBI NO: 15219083 NR Description: putative bzip-like transcription factor; protein At1g21740.1 [Arabidopsis thaliana] >gi|25518309|pir||A86351
  misc_feature (79)..(588): Homolog of NCBI NO: 34905788 NR Description: bzip-like transcription factor-like [Oryza sativa
  misc_feature (258)..(585): Homolog of NCBI NO: 15236929 NR Description: putative protein; protein id: At4g35240.1
  misc_feature (1)..(39): Homolog of NCBI NO: 15236929 NR Description: putative protein; protein id: At4g35240.1
  misc_feature (166)..(554): Homolog of NCBI NO: 32526673 NR Description: bzip-like transcription factor-like protein
  misc_feature (1)..(29): Homolog of NCBI NO: 32526673 NR Description: bzip-like transcription factor-like protein
  misc_feature (526)..(593): Homolog of NCBI NO: 32526673 NR Description: bzip-like transcription factor-like protein
  misc_feature (192)..(591): Homolog of NCBI NO: 18398315 NR Description: expressed protein; protein id: At2g17110.1, by cDNA: gi_15724285 [Arabidopsis thaliana] AT4g35240/F23E12_200 [Arabidopsis thaliana]
  misc_feature (280)..(588): Homolog of NCBI NO: 38345928 NR Description: OSJNBb0078D11.3 [Oryza sativa (japonica
  misc_feature (1)..(34): Homolog of NCBI NO: 38345928 NR Description: OSJNBb0078D11.3 [Oryza sativa (japonica
MASISSSPDSKEVREREGIPELEEVTEQEVIKQVYRRPKRPGLEKVKEHRDEHKHNVFPERNINKREVPMPEQVTESSLDSETISSFSGSDVESEFHYVNGGEGKSSSISSISHGAGTKSSREVEEQYGRKKGVSFELEETTSTSSFDVESSKISSLSSLSIHATRDLREVVKEIKSEFEIASSCGKEVALLLEVGKLPYQHKNNGVKVILSRIMYLVAPSTRSSHSQPRLSIRLTSRTRKMAKSYNGQDVNGGFNGNLSSTLEKLYAWEKKLYKEVKDEEKLRAIYEEKCRRLKKMDSHGAESIKIDATRAAIRKLLTKIDVCIRSVDSISSRIHKLRDEELQPQLIQLIHGLIRMWRSMLRCHQKQFQAIRESKVRSLKANTTLQNDSGSTAILDLEIELREWCISFNNWVNTQKSYVQFLSGWLTKCLHYEPEATDDGIAPFSPSQIGAPPIFIICKDWQEAMCRISGENVTNAMQGFASSLHELWEKQEEEQRVKAQSEQRDAESERSVVSKGRSESGISALDDLKVDLDSMRKRLVEERGKGKETIKLVNNASSSSLKAGLVPIFGALRKFTSEVVKAHEIVRLQHPQTSS

SEQ ID NO: 85087 - DNA, 725 bp, Arabidopsis thaliana
  misc_feature (1)..(725): Ceres Seq. ID no. 12678754
  misc_feature: MA Experiment ID: 20000180 Result: Up-regulated in Transcription
  misc_feature: MA Experiment 20000180 PARAMETER Experiment Name: At_Germinating_Seeds_P Parameter: Age (hr) Value: 24 vs. 0
  misc_feature: MA Experiment 20000180 PARAMETER Experiment Name: At_Germinating_Seeds_P Parameter: Tissue Value: Germinating Seeds
  misc_feature: MA Experiment ID: 20000184 Result: Up-regulated in Transcription
  misc_feature: MA Experiment 20000184 PARAMETER Experiment Name: At_Shoots__P Parameter: Age (day) Value: 7
  misc_feature: MA Experiment 20000184 PARAMETER Experiment Name: At_Shoots__P Parameter: Tissue Value: Shoots vs. Whole Plant
  misc_feature: MA Experiment ID: 20000185 Result: Down-regulated in Transcription
  misc_feature: MA Experiment 20000185 PARAMETER Experiment Name: At_Roots__P Parameter: Age (day) Value: 7 vs. 21
  misc_feature: MA Experiment 20000185 PARAMETER Experiment Name: At_Roots__P Parameter: Organism Value: A. thaliana
  misc_feature: MA Experiment 20000185 PARAMETER Experiment Name: At_Roots__P Parameter: Tissue Value: Roots vs. Whole Plant
  misc_feature: MA Experiment ID: 20000438 Result: Up-regulated in Transcription
  misc_feature: MA Experiment 20000438 PARAMETER Experiment Name: At_Shoots__P Parameter: Age (day) Value: 14
  misc_feature: MA Experiment 20000438 PARAMETER Experiment Name: At_Shoots__P Parameter: Tissue Value: Shoots vs. Whole Plant
  misc_feature: MA Experiment ID: 20000439 Result: Down-regulated in Transcription
  misc_feature: MA Experiment 20000439 PARAMETER Experiment Name: At_Roots__P Parameter: Age (day) Value: 14 vs. 21
  misc_feature: MA Experiment 20000439 PARAMETER Experiment Name: At_Roots__P Parameter: Organism Value: A. thaliana
  misc_feature: MA Experiment 20000439 PARAMETER Experiment Name: At_Roots__P Parameter: Tissue Value: Roots vs. Whole Plant
  misc_feature: MA Experiment ID: 20001451 Result: Down-regulated in Transcription
  misc_feature: MA Experiment 20001451 PARAMETER Experiment Name: At_Far-red-induction_P Parameter: Age (day) Value: 7
  misc_feature: MA Experiment 20001451 PARAMETER Experiment Name: At_Far-red-induction_P Parameter: Light Value: Far-red vs. White
  misc_feature: MA Experiment 20001451 PARAMETER Experiment Name: At_Far-red-induction_P Parameter: Organism Value: A. thaliana
  misc_feature: MA Experiment 20001451 PARAMETER Experiment Name: At_Far-red-induction_P Parameter: Plant Line Value: Columbia
  misc_feature: MA Experiment 20001451 PARAMETER Experiment Name: At_Far-red-induction_P Parameter: Timepoint (hr) Value: 24
  misc_feature: MA Experiment 20001451 PARAMETER Experiment Name: At_Far-red-induction_P Parameter: Tissue Value: Whole Plant
  misc_feature: MA Experiment ID: 20001556 Result: Down-regulated in Transcription
  misc_feature: MA Experiment 20001556 PARAMETER Experiment Name: At_Drought_Soil_Dry_P Parameter: Age (day) Value: 26
  misc_feature: MA Experiment 20001556 PARAMETER Experiment Name: At_Drought_Soil_Dry_P Parameter: Organism Value: A. thaliana
  misc_feature: MA Experiment 20001556 PARAMETER Experiment Name: At_Drought_Soil_Dry_P Parameter: Plant Line Value: WS
  misc_feature: MA Experiment 20001556 PARAMETER Experiment Name: At_Drought_Soil_Dry_P Parameter: Post Timepoint (hr) Value: None
  misc_feature: MA Experiment 20001556 PARAMETER Experiment Name: At_Drought_Soil_Dry_P Parameter: Post-Treatment Value: None
  misc_feature: MA Experiment 20001556 PARAMETER Experiment Name: At_Drought_Soil_Dry_P Parameter: Timepoint (day) Value: 12
  misc_feature: MA Experiment 20001556 PARAMETER Experiment Name: At_Drought_Soil_Dry_P Parameter: Treatment Value: Drought vs. No Drought
  misc_feature: MA Experiment ID: 20001557 Result: Down-regulated in Transcription
  misc_feature: MA Experiment 20001557 PARAMETER Experiment Name: At_Drought_Soil_Dry_P Parameter: Age (day) Value: 27
  misc_feature: MA Experiment 20001557 PARAMETER Experiment Name: At_Drought_Soil_Dry_P Parameter: Organism Value: A. thaliana
  misc_feature: MA Experiment 20001557 PARAMETER Experiment Name: At_Drought_Soil_Dry_P Parameter: Plant Line Value: WS
  misc_feature: MA Experiment 20001557 PARAMETER Experiment Name: At_Drought_Soil_Dry_P Parameter: Post Timepoint (hr) Value: 3
  misc_feature: MA Experiment 20001557 PARAMETER Experiment Name: At_Drought_Soil_Dry_P Parameter: Post-Treatment Value: Re-Water vs. No Drought
  misc_feature: MA Experiment 20001557 PARAMETER Experiment Name: At_Drought_Soil_Dry_P Parameter: Timepoint (day) Value: 13
  misc_feature: MA Experiment 20001557 PARAMETER Experiment Name: At_Drought_Soil_Dry_P Parameter: Treatment Value: Drought vs. No Drought
  misc_feature: MA Experiment ID: 20001558 Result: Down-regulated in Transcription
  misc_feature: MA Experiment 20001558 PARAMETER Experiment Name: At_Drought_Soil_Dry_P Parameter: Age (day) Value: 27
  misc_feature: MA Experiment 20001558 PARAMETER Experiment Name: At_Drought_Soil_Dry_P Parameter: Organism Value: A. thaliana
  misc_feature: MA Experiment 20001558 PARAMETER Experiment Name: At_Drought_Soil_Dry_P Parameter: Plant Line Value: WS
  misc_feature: MA Experiment 20001558 PARAMETER Experiment Name: At_Drought_Soil_Dry_P Parameter: Post Timepoint (hr) Value: 6
  misc_feature: MA Experiment 20001558 PARAMETER Experiment Name: At_Drought_Soil_Dry_P Parameter: Post-Treatment Value: Re-Water vs. No Drought
  misc_feature: MA Experiment 20001558 PARAMETER Experiment Name: At_Drought_Soil_Dry_P Parameter: Timepoint (day) Value: 13
  misc_feature: MA Experiment 20001558 PARAMETER Experiment Name: At_Drought_Soil_Dry_P Parameter: Treatment Value: Drought vs. No Drought
  misc_feature: MA Experiment ID: 20001559 Result: Down-regulated in Transcription
  misc_feature: MA Experiment 20001559 PARAMETER Experiment Name: At_Drought_Soil_Dry_P Parameter: Age (day) Value: 28
  misc_feature: MA Experiment 20001559 PARAMETER Experiment Name: At_Drought_Soil_Dry_P Parameter: Organism Value: A. thaliana
  misc_feature: MA Experiment 20001559 PARAMETER Experiment Name: At_Drought_Soil_Dry_P Parameter: Plant Line Value: WS
  misc_feature: MA Experiment 20001559 PARAMETER Experiment Name: At_Drought_Soil_Dry_P Parameter: Post Timepoint (hr) Value: 29
  misc_feature: MA Experiment 20001559 PARAMETER Experiment Name: At_Drought_Soil_Dry_P Parameter: Post-Treatment Value: Re-Water vs. No Drought
  misc_feature: MA Experiment 20001559 PARAMETER Experiment Name: At_Drought_Soil_Dry_P Parameter: Timepoint (day) Value: 14
  misc_feature: MA Experiment 20001559 PARAMETER Experiment Name: At_Drought_Soil_Dry_P Parameter: Treatment Value: Drought vs. No Drought
  misc_feature: MA Experiment ID: 20001904 Result: Down-regulated in Transcription
  misc_feature: MA Experiment 20001904 PARAMETER Experiment Name: At_Drought_Reproduction_P Parameter: Age (day) Value: 37
  misc_feature: MA Experiment 20001904 PARAMETER Experiment Name: At_Drought_Reproduction_P Parameter: Organism Value: A. thaliana
  misc_feature: MA Experiment 20001904 PARAMETER Experiment Name: At_Drought_Reproduction_P Parameter: Plant Line Value: WS
  misc_feature: MA Experiment 20001904 PARAMETER Experiment Name: At_Drought_Reproduction_P Parameter: Timepoint (day) Value: 7
  misc_feature: MA Experiment 20001904 PARAMETER Experiment Name: At_Drought_Reproduction_P Parameter: Tissue Value: Rosettes
  misc_feature: MA Experiment 20001904 PARAMETER Experiment Name: At_Drought_Reproduction_P Parameter: Treatment Value: Drought vs. No Drought
  misc_feature: MA Experiment ID: 20001905 Result: Down-regulated in Transcription
  misc_feature: MA Experiment 20001905 PARAMETER Experiment Name: At_Drought_Reproduction_P Parameter: Age (day) Value: 40
  misc_feature: MA Experiment 20001905 PARAMETER Experiment Name: At_Drought_Reproduction_P Parameter: Organism Value: A. thaliana
  misc_feature: MA Experiment 20001905 PARAMETER Experiment Name: At_Drought_Reproduction_P Parameter: Plant Line Value: WS
  misc_feature: MA Experiment 20001905 PARAMETER Experiment Name: At_Drought_Reproduction_P Parameter: Timepoint (day) Value: 10
  misc_feature: MA Experiment 20001905 PARAMETER Experiment Name: At_Drought_Reproduction_P Parameter: Tissue Value: Rosettes
  misc_feature: MA Experiment 20001905 PARAMETER Experiment Name: At_Drought_Reproduction_P Parameter: Treatment Value: Drought vs. No Drought
  misc_feature: MA Experiment ID: 20001906 Result: Down-regulated in Transcription
  misc_feature: MA Experiment 20001906 PARAMETER Experiment Name: At_Drought_Reproduction_P Parameter: Age (day) Value: 35
  misc_feature: MA Experiment 20001906 PARAMETER Experiment Name: At_Drought_Reproduction_P Parameter: Organism Value: A. thaliana
  misc_feature: MA Experiment 20001906 PARAMETER Experiment Name: At_Drought_Reproduction_P Parameter: Plant Line Value: WS
  misc_feature: MA Experiment 20001906 PARAMETER Experiment Name: At_Drought_Reproduction_P Parameter: Timepoint (day) Value: 5
  misc_feature: MA Experiment 20001906 PARAMETER Experiment Name: At_Drought_Reproduction_P Parameter: Tissue Value: Siliques
  misc_feature: MA Experiment 20001906 PARAMETER Experiment Name: At_Drought_Reproduction_P Parameter: Treatment Value: Drought vs. No Drought
  misc_feature: MA Experiment ID: 20001908 Result: Down-regulated in Transcription
  misc_feature: MA Experiment 20001908 PARAMETER Experiment Name: At_Drought_Reproduction_P Parameter: Age (day) Value: 40
  misc_feature: MA Experiment 20001908 PARAMETER Experiment Name: At_Drought_Reproduction_P Parameter: Organism Value: A. thaliana
  misc_feature: MA Experiment 20001908 PARAMETER Experiment Name: At_Drought_Reproduction_P Parameter: Plant Line Value: WS
  misc_feature: MA Experiment 20001908 PARAMETER Experiment Name: At_Drought_Reproduction_P Parameter: Timepoint (day) Value: 10
  misc_feature: MA Experiment 20001908 PARAMETER Experiment Name: At_Drought_Reproduction_P Parameter: Tissue Value: Siliques
  misc_feature: MA Experiment 20001908 PARAMETER Experiment Name: At_Drought_Reproduction_P Parameter: Treatment Value: Drought vs. No Drought
aatatgctatgtttagatgctggacctccttcaccagctgatcatttgagagatgttttctacagaatgggacttgatgacaaggaaatagttgccttgtctggtgcacataccttagggagagccagaccagaccgtagtggttggggaaaacctgagacaaagtacacgaaaactggacctggagaagcaggaggacagtcatggacagtgaaatggctcaagttcgacaactcttatttcaaggatatcaaagaaaagagggacgacgatcttctggtgttacccactgatgcggcgctatttgaagatccttcattcaagaactatgcagagaagtatgctgaagatgtggctgcatttttcaaggactacgctgaagcccatgccaagcttagcaatctcggtgcaaaatttgatcctcccgagggcatagtcattgaaaacgttccagagaagttcgtagctgcaaagtattctacgggaaagaaggagctttcggattcgatgaaaaagaagataagagcagagtatgaagcaattggaggaagcccagataagccattacccacaaattacttcctcaacatcataattgccattggcgttttggtcctcttgtccactctctttggtggtaataacaactccgatttctctggtttctaattgacaaattatatattttgatttctcttacctacatacataattacgtggtgatc

SEQ ID NO: 85088 - protein, 222 aa, Arabidopsis thaliana
  peptide (1)..(222): Ceres Seq. ID no. 12678755
  misc_feature (1)..(117): Pfam Name: Peroxidase Pfam Description: Peroxidase
  misc_feature (1)..(222): Homolog of NCBI NO: 1805652 NR Description: thylakoid-bound ascorbate peroxidase [Arabidopsis
  misc_feature (6)..(222): Homolog of NCBI NO: 1419390 NR Description: thylakoid-bound ascorbate peroxidase [Arabidopsis
  misc_feature (6)..(222): Homolog of NCBI NO: 15223971 NR Description: thylakoid-bound ascorbate peroxidase, putative protein id: At1g77490.1, supported by cDNA: 157034. [Arabidopsis
  misc_feature (6)..(212): Homolog of NCBI NO: 4996602 NR Description: thylakoid-bound ascorbate peroxidase [Nicotiana
  misc_feature (6)..(212): Homolog of NCBI NO: 7484766 NR Description: L-ascorbate peroxidase (EC 1.11.1.11) precursor -
  misc_feature (6)..(151): Homolog of NCBI NO: 32879783 NR Description: thylakoid-bound ascorbate peroxidase [Oryza
  misc_feature (151)..(212): Homolog of NCBI NO: 32879783 NR Description: thylakoid-bound ascorbate peroxidase [Oryza
  misc_feature (6)..(212): Homolog of NCBI NO: 7484621 NR Description: L-ascorbate peroxidase (EC 1.11.1.11) precursor -
  misc_feature (6)..(212): Homolog of NCBI NO: 1944507 NR Description: thylakoid-bound ascorbate peroxidase [Spinacia
  misc_feature (6)..(212): Homolog of NCBI NO: 2146725 NR Description: L-ascorbate peroxidase (EC 1.11.1.11) precursor -
NMLCLDAGPPSPADHLRDVFYRMGLDDKEIVALSGAHTLGRARPDRSGWGKPETKYTKTGPGEAGGQSWTVKWLKFDNSYFKDIKEKRDDDLLVLPTDAALFEDPSFKNYAEKYAEDVAAFFKDYAEAHAKLSNLGAKFDPPEGIVIENVPEKFVAAKYSTGKKELSDSMKKKIRAEYEAIGGSPDKPLPTNYFLNIIIAIGVLVLLSTLFGGNNNSDFSGF

SEQ ID NO: 85089 - protein, 221 aa, Arabidopsis thaliana
  peptide (1)..(221): Ceres Seq. ID no. 12678756
  misc_feature (1)..(116): Pfam Name: Peroxidase Pfam Description: Peroxidase
  misc_feature (1)..(221): Homolog of NCBI NO: 1805652 NR Description: thylakoid-bound ascorbate peroxidase [Arabidopsis
  misc_feature (5)..(221): Homolog of NCBI NO: 1419390 NR Description: thylakoid-bound ascorbate peroxidase [Arabidopsis
  misc_feature (5)..(221): Homolog of NCBI NO: 15223971 NR Description: thylakoid-bound ascorbate peroxidase, putative protein id: At1g77490.1, supported by cDNA: 157034. [Arabidopsis
  misc_feature (5)..(211): Homolog of NCBI NO: 4996602 NR Description: thylakoid-bound ascorbate peroxidase [Nicotiana
  misc_feature (5)..(211): Homolog of NCBI NO: 7484766 NR Description: L-ascorbate peroxidase (EC 1.11.1.11) precursor -
  misc_feature (5)..(150): Homolog of NCBI NO: 32879783 NR Description: thylakoid-bound ascorbate peroxidase [Oryza
  misc_feature (150)..(211): Homolog of NCBI NO: 32879783 NR Description: thylakoid-bound ascorbate peroxidase [Oryza
  misc_feature (5)..(211): Homolog of NCBI NO: 7484621 NR Description: L-ascorbate peroxidase (EC 1.11.1.11) precursor -
  misc_feature (5)..(211): Homolog of NCBI NO: 1944507 NR Description: thylakoid-bound ascorbate peroxidase [Spinacia
  misc_feature (5)..(211): Homolog of NCBI NO: 2832920 NR Description: thylakoid-bound ascorbate peroxidase [Spinacia
MLCLDAGPPSPADHLRDVFYRMGLDDKEIVALSGAHTLGRARPDRSGWGKPETKYTKTGPGEAGGQSWTVKWLKFDNSYFKDIKEKRDDDLLVLPTDAALFEDPSFKNYAEKYAEDVAAFFKDYAEAHAKLSNLGAKFDPPEGIVIENVPEKFVAAKYSTGKKELSDSMKKKIRAEYEAIGGSPDKPLPTNYFLNIIIAIGVLVLLSTLFGGNNNSDFSGF

SEQ ID NO: 85090 - protein, 200 aa, Arabidopsis thaliana
  peptide (1)..(200): Ceres Seq. ID no. 12678757
  misc_feature (1)..(95): Pfam Name: Peroxidase Pfam Description: Peroxidase
  misc_feature (1)..(200): Homolog of NCBI NO: 1805652 NR Description: thylakoid-bound ascorbate peroxidase [Arabidopsis
  misc_feature (1)..(200): Homolog of NCBI NO: 1419390 NR Description: thylakoid-bound ascorbate peroxidase [Arabidopsis
  misc_feature (1)..(200): Homolog of NCBI NO: 15223971 NR Description: thylakoid-bound ascorbate peroxidase, putative protein id: At1g77490.1, supported by cDNA: 157034. [Arabidopsis
  misc_feature (1)..(190): Homolog of NCBI NO: 4996602 NR Description: thylakoid-bound ascorbate peroxidase [Nicotiana
  misc_feature (1)..(190): Homolog of NCBI NO: 7484766 NR Description: L-ascorbate peroxidase (EC 1.11.1.11) precursor -
  misc_feature (1)..(129): Homolog of NCBI NO: 32879783 NR Description: thylakoid-bound ascorbate peroxidase [Oryza
  misc_feature (129)..(190): Homolog of NCBI NO: 32879783 NR Description: thylakoid-bound ascorbate peroxidase [Oryza
  misc_feature (1)..(190): Homolog of NCBI NO: 7484621 NR Description: L-ascorbate peroxidase (EC 1.11.1.11) precursor -
  misc_feature (1)..(190): Homolog of NCBI NO: 1944507 NR Description: thylakoid-bound ascorbate peroxidase [Spinacia
  misc_feature (1)..(190): Homolog of NCBI NO: 2146725 NR Description: L-ascorbate peroxidase (EC 1.11.1.11) precursor -
MGLDDKEIVALSGAHTLGRARPDRSGWGKPETKYTKTGPGEAGGQSWTVKWLKFDNSYFKDIKEKRDDDLLVLPTDAALFEDPSFKNYAEKYAEDVAAFFKDYAEAHAKLSNLGAKFDPPEGIVIENVPEKFVAAKYSTGKKELSDSMKKKIRAEYEAIGGSPDKPLPTNYFLNIIIAIGVLVLLSTLFGGNNNSDFSGF

SEQ ID NO: 85091 - DNA, 774 bp, Arabidopsis thaliana
  misc_feature (1)..(774): Ceres Seq. ID no. 12678798
  misc_feature: MA Experiment ID: 108462 Result: Down-regulated in Transcription
  misc_feature: MA Experiment 108462 PARAMETER Experiment Name: At_Germinating_Seeds_cDNA_P Parameter: Age (day) Value: 2 vs. 0
  misc_feature: MA Experiment 108462 PARAMETER Experiment Name: At_Germinating_Seeds_cDNA_P Parameter: Tissue Value: Germinating Seeds
  misc_feature: MA Experiment ID: 108463 Result: Down-regulated in Transcription
  misc_feature: MA Experiment 108463 PARAMETER Experiment Name: At_Germinating_Seeds_cDNA_P Parameter: Age (day) Value: 3 vs. 0
  misc_feature: MA Experiment 108463 PARAMETER Experiment Name: At_Germinating_Seeds_cDNA_P Parameter: Tissue Value: Germinating Seeds
  misc_feature: MA Experiment ID: 20000113 Result: Down-regulated in Transcription
  misc_feature: MA Experiment 20000113 PARAMETER Experiment Name: At_42deg_Heat_cDNA_P Parameter: Temperature (deg C) Value: 42 vs. 22
  misc_feature: MA Experiment 20000113 PARAMETER Experiment Name: At_42deg_Heat_cDNA_P Parameter: Timepoint (hr) Value: 8
  misc_feature: MA Experiment 20000113 PARAMETER Experiment Name: At_42deg_Heat_cDNA_P Parameter: Tissue Value: Aerial
  misc_feature: MA Experiment ID: 20000451 Result: Down-regulated in Transcription
  misc_feature: MA Experiment 20000451 PARAMETER Experiment Name: At_CS6879_Shoots-Roots_P Parameter: Age (day) Value: 14
  misc_feature: MA Experiment 20000451 PARAMETER Experiment Name: At_CS6879_Shoots-Roots_P Parameter: Organism Value: A. thaliana
  misc_feature: MA Experiment 20000451 PARAMETER Experiment Name: At_CS6879_Shoots-Roots_P Parameter: Plant Line Value: CS6879 vs. WS
  misc_feature: MA Experiment 20000451 PARAMETER Experiment Name: At_CS6879_Shoots-Roots_P Parameter: Tissue Value: Roots
  misc_feature: MA Experiment ID: 20000452 Result: Down-regulated in Transcription
  misc_feature: MA Experiment 20000452 PARAMETER Experiment Name: At_CS6879_Shoots-Roots_P Parameter: Age (day) Value: 14
  misc_feature: MA Experiment 20000452 PARAMETER Experiment Name: At_CS6879_Shoots-Roots_P Parameter: Organism Value: A. thaliana
  misc_feature: MA Experiment 20000452 PARAMETER Experiment Name: At_CS6879_Shoots-Roots_P Parameter: Plant Line Value: CS6879 vs. WS
  misc_feature: MA Experiment 20000452 PARAMETER Experiment Name: At_CS6879_Shoots-Roots_P Parameter: Tissue Value: Shoots
atctttaaaccaacaaaaaaaagttatcattcgggttaagatggagaaaccgggtcatgaaacggatattgcgggttcaagacgaacccatctgaagaaatcattcaaatccactcttcgacatcttctcactgcttgctccaaacaggattttgttgatattttctcgaaattcagtggggctgagcaagaactgctttttcagttgtatactcgggttgttgtgaatttgcatcagacaatagaggaagagtttgatgaacaatgtcacgaaactcaggtcggaccaattcttgatacagtcgaggagctggtcgaagaacagagtttggatcccttgttttctgataagactgatgtaatggcaatagcatatgatcttacaacatctaagaagaacgagatacaaaagttaacagttttgctccaaagggctgaagaacagaatcgccagaaggaagcccggatcagcatgctcaaaaaacaaacacaagatctctcaggcacagcggacagaatcgaaaagctgaatgccggggtctccggctactttgaaggaaaagacaagctacctccaatatagtttcgagaaaattgcaatgaagaagcgtgtcatttccattccctgcatttgtatatactttattatagagtcttaacaatctagtcagtagtcacaataacttgcttcatgtgtaaaccactgagaatctgaatgagtttgtactttggtattggtttgacgacaattcatgcaaaatattttccaaggtt

SEQ ID NO: 85092 - protein, 193 aa, Arabidopsis thaliana
  peptide (1)..(193): Ceres Seq. ID no. 12678799
  misc_feature (14)..(193): Homolog of NCBI NO: 18415295 NR Description: putative protein; protein id: At4g19350.1, by cDNA: 38902. [Arabidopsis thaliana] unknown [Arabidopsis thaliana] >gi|26450673|dbj|BAC42447.1|
  misc_feature (58)..(193): Homolog of NCBI NO: 7487713 NR Description: hypothetical protein T5K18.130 - Arabidopsis >gi|3080365|emb|CAA18622.1| putative protein [Arabidopsis >gi|7268730|emb|CAB78937.1| putative protein [Arabidopsis
  misc_feature (24)..(186): Homolog of NCBI NO: 34905298 NR Description: P0577B11.20 [Oryza sativa (japonica
  misc_feature (14)..(176): Homolog of NCBI NO: 7487713 NR Description: hypothetical protein T5K18.130 - Arabidopsis >gi|3080365|emb|CAA18622.1| putative protein [Arabidopsis >gi|7268730|emb|CAB78937.1| putative protein [Arabidopsis
SLNQQKKVIIRVKMEKPGHETDIAGSRRTHLKKSFKSTLRHLLTACSKQDFVDIFSKFSGAEQELLFQLYTRVVVNLHQTIEEEFDEQCHETQVGPILDTVEELVEEQSLDPLFSDKTDVMAIAYDLTTSKKNEIQKLTVLLQRAEEQNRQKEARISMLKKQTQDLSGTADRIEKLNAGVSGYFEGKDKLPPI

SEQ ID NO: 85093 - protein, 180 aa, Arabidopsis thaliana; identical to SEQ ID NO: 24742
  peptide (1)..(180): Ceres Seq. ID no. 12678800
  misc_feature (1)..(180): Homolog of NCBI NO: 18415295 NR Description: putative protein; protein id: At4g19350.1, by cDNA: 38902. [Arabidopsis thaliana] unknown [Arabidopsis thaliana] >gi|26450673|dbj|BAC42447.1|
  misc_feature (45)..(180): Homolog of NCBI NO: 7487713 NR Description: hypothetical protein T5K18.130 - Arabidopsis >gi|3080365|emb|CAA18622.1| putative protein [Arabidopsis >gi|7268730|emb|CAB78937.1| putative protein [Arabidopsis
  misc_feature (11)..(173): Homolog of NCBI NO: 34905298 NR Description: P0577B11.20 [Oryza sativa (japonica
  misc_feature (1)..(163): Homolog of NCBI NO: 7487713 NR Description: hypothetical protein T5K18.130 - Arabidopsis >gi|3080365|emb|CAA18622.1| putative protein [Arabidopsis >gi|7268730|emb|CAB78937.1| putative protein [Arabidopsis

SEQ ID NO: 85094 - DNA, 836 bp, Arabidopsis thaliana
  misc_feature (1)..(836): Ceres Seq. ID no. 12678842
  misc_feature: MA Experiment ID: 108434 Result: Down-regulated in Transcription
  misc_feature: MA Experiment 108434 PARAMETER Experiment Name: At_Root_Tips_cDNA_P Parameter: Tissue Value: Root Tips
  misc_feature: MA Experiment ID: 108435 Result: Down-regulated in Transcription
  misc_feature: MA Experiment 108435 PARAMETER Experiment Name: At_stm_Mutants_cDNA_P Parameter: Plant Line Value: wt Landsburg vs stm
  misc_feature: MA Experiment 108435 PARAMETER Experiment Name: At_stm_Mutants_cDNA_P Parameter: Tissue Value: Shoot Apical Meristem Region
  misc_feature: MA Experiment ID: 108461 Result: Up-regulated in Transcription
  misc_feature: MA Experiment 108461 PARAMETER Experiment Name: At_Germinating_Seeds_cDNA_P Parameter: Age (day) Value: 1 vs. 0
  misc_feature: MA Experiment 108461 PARAMETER Experiment Name: At_Germinating_Seeds_cDNA_P Parameter: Tissue Value: Germinating Seeds
  misc_feature: MA Experiment ID: 108462 Result: Up-regulated in Transcription
  misc_feature: MA Experiment 108462 PARAMETER Experiment Name: At_Germinating_Seeds_cDNA_P Parameter: Age (day) Value: 2 vs. 0
  misc_feature: MA Experiment 108462 PARAMETER Experiment Name: At_Germinating_Seeds_cDNA_P Parameter: Tissue Value: Germinating Seeds
  misc_feature: MA Experiment ID: 108463 Result: Up-regulated in Transcription
  misc_feature: MA Experiment 108463 PARAMETER Experiment Name: At_Germinating_Seeds_cDNA_P Parameter: Age (day) Value: 3 vs. 0
  misc_feature: MA Experiment 108463 PARAMETER Experiment Name: At_Germinating_Seeds_cDNA_P Parameter: Tissue Value: Germinating Seeds
  misc_feature: MA Experiment ID: 108464 Result: Up-regulated in Transcription
  misc_feature: MA Experiment 108464 PARAMETER Experiment Name: At_Germinating_Seeds_cDNA_P Parameter: Age (day) Value: 4 vs. 0
  misc_feature: MA Experiment 108464 PARAMETER Experiment Name: At_Germinating_Seeds_cDNA_P Parameter: Tissue Value: Germinating Seeds
  misc_feature: MA Experiment ID: 108488 Result: Up-regulated in Transcription
  misc_feature: MA Experiment ID: 108594 Result: Down-regulated in Transcription
  misc_feature: MA Experiment 108594 PARAMETER Experiment Name: At_Ler-rhl_Root_cDNA_P Parameter: Plant Line Value: null
  misc_feature: MA Experiment ID: 108595 Result: Down-regulated in Transcription
  misc_feature: MA Experiment 108595 PARAMETER Experiment Name: At_Ler-pi_Ovule_cDNA_P Parameter: Plant Line Value: null
  misc_feature: MA Experiment ID: 20000072 Result: Down-regulated in Transcription
  misc_feature: MA Experiment 20000072 PARAMETER Experiment Name: At_100uM_ABA_Mutants_cDNA_P Parameter: Plant Line Value: CS8105
  misc_feature: MA Experiment 20000072 PARAMETER Experiment Name: At_100uM_ABA_Mutants_cDNA_P Parameter: Timepoint (hr) Value: 6
  misc_feature: MA Experiment 20000072 PARAMETER Experiment Name: At_100uM_ABA_Mutants_cDNA_P Parameter: Tissue Value: Aerial
  misc_feature: MA Experiment 20000072 PARAMETER Experiment Name: At_100uM_ABA_Mutants_cDNA_P Parameter: Treatment Value: 100uM ABA vs. No Treatment
  misc_feature: MA Experiment ID: 20000087 Result: Down-regulated in Transcription
  misc_feature: MA Experiment 20000087 PARAMETER Experiment Name: At_100uM_ABA_Mutants_cDNA_P Parameter: Plant Line Value: WS
  misc_feature: MA Experiment 20000087 PARAMETER Experiment Name: At_100uM_ABA_Mutants_cDNA_P Parameter: Timepoint (hr) Value: 6
  misc_feature: MA Experiment 20000087 PARAMETER Experiment Name: At_100uM_ABA_Mutants_cDNA_P Parameter: Tissue Value: Aerial
  misc_feature: MA Experiment 20000087 PARAMETER Experiment Name: At_100uM_ABA_Mutants_cDNA_P Parameter: Treatment Value: 100uM ABA vs. No Treatment
  misc_feature: MA Experiment ID: 20000117 Result: Down-regulated in Transcription
  misc_feature: MA Experiment 20000117 PARAMETER Experiment Name: At_100uM_ABA_Mutants_cDNA_P Parameter: Plant Line Value: Columbia
  misc_feature: MA Experiment 20000117 PARAMETER Experiment Name: At_100uM_ABA_Mutants_cDNA_P Parameter: Timepoint (hr) Value: 6
  misc_feature: MA Experiment 20000117 PARAMETER Experiment Name: At_100uM_ABA_Mutants_cDNA_P Parameter: Tissue Value: Aerial
  misc_feature: MA Experiment 20000117 PARAMETER Experiment Name: At_100uM_ABA_Mutants_cDNA_P Parameter: Treatment Value: 100uM ABA vs. No Treatment
  misc_feature: MA Experiment ID: 20000180 Result: Up-regulated in Transcription
  misc_feature: MA Experiment 20000180 PARAMETER Experiment Name: At_Germinating_Seeds_P Parameter: Age (hr) Value: 24 vs. 0
  misc_feature: MA Experiment 20000180 PARAMETER Experiment Name: At_Germinating_Seeds_P Parameter: Tissue Value: Germinating Seeds
  misc_feature: MA Experiment ID: 20000184 Result: Up-regulated in Transcription
  misc_feature: MA Experiment 20000184 PARAMETER Experiment Name: At_Shoots__P Parameter: Age (day) Value: 7
  misc_feature: MA Experiment 20000184 PARAMETER Experiment Name: At_Shoots__P Parameter: Tissue Value: Shoots vs. Whole Plant
  misc_feature: MA Experiment ID: 20000185 Result: Down-regulated in Transcription
  misc_feature: MA Experiment 20000185 PARAMETER Experiment Name: At_Roots__P Parameter: Age (day) Value: 7 vs. 21
  misc_feature: MA Experiment 20000185 PARAMETER Experiment Name: At_Roots__P Parameter: Organism Value: A. thaliana
  misc_feature: MA Experiment 20000185 PARAMETER Experiment Name: At_Roots__P Parameter: Tissue Value: Roots vs. Whole Plant
  misc_feature: MA Experiment ID: 20000264 Result: Down-regulated in Transcription
  misc_feature: MA Experiment 20000264 PARAMETER Experiment Name: At_Open_Flower_P Parameter: Age (day) Value: 21
  misc_feature: MA Experiment 20000264 PARAMETER Experiment Name: At_Open_Flower_P Parameter: Plant Line Value: WS
  misc_feature: MA Experiment 20000264 PARAMETER Experiment Name: At_Open_Flower_P Parameter: Tissue Value: Open Flower vs. Whole Plant
  misc_feature: MA Experiment ID: 20000436 Result: Down-regulated in Transcription
  misc_feature: MA Experiment 20000436 PARAMETER Experiment Name: At_Drought_P Parameter: Age (day) Value: 7
  misc_feature: MA Experiment 20000436 PARAMETER Experiment Name: At_Drought_P Parameter: Organism Value: A. thaliana
  misc_feature: MA Experiment 20000436 PARAMETER Experiment Name: At_Drought_P Parameter: Plant Line Value: WS
  misc_feature: MA Experiment 20000436 PARAMETER Experiment Name: At_Drought_P Parameter: Timepoint (hr) Value: 12
  misc_feature: MA Experiment 20000436 PARAMETER Experiment Name: At_Drought_P Parameter: Tissue Value: Whole Plant
  misc_feature: MA Experiment 20000436 PARAMETER Experiment Name: At_Drought_P Parameter: Treatment Value: Drought vs. No Drought
  misc_feature: MA Experiment ID: 20000437 Result: Down-regulated in Transcription
  misc_feature: MA Experiment 20000437 PARAMETER Experiment Name: At_Drought_P Parameter: Age (day) Value: 8
  misc_feature: MA Experiment 20000437 PARAMETER Experiment Name: At_Drought_P Parameter: Organism Value: A. thaliana
  misc_feature: MA Experiment 20000437 PARAMETER Experiment Name: At_Drought_P Parameter: Plant Line Value: WS
  misc_feature: MA Experiment 20000437 PARAMETER Experiment Name: At_Drought_P Parameter: Timepoint (hr) Value: 24
  misc_feature: MA Experiment 20000437 PARAMETER Experiment Name: At_Drought_P Parameter: Tissue Value: Whole Plant
  misc_feature: MA Experiment 20000437 PARAMETER Experiment Name: At_Drought_P Parameter: Treatment Value: Drought vs. No Drought
  misc_feature: MA Experiment ID: 20000438 Result: Up-regulated in Transcription
  misc_feature: MA Experiment 20000438 PARAMETER Experiment Name: At_Shoots__P Parameter: Age (day) Value: 14
  misc_feature: MA Experiment 20000438 PARAMETER Experiment Name: At_Shoots__P Parameter: Tissue Value: Shoots vs. Whole Plant
  misc_feature: MA Experiment ID: 20000439 Result: Down-regulated in Transcription
  misc_feature: MA Experiment 20000439 PARAMETER Experiment Name: At_Roots__P Parameter: Age (day) Value: 14 vs. 21
  misc_feature: MA Experiment 20000439 PARAMETER Experiment Name: At_Roots__P Parameter: Organism Value: A. thaliana
  misc_feature: MA Experiment 20000439 PARAMETER Experiment Name: At_Roots__P Parameter: Tissue Value: Roots vs. Whole Plant
  misc_feature: MA Experiment ID: 20000794 Result: Down-regulated in Transcription
  misc_feature: MA Experiment 20000794 PARAMETER Experiment Name: At_Petals_P Parameter: Age (day) Value: 23-25 days
  misc_feature: MA Experiment 20000794 PARAMETER Experiment Name: At_Petals_P Parameter: Plant Line Value: WS
  misc_feature: MA Experiment 20000794 PARAMETER Experiment Name: At_Petals_P Parameter: Tissue Value: Petals vs. Whole plant
  misc_feature: MA Experiment ID: 20001248 Result: Down-regulated in Transcription
  misc_feature: MA Experiment 20001248 PARAMETER Experiment Name: At_Far-red-induction_P Parameter: Age (day) Value: 7
  misc_feature: MA Experiment 20001248 PARAMETER Experiment Name: At_Far-red-induction_P Parameter: Light Value: Far-red vs. White
  misc_feature: MA Experiment 20001248 PARAMETER Experiment Name: At_Far-red-induction_P Parameter: Organism Value: A. thaliana
  misc_feature: MA Experiment 20001248 PARAMETER Experiment Name: At_Far-red-induction_P Parameter: Plant Line Value: Columbia
  misc_feature: MA Experiment 20001248 PARAMETER Experiment Name: At_Far-red-induction_P Parameter: Timepoint (hr) Value: 4
  misc_feature: MA Experiment 20001248 PARAMETER Experiment Name: At_Far-red-induction_P Parameter: Tissue Value: Whole Plant
  misc_feature: MA Experiment ID: 20001450 Result: Down-regulated in Transcription
  misc_feature: MA Experiment 20001450 PARAMETER Experiment Name: At_Far-red-induction_P Parameter: Age (day) Value: 7
  misc_feature: MA Experiment 20001450 PARAMETER Experiment Name: At_Far-red-induction_P Parameter: Light Value: Far-red vs. White
  misc_feature: MA Experiment 20001450 PARAMETER Experiment Name: At_Far-red-induction_P Parameter: Organism Value: A. thaliana
  misc_feature: MA Experiment 20001450 PARAMETER Experiment Name: At_Far-red-induction_P Parameter: Plant Line Value: Columbia
  misc_feature: MA Experiment 20001450 PARAMETER Experiment Name: At_Far-red-induction_P Parameter: Timepoint (hr) Value: 8
  misc_feature: MA Experiment 20001450 PARAMETER Experiment Name: At_Far-red-induction_P Parameter: Tissue Value: Whole Plant
  misc_feature: MA Experiment ID: 20001555 Result: Down-regulated in Transcription
  misc_feature: MA Experiment 20001555 PARAMETER Experiment Name: At_Drought_Soil_Dry_P Parameter: Age (day) Value: 24
  misc_feature: MA Experiment 20001555 PARAMETER Experiment Name: At_Drought_Soil_Dry_P Parameter: Organism Value: A. thaliana
  misc_feature: MA Experiment 20001555 PARAMETER Experiment Name: At_Drought_Soil_Dry_P Parameter: Plant Line Value: WS
  misc_feature: MA Experiment 20001555 PARAMETER Experiment Name: At_Drought_Soil_Dry_P Parameter: Post Timepoint (hr) Value: None
  misc_feature: MA Experiment 20001555 PARAMETER Experiment Name: At_Drought_Soil_Dry_P Parameter: Post-Treatment Value: None
  misc_feature: MA Experiment 20001555 PARAMETER Experiment Name: At_Drought_Soil_Dry_P Parameter: Timepoint (day) Value: 10
  misc_feature: MA Experiment 20001555 PARAMETER Experiment Name: At_Drought_Soil_Dry_P Parameter: Treatment Value: Drought vs. No Drought
  misc_feature: MA Experiment ID: 20001556 Result: Down-regulated in Transcription
  misc_feature: MA Experiment 20001556 PARAMETER Experiment Name: At_Drought_Soil_Dry_P Parameter: Age (day) Value: 26
  misc_feature: MA Experiment 20001556 PARAMETER Experiment Name: At_Drought_Soil_Dry_P Parameter: Organism Value: A. thaliana
  misc_feature: MA Experiment 20001556 PARAMETER Experiment Name: At_Drought_Soil_Dry_P Parameter: Plant Line Value: WS
  misc_feature: MA Experiment 20001556 PARAMETER Experiment Name: At_Drought_Soil_Dry_P Parameter: Post Timepoint (hr) Value: None
  misc_feature: MA Experiment 20001556 PARAMETER Experiment Name: At_Drought_Soil_Dry_P Parameter: Post-Treatment Value: None
  misc_feature: MA Experiment 20001556 PARAMETER Experiment Name: At_Drought_Soil_Dry_P Parameter: Timepoint (day) Value: 12
  misc_feature: MA Experiment 20001556 PARAMETER Experiment Name: At_Drought_Soil_Dry_P Parameter: Treatment Value: Drought vs. No Drought
  misc_feature: MA Experiment ID: 20001557 Result: Down-regulated in Transcription
  misc_feature: MA Experiment 20001557 PARAMETER Experiment Name: At_Drought_Soil_Dry_P Parameter: Age (day) Value: 27
  misc_feature: MA Experiment 20001557 PARAMETER Experiment Name: At_Drought_Soil_Dry_P Parameter: Organism Value: A. thaliana
  misc_feature: MA Experiment 20001557 PARAMETER Experiment Name: At_Drought_Soil_Dry_P Parameter: Plant Line Value: WS
  misc_feature: MA Experiment 20001557 PARAMETER Experiment Name: At_Drought_Soil_Dry_P Parameter: Post Timepoint (hr) Value: 3
  misc_feature: MA Experiment 20001557 PARAMETER Experiment Name: At_Drought_Soil_Dry_P Parameter: Post-Treatment Value: Re-Water vs. No Drought
  misc_feature: MA Experiment 20001557 PARAMETER Experiment Name: At_Drought_Soil_Dry_P Parameter: Timepoint (day) Value: 13
  misc_feature: MA Experiment 20001557 PARAMETER Experiment Name: At_Drought_Soil_Dry_P Parameter: Treatment Value: Drought vs. No Drought
  misc_feature: MA Experiment ID: 20001559 Result: Down-regulated in Transcription
  misc_feature: MA Experiment 20001559 PARAMETER Experiment Name: At_Drought_Soil_Dry_P Parameter: Age (day) Value: 28
  misc_feature: MA Experiment 20001559 PARAMETER Experiment Name: At_Drought_Soil_Dry_P Parameter: Organism Value: A. thaliana
  misc_feature: MA Experiment 20001559 PARAMETER Experiment Name: At_Drought_Soil_Dry_P Parameter: Plant Line Value: WS
  misc_feature: MA Experiment 20001559 PARAMETER Experiment Name: At_Drought_Soil_Dry_P Parameter: Post Timepoint (hr) Value: 29
  misc_feature: MA Experiment 20001559 PARAMETER Experiment Name: At_Drought_Soil_Dry_P Parameter: Post-Treatment Value: Re-Water vs. No Drought
  misc_feature: MA Experiment 20001559 PARAMETER Experiment Name: At_Drought_Soil_Dry_P Parameter: Timepoint (day) Value: 14
  misc_feature: MA Experiment 20001559 PARAMETER Experiment Name: At_Drought_Soil_Dry_P Parameter: Treatment Value: Drought vs. No Drought
  misc_feature: MA Experiment ID: 20001757 Result: Up-regulated in Transcription
  misc_feature: MA Experiment 20001757 PARAMETER Experiment Name: At_50mM_NH4NO3_L-to-H_P Parameter: Timepoint (hr) Value: 6
  misc_feature: MA Experiment 20001757 PARAMETER Experiment Name: At_50mM_NH4NO3_L-to-H_P Parameter: Tissue Value: Leaf
  misc_feature: MA Experiment 20001757 PARAMETER Experiment Name: At_50mM_NH4NO3_L-to-H_P Parameter: Treatment Value: 50mM NH4NO3 vs 100mM Mannitol
  misc_feature: MA Experiment ID: 20001904 Result: Down-regulated in Transcription
  misc_feature: MA Experiment 20001904 PARAMETER Experiment Name: At_Drought_Reproduction_P Parameter: Age (day) Value: 37
  misc_feature: MA Experiment 20001904 PARAMETER Experiment Name: At_Drought_Reproduction_P Parameter: Organism Value: A. thaliana
  misc_feature: MA Experiment 20001904 PARAMETER Experiment Name: At_Drought_Reproduction_P Parameter: Plant Line Value: WS
  misc_feature: MA Experiment 20001904 PARAMETER Experiment Name: At_Drought_Reproduction_P Parameter: Timepoint (day) Value: 7
  misc_feature: MA Experiment 20001904 PARAMETER Experiment Name: At_Drought_Reproduction_P Parameter: Tissue Value: Rosettes
  misc_feature: MA Experiment 20001904 PARAMETER Experiment Name: At_Drought_Reproduction_P Parameter: Treatment Value: Drought vs. No Drought
  misc_feature: MA Experiment ID: 20001906 Result: Down-regulated in Transcription
  misc_feature: MA Experiment 20001906 PARAMETER Experiment Name: At_Drought_Reproduction_P Parameter: Age (day) Value: 35
  misc_feature: MA Experiment 20001906 PARAMETER Experiment Name: At_Drought_Reproduction_P Parameter: Organism Value: A. thaliana
  misc_feature: MA Experiment 20001906 PARAMETER Experiment Name: At_Drought_Reproduction_P Parameter: Plant Line Value: WS
  misc_feature: MA Experiment 20001906 PARAMETER Experiment Name: At_Drought_Reproduction_P Parameter: Timepoint (day) Value: 5
  misc_feature: MA Experiment 20001906 PARAMETER Experiment Name: At_Drought_Reproduction_P Parameter: Tissue Value: Siliques
  misc_feature: MA Experiment 20001906 PARAMETER Experiment Name: At_Drought_Reproduction_P Parameter: Treatment Value: Drought vs. No Drought
aattttcgtcttgagaaagaaaaacaaaatggcttcgatgggtggattacacggtgcatctccggcggttcttgaaggaagcttaaagatcaatggctccagccgtctgaatggctctggaagagtggcggtggctcaaaggtctagacttgtcgtcagagctcagcagagtgaggagacttctcgccggtccgtgattgggcttgttgctgctggtttagctggtggctcgtttgttcaggctgtcctcgccgatgctatttcgatcaaagttggccctcctccagctccttccggtggccttcctgggacagataactcagaccaagcaagagactttgcattggcattgaaagacaggttttacttacagccattgccaccaacagaagctgcagctagagccaaagaatctgcaaaggatatcataaatgtgaagccattgatcgacaggaaagcttggccatatgttcaaaacgatcttcgttccaaggcttcttatcttcgttatgatcttaacacaatcatttcctccaaacccaaggatgagaagaagtcactcaaggatctcaccaccaagctcttcgataccatcgacaatctggattatgcggcgaagaagaagagtccttcgcaggctgagaagtactatgctgagacagtctctgctttgaacgaagttcttgccaagcttggttaagcattttaatttctgcatttttcttgtaaattattattcttggtttttgttcttgagtactttagactcaaattcgtgaatctgaatttatgtttcacgttttcaccaagtaatggcaatttcttgagtatgcgtt

SEQ ID NO: 85095 - protein, 232 aa, Arabidopsis thaliana
  peptide (1)..(232): Ceres Seq. ID no. 12678843
  misc_feature (35)..(232): Pfam Name: Oxygen evolving enhancer protein 3 (PsbQ) Pfam Description: Oxygen evolving enhancer protein 3 (PsbQ)
  misc_feature (10)..(232): Homolog of NCBI NO: 15233587 NR Description: oxygen-evolving complex protein 16, chloroplast (OEC16); protein id: At4g21280.1, supported by cDNA: 5691., by cDNA: gi_15215599, supported by cDNA: gi_20334895 [Arabidopsis
  misc_feature (10)..(232): Homolog of NCBI NO: 4583542 NR Description: 16 kDa polypeptide of oxygen-evolving complex
  misc_feature (10)..(232): Homolog of NCBI NO: 15234637 NR Description: oxygen-evolving complex protein 16, chloroplast (OEC16); protein id: At4g05180.1, supported by cDNA: 40326.,
  misc_feature (10)..(232): Homolog of NCBI NO: 131397 NR Description: Oxygen-evolving enhancer protein 3, chloroplast (OEE3) (16 kDa subunit of oxygen evolving system of photosystem
  misc_feature (11)..(231): Homolog of NCBI NO: 31096349 NR Description: oxygen-evolving enhancer protein 3 precursor
  misc_feature (47)..(232): Homolog of NCBI NO: 34393258 NR Description: putative Oxygen-evolving enhancer protein 3-1,
  misc_feature (10)..(232): Homolog of NCBI NO: 11134057 NR Description: Oxygen-evolving enhancer protein 3-1, chloroplast (OEE3) (16 kDa subunit of oxygen evolving system of photosystem
  misc_feature (23)..(232): Homolog of NCBI NO: 11133850 NR Description: Oxygen-evolving enhancer protein 3, chloroplast (OEE3) (16 kDa subunit of oxygen evolving system of photosystem
  misc_feature (80)..(232): Homolog of NCBI NO: 11134066 NR Description: Oxygen-evolving enhancer protein 3-2, chloroplast (OEE3) (16 kDa subunit of oxygen evolving system of photosystem
  misc_feature (85)..(232): Homolog of NCBI NO: 34810268 NR Description: Chain A, Crystal Structure Of Psbq Polypeptide Of
IFVLRKKNKMASMGGLHGASPAVLEGSLKINGSSRLNGSGRVAVAQRSRLVVRAQQSEETSRRSVIGLVAAGLAGGSFVQAVLADAISIKVGPPPAPSGGLPGTDNSDQARDFALALKDRFYLQPLPPTEAAARAKESAKDIINVKPLIDRKAWPYVQNDLRSKASYLRYDLNTIISSKPKDEKKSLKDLTTKLFDTIDNLDYAAKKKSPSQAEKYYAETVSALNEVLAKLG

SEQ ID NO: 85096 - protein, 223 aa, Arabidopsis thaliana; identical to SEQ ID NO: 27183
  peptide (1)..(223): Ceres Seq. ID no. 12678844
  misc_feature (26)..(223): Pfam Name: Oxygen evolving enhancer protein 3 (PsbQ) Pfam Description: Oxygen evolving enhancer protein 3 (PsbQ)
  misc_feature (1)..(223): Homolog of NCBI NO: 15233587 NR Description: oxygen-evolving complex protein 16, chloroplast (OEC16); protein id: At4g21280.1, supported by cDNA: 5691., by cDNA: gi_15215599, supported by cDNA: gi_20334895 [Arabidopsis
  misc_feature (1)..(223): Homolog of NCBI NO: 4583542 NR Description: 16 kDa polypeptide of oxygen-evolving complex
  misc_feature (1)..(223): Homolog of NCBI NO: 15234637 NR Description: oxygen-evolving complex protein 16, chloroplast (OEC16); protein id: At4g05180.1, supported by cDNA: 40326.,
  misc_feature (1)..(223): Homolog of NCBI NO: 131397 NR Description: Oxygen-evolving enhancer protein 3, chloroplast (OEE3) (16 kDa subunit of oxygen evolving system of photosystem
  misc_feature (2)..(222): Homolog of NCBI NO: 31096349 NR Description: oxygen-evolving enhancer protein 3 precursor
  misc_feature (38)..(223): Homolog of NCBI NO: 34393258 NR Description: putative Oxygen-evolving enhancer protein 3-1,
  misc_feature (1)..(223): Homolog of NCBI NO: 11134057 NR Description: Oxygen-evolving enhancer protein 3-1, chloroplast (OEE3) (16 kDa subunit of oxygen evolving system of photosystem
  misc_feature (14)..(223): Homolog of NCBI NO: 11133850 NR Description: Oxygen-evolving enhancer protein 3, chloroplast (OEE3) (16 kDa subunit of oxygen evolving system of photosystem
  misc_feature (71)..(223): Homolog of NCBI NO: 11134066 NR Description: Oxygen-evolving enhancer protein 3-2, chloroplast (OEE3) (16 kDa subunit of oxygen evolving system of photosystem
  misc_feature (76)..(223): Homolog of NCBI NO: 34810268 NR Description: Chain A, Crystal Structure Of Psbq Polypeptide Of

SEQ ID NO: 85097 - protein, 220 aa, Arabidopsis thaliana; identical to SEQ ID NO: 27184
  peptide (1)..(220): Ceres Seq. ID no. 12678845
  misc_feature (23)..(220): Pfam Name: Oxygen evolving enhancer protein 3 (PsbQ) Pfam Description: Oxygen evolving enhancer protein 3 (PsbQ)
  misc_feature (1)..(220): Homolog of NCBI NO: 15233587 NR Description: oxygen-evolving complex protein 16, chloroplast (OEC16); protein id: At4g21280.1, supported by cDNA: 5691., by cDNA: gi_15215599, supported by cDNA: gi_20334895 [Arabidopsis
  misc_feature (1)..(220): Homolog of NCBI NO: 4583542 NR Description: 16 kDa polypeptide of oxygen-evolving complex
  misc_feature (1)..(220): Homolog of NCBI NO: 15234637 NR Description: oxygen-evolving complex protein 16, chloroplast (OEC16); protein id: At4g05180.1, supported by cDNA: 40326.,
  misc_feature (1)..(220): Homolog of NCBI NO: 131397 NR Description: Oxygen-evolving enhancer protein 3, chloroplast (OEE3) (16 kDa subunit of oxygen evolving system of photosystem
  misc_feature (1)..(219): Homolog of NCBI NO: 31096349 NR Description: oxygen-evolving enhancer protein 3 precursor
  misc_feature (35)..(220): Homolog of NCBI NO: 34393258 NR Description: putative Oxygen-evolving enhancer protein 3-1,
  misc_feature (1)..(220): Homolog of NCBI NO: 11134057 NR Description: Oxygen-evolving enhancer protein 3-1, chloroplast (OEE3) (16 kDa subunit of oxygen evolving system of photosystem
  misc_feature (11)..(220): Homolog of NCBI NO: 11133850 NR Description: Oxygen-evolving enhancer protein 3, chloroplast (OEE3) (16 kDa subunit of oxygen evolving system of photosystem
  misc_feature (68)..(220): Homolog of NCBI NO: 11134066 NR Description: Oxygen-evolving enhancer protein 3-2, chloroplast (OEE3) (16 kDa subunit of oxygen evolving system of photosystem
  misc_feature (73)..(220): Homolog of NCBI NO: 34810268 NR Description: Chain A, Crystal Structure Of Psbq Polypeptide Of

SEQ ID NO: 85098 - DNA, 1687 bp, Arabidopsis thaliana
  misc_feature (1)..(1687): Ceres Seq. ID no. 12678863
  misc_feature: MA Experiment ID: 20000173 Result: Down-regulated in Transcription
  misc_feature: MA Experiment 20000173 PARAMETER Experiment Name: At_42deg_Heat_P Parameter: Age (day) Value: 14
  misc_feature: MA Experiment 20000173 PARAMETER Experiment Name: At_42deg_Heat_P Parameter: Organism Value: A. thaliana
  misc_feature: MA Experiment 20000173 PARAMETER Experiment Name: At_42deg_Heat_P Parameter: Plant Line Value: WS
  misc_feature: MA Experiment 20000173 PARAMETER Experiment Name: At_42deg_Heat_P Parameter: Temperature (deg C) Value: 42 vs. 22
  misc_feature: MA Experiment 20000173 PARAMETER Experiment Name: At_42deg_Heat_P Parameter: Timepoint (hr) Value: 6
  misc_feature: MA Experiment 20000173 PARAMETER Experiment Name: At_42deg_Heat_P Parameter: Tissue Value: Aerial
  misc_feature: MA Experiment ID: 20000179 Result: Up-regulated in Transcription
  misc_feature: MA Experiment 20000179 PARAMETER Experiment Name: At_Germinating_Seeds_P Parameter: Age (hr) Value: 6 vs. 0
  misc_feature: MA Experiment 20000179 PARAMETER Experiment Name: At_Germinating_Seeds_P Parameter: Tissue Value: Germinating Seeds
  misc_feature: MA Experiment ID: 20000180 Result: Up-regulated in Transcription
  misc_feature: MA Experiment 20000180 PARAMETER Experiment Name: At_Germinating_Seeds_P Parameter: Age (hr) Value: 24 vs. 0
  misc_feature: MA Experiment 20000180 PARAMETER Experiment Name: At_Germinating_Seeds_P Parameter: Tissue Value: Germinating Seeds
  misc_feature: MA Experiment ID: 20000185 Result: Down-regulated in Transcription
  misc_feature: MA Experiment 20000185 PARAMETER Experiment Name: At_Roots__P Parameter: Age (day) Value: 7 vs. 21
  misc_feature: MA Experiment 20000185 PARAMETER Experiment Name: At_Roots__P Parameter: Organism Value: A. thaliana
  misc_feature: MA Experiment 20000185 PARAMETER Experiment Name: At_Roots__P Parameter: Tissue Value: Roots vs. Whole Plant
  misc_feature: MA Experiment ID: 20000234 Result: Down-regulated in Transcription
  misc_feature: MA Experiment 20000234 PARAMETER Experiment Name: At_Siliques_P Parameter: Age (day) Value: 21
  misc_feature: MA Experiment 20000234 PARAMETER Experiment Name: At_Siliques_P Parameter: Organism Value: A. thaliana
  misc_feature: MA Experiment 20000234 PARAMETER Experiment Name: At_Siliques_P Parameter: Plant Line Value: WS
  misc_feature: MA Experiment 20000234 PARAMETER Experiment Name: At_Siliques_P Parameter: Tissue Value: Less Than 5mm Siliques vs. Whole Plant
  misc_feature: MA Experiment ID: 20000264 Result: Down-regulated in Transcription
  misc_feature: MA Experiment 20000264 PARAMETER Experiment Name: At_Open_Flower_P Parameter: Age (day) Value: 21
  misc_feature: MA Experiment 20000264 PARAMETER Experiment Name: At_Open_Flower_P Parameter: Plant Line Value: WS
  misc_feature: MA Experiment 20000264 PARAMETER Experiment Name: At_Open_Flower_P Parameter: Tissue Value: Open Flower vs. Whole Plant
  misc_feature: MA Experiment ID: 20000265 Result: Down-regulated in Transcription
  misc_feature: MA Experiment 20000265 PARAMETER Experiment Name: At_Open_Flower_P Parameter: Age (day) Value: 21
  misc_feature: MA Experiment 20000265 PARAMETER Experiment Name: At_Open_Flower_P Parameter: Plant Line Value: WS
  misc_feature: MA Experiment 20000265 PARAMETER Experiment Name: At_Open_Flower_P Parameter: Tissue Value: Closed Flower vs. Whole Plant
  misc_feature: MA Experiment ID: 20000286 Result: Down-regulated in Transcription
  misc_feature: MA Experiment 20000286 PARAMETER Experiment Name: At_Open_Flower_P Parameter: Age (day) Value: 21
  misc_feature: MA Experiment 20000286 PARAMETER Experiment Name: At_Open_Flower_P Parameter: Plant Line Value: WS
  misc_feature: MA Experiment 20000286 PARAMETER Experiment Name: At_Open_Flower_P Parameter: Tissue Value: Half Open vs. Whole Plant
  misc_feature: MA Experiment ID: 20000439 Result: Down-regulated in Transcription
  misc_feature: MA Experiment 20000439 PARAMETER Experiment Name: At_Roots__P Parameter: Age (day) Value: 14 vs. 21
  misc_feature: MA Experiment 20000439 PARAMETER Experiment Name: At_Roots__P Parameter: Organism Value: A. thaliana
  misc_feature: MA Experiment 20000439 PARAMETER Experiment Name: At_Roots__P Parameter: Tissue Value: Roots vs. Whole Plant
  misc_feature: MA Experiment ID: 20000573 Result: Down-regulated in Transcription
  misc_feature: MA Experiment 20000573 PARAMETER Experiment Name: At_100uM_ABA_Mutants__P Parameter: Organism Value: A. thaliana
  misc_feature: MA Experiment 20000573 PARAMETER Experiment Name: At_100uM_ABA_Mutants__P Parameter: Plant Line Value: CS22 vs. Ler wt
  misc_feature: MA Experiment 20000573 PARAMETER Experiment Name: At_100uM_ABA_Mutants__P Parameter: Timepoint (hr) Value: N/A
  misc_feature: MA Experiment 20000573 PARAMETER Experiment Name: At_100uM_ABA_Mutants__P Parameter: Tissue Value: Whole Plant
  misc_feature: MA Experiment 20000573 PARAMETER Experiment Name: At_100uM_ABA_Mutants__P Parameter: Treatment Value: None
  misc_feature: MA Experiment ID: 20000574 Result: Down-regulated in Transcription
  misc_feature: MA Experiment 20000574 PARAMETER Experiment Name: At_100uM_ABA_Mutants__P Parameter: Organism Value: A. thaliana
  misc_feature: MA Experiment 20000574 PARAMETER Experiment Name: At_100uM_ABA_Mutants__P Parameter: Plant Line Value: CS23 vs. Ler wt
  misc_feature: MA Experiment 20000574 PARAMETER Experiment Name: At_100uM_ABA_Mutants__P Parameter: Timepoint (hr) Value: N/A
  misc_feature: MA Experiment 20000574 PARAMETER Experiment Name: At_100uM_ABA_Mutants__P Parameter: Tissue Value: Whole Plant
  misc_feature: MA Experiment 20000574 PARAMETER Experiment Name: At_100uM_ABA_Mutants__P Parameter: Treatment Value: None
  misc_feature: MA Experiment ID: 20000578 Result: Down-regulated in Transcription
  misc_feature: MA Experiment 20000578 PARAMETER Experiment Name: At_CS3726__P Parameter: Organism Value: A. thaliana
  misc_feature: MA Experiment 20000578 PARAMETER Experiment Name: At_CS3726__P Parameter: Plant Line Value: CS3726
  misc_feature: MA Experiment 20000578 PARAMETER Experiment Name: At_CS3726__P Parameter: Tissue Value: Whole Plant
  misc_feature: MA Experiment ID: 20000606 Result: Down-regulated in Transcription
  misc_feature: MA Experiment 20000606 PARAMETER Experiment Name: At_CS8548_Mutant_P Parameter: Age (day) Value: 14
  misc_feature: MA Experiment 20000606 PARAMETER Experiment Name: At_CS8548_Mutant_P Parameter: Plant Line Value: CS8548 vs. wt
  misc_feature: MA Experiment 20000606 PARAMETER Experiment Name: At_CS8548_Mutant_P Parameter: Tissue Value: Whole Plant
  misc_feature: MA Experiment ID: 20000794 Result: Down-regulated in Transcription
  misc_feature: MA Experiment 20000794 PARAMETER Experiment Name: At_Petals_P Parameter: Age (day) Value: 23-25 days
  misc_feature: MA Experiment 20000794 PARAMETER Experiment Name: At_Petals_P Parameter: Plant Line Value: WS
  misc_feature: MA Experiment 20000794 PARAMETER Experiment Name: At_Petals_P Parameter: Tissue Value: Petals vs. Whole plant
  misc_feature: MA Experiment ID: 20001450 Result: Up-regulated in Transcription
  misc_feature: MA Experiment 20001450 PARAMETER Experiment Name: At_Far-red-induction_P Parameter: Age (day) Value: 7
  misc_feature: MA Experiment 20001450 PARAMETER Experiment Name: At_Far-red-induction_P Parameter: Light Value: Far-red vs. White
  misc_feature: MA Experiment 20001450 PARAMETER Experiment Name: At_Far-red-induction_P Parameter: Organism Value: A. thaliana
  misc_feature: MA Experiment 20001450 PARAMETER Experiment Name: At_Far-red-induction_P Parameter: Plant Line Value: Columbia
  misc_feature: MA Experiment 20001450 PARAMETER Experiment Name: At_Far-red-induction_P Parameter: Timepoint (hr) Value: 8
  misc_feature: MA Experiment 20001450 PARAMETER Experiment Name: At_Far-red-induction_P Parameter: Tissue Value: Whole Plant
  misc_feature: MA Experiment ID: 20001451 Result: Up-regulated in Transcription
  misc_feature: MA Experiment 20001451 PARAMETER Experiment Name: At_Far-red-induction_P Parameter: Age (day) Value: 7
  misc_feature: MA Experiment 20001451 PARAMETER Experiment Name: At_Far-red-induction_P Parameter: Light Value: Far-red vs. White
  misc_feature: MA Experiment 20001451 PARAMETER Experiment Name: At_Far-red-induction_P Parameter: Organism Value: A. thaliana
  misc_feature: MA Experiment 20001451 PARAMETER Experiment Name: At_Far-red-induction_P Parameter: Plant Line Value: Columbia
  misc_feature: MA Experiment 20001451 PARAMETER Experiment Name: At_Far-red-induction_P Parameter: Timepoint (hr) Value: 24
  misc_feature: MA Experiment 20001451 PARAMETER Experiment Name: At_Far-red-induction_P Parameter: Tissue Value: Whole Plant
  misc_feature: MA Experiment ID: 20001557 Result: Down-regulated in Transcription
  misc_feature: MA Experiment 20001557 PARAMETER Experiment Name: At_Drought_Soil_Dry_P Parameter: Age (day) Value: 27
  misc_feature: MA Experiment 20001557 PARAMETER Experiment Name: At_Drought_Soil_Dry_P Parameter: Organism Value: A. thaliana
  misc_feature: MA Experiment 20001557 PARAMETER Experiment Name: At_Drought_Soil_Dry_P Parameter: Plant Line Value: WS
  misc_feature: MA Experiment 20001557 PARAMETER Experiment Name: At_Drought_Soil_Dry_P Parameter: Post Timepoint (hr) Value: 3
  misc_feature: MA Experiment 20001557 PARAMETER Experiment Name: At_Drought_Soil_Dry_P Parameter: Post-Treatment Value: Re-Water vs. No Drought
  misc_feature: MA Experiment 20001557 PARAMETER Experiment Name: At_Drought_Soil_Dry_P Parameter: Timepoint (day) Value: 13
  misc_feature: MA Experiment 20001557 PARAMETER Experiment Name: At_Drought_Soil_Dry_P Parameter: Treatment Value: Drought vs. No Drought
  misc_feature: MA Experiment ID: 20001558 Result: Down-regulated in Transcription
  misc_feature: MA Experiment 20001558 PARAMETER Experiment Name: At_Drought_Soil_Dry_P Parameter: Age (day) Value: 27
  misc_feature: MA Experiment 20001558 PARAMETER Experiment Name: At_Drought_Soil_Dry_P Parameter: Organism Value: A. thaliana
  misc_feature: MA Experiment 20001558 PARAMETER Experiment Name: At_Drought_Soil_Dry_P Parameter: Plant Line Value: WS
  misc_feature: MA Experiment 20001558 PARAMETER Experiment Name: At_Drought_Soil_Dry_P Parameter: Post Timepoint (hr) Value: 6
  misc_feature: MA Experiment 20001558 PARAMETER Experiment Name: At_Drought_Soil_Dry_P Parameter: Post-Treatment Value: Re-Water vs. No Drought
  misc_feature: MA Experiment 20001558 PARAMETER Experiment Name: At_Drought_Soil_Dry_P Parameter: Timepoint (day) Value: 13
  misc_feature: MA Experiment 20001558 PARAMETER Experiment Name: At_Drought_Soil_Dry_P Parameter: Treatment Value: Drought vs. No Drought
  misc_feature: MA Experiment ID: 20001771 Result: Up-regulated in Transcription
  misc_feature: MA Experiment 20001771 PARAMETER Experiment Name: At_Far-red-enriched-adult_P Parameter: Age (day) Value: 28
  misc_feature: MA Experiment 20001771 PARAMETER Experiment Name: At_Far-red-enriched-adult_P Parameter: Light Value: Far-red enriched vs. White
  misc_feature: MA Experiment 20001771 PARAMETER Experiment Name: At_Far-red-enriched-adult_P Parameter: Organism Value: A. thaliana
  misc_feature: MA Experiment 20001771 PARAMETER Experiment Name: At_Far-red-enriched-adult_P Parameter: Plant Line Value: Columbia
  misc_feature: MA Experiment 20001771 PARAMETER Experiment Name: At_Far-red-enriched-adult_P Parameter: Timepoint (hr) Value: 16
  misc_feature: MA Experiment 20001771 PARAMETER Experiment Name: At_Far-red-enriched-adult_P Parameter: Tissue Value: Aerial
  misc_feature: MA Experiment ID: 20001905 Result: Down-regulated in Transcription
  misc_feature: MA Experiment 20001905 PARAMETER Experiment Name: At_Drought_Reproduction_P Parameter: Age (day) Value: 40
  misc_feature: MA Experiment 20001905 PARAMETER Experiment Name: At_Drought_Reproduction_P Parameter: Organism Value: A. thaliana
  misc_feature: MA Experiment 20001905 PARAMETER Experiment Name: At_Drought_Reproduction_P Parameter: Plant Line Value: WS
  misc_feature: MA Experiment 20001905 PARAMETER Experiment Name: At_Drought_Reproduction_P Parameter: Timepoint (day) Value: 10
  misc_feature: MA Experiment 20001905 PARAMETER Experiment Name: At_Drought_Reproduction_P Parameter: Tissue Value: Rosettes
  misc_feature: MA Experiment 20001905 PARAMETER Experiment Name: At_Drought_Reproduction_P Parameter: Treatment Value: Drought vs. No Drought
tgtttctcaacaattttctggtctcttagagtgagaggagagagatagagagttgtgttgggcgtggaacttggactagttccacatatcaggttatatagatcttctctttcaacttctgattcgtccagaagctttcctaatctgagatctgacatggaacaccaaggttggagttttgaggagaattatagtttgtccactaatagaagatctatcaggccacaagatgaactagtggagttattatggcgagatggacaagtggttctgcagagccaaactcatagagaacaaacccaaacccagaaacaagatcatcatgaagaagccctaagatccagcacctttcttgaagatcaagaaactgtctcttggatccaataccctccagatgaagacccattcgaacccgacgacttctcctcccacttcttctcaaccatggatcccctccagagaccaacctcagagacggttaagcctaagtccagtcctgaacctcctcaagtcatggttaagcctaaggcctgtcctgaccctcctcctcaagtcatgcctcctccaaaatttaggttaacaaattcatcatcggggattagggaaacagaaatggaacagtactcggtaacgaccgttggacctagccattgcggaagcaacccatcacagaacgatctcgatgtctcaatgagtcatgatcgaagcaaaaacatagaagaaaagcttaatccgaacgcaagttcctcatcaggtggctcctctggttgcagctttggcaaagatatcaaagaaatggctagtggaagatgcatcacaaccgaccgtaagagaaaacgtataaatcacactgacgaatctgtatctctatcagatgcaatcggtaacaagtcgaaccaacgatcaggatcaaaccgaaggagtcgagcagctgaagttcataatctctccgaaaggaggaggagagataggatcaatgagagaatgaaggctttgcaagaactaatacctcactgcagtaaaactgataaagcttcgattttagacgaagccatagattatttgaaatcacttcagttacagcttcaagtgatgtggatggggagtggaatggcggcggcggcggcttcggctccgatgatgttccccggagttcaacctcagcagttcatacgtcagatacagagcccggtacagttacctcgatttccggttatggatcagtctgcaattcagaacaatcccggtttagtttgccaaaacccggtacaaaaccagatcatctccgaccggtttgctagatacatcggtgggttcccacacatgcaggccgcgactcagatgcagccgatggagatgttgagatttagttcaccggcgggacagcaaagtcaacaaccgtcgtctgtgccgacgaagaccaccgacggttctcgtttggaccactaggttggtgagccacttttttacttccttatttttggtatgtttcttttttatatctatctttctgaacatacttaaaacgttcaaggatgtattattatagagtaaacgtgcaacttcattacgttattttctgtatatgtgagtttatgtatgtcaaaatgacatgatgagattttttgtaaacaacatcttaaaaacaggacatgtgatttttgtaatcgtaaaaaaaaaggtaaat

SEQ ID NO: 85099 - protein, 430 aa, Arabidopsis thaliana
  peptide (1)..(430): Ceres Seq. ID no. 12678864
  misc_feature (258)..(307): Pfam Name: Helix-loop-helix DNA-binding domain Pfam Description: Helix-loop-helix DNA-binding domain
  misc_feature (1)..(430): Homolog of NCBI NO: 30689218 NR Description: transcription factor (BHLH9) -related
  misc_feature (1)..(430): Homolog of NCBI NO: 30689224 NR Description: transcription factor (BHLH9) -related
  misc_feature (1)..(430): Homolog of NCBI NO: 25408828 NR Description: hypothetical protein At2g43010 [imported] -
  misc_feature (1)..(267): Homolog of NCBI NO: 20197630 NR Description: expressed protein [Arabidopsis thaliana]
  misc_feature (1)..(267): Homolog of NCBI NO: 13430618 NR Description: unknown protein [Arabidopsis thaliana]
  misc_feature (6)..(424): Homolog of NCBI NO: 30694919 NR Description: bHLH protein family [Arabidopsis thaliana]
  misc_feature (6)..(424): Homolog of NCBI NO: 30694924 NR Description: bHLH protein family [Arabidopsis thaliana]
  misc_feature (6)..(424): Homolog of NCBI NO: 20127070 NR Description: putative bHLH transcription factor [Arabidopsis
  misc_feature (6)..(289): Homolog of NCBI NO: 19698849 NR Description: putative protein [Arabidopsis thaliana]
  misc_feature (25)..(360): Homolog of NCBI NO: 25411969 NR Description: hypothetical protein At2g20180 [imported] - thaliana >gi|4580456|gb|AAD24380.1| unknown protein [Arabidopsis
MEHQGWSFEENYSLSTNRRSIRPQDELVELLWRDGQVVLQSQTHREQTQTQKQDHHEEALRSSTFLEDQETVSWIQYPPDEDPFEPDDFSSHFFSTMDPLQRPTSETVKPKSSPEPPQVMVKPKACPDPPPQVMPPPKFRLTNSSSGIRETEMEQYSVTTVGPSHCGSNPSQNDLDVSMSHDRSKNIEEKLNPNASSSSGGSSGCSFGKDIKEMASGRCITTDRKRKRINHTDESVSLSDAIGNKSNQRSGSNRRSRAAEVHNLSERRRRDRINERMKALQELIPHCSKTDKASILDEAIDYLKSLQLQLQVMWMGSGMAAAAASAPMMFPGVQPQQFIRQIQSPVQLPRFPVMDQSAIQNNPGLVCQNPVQNQIISDRFARYIGGFPHMQAATQMQPMEMLRFSSPAGQQSQQPSSVPTKTTDGSRLDH

SEQ ID NO: 85100 - protein, 334 aa, Arabidopsis thaliana
  peptide (1)..(334): Ceres Seq. ID no. 12678865
  misc_feature (162)..(211): Pfam Name: Helix-loop-helix DNA-binding domain Pfam Description: Helix-loop-helix DNA-binding domain
  misc_feature (1)..(334): Homolog of NCBI NO: 30689218 NR Description: transcription factor (BHLH9) -related
  misc_feature (1)..(334): Homolog of NCBI NO: 30689224 NR Description: transcription factor (BHLH9) -related
  misc_feature (1)..(334): Homolog of NCBI NO: 25408828 NR Description: hypothetical protein At2g43010 [imported] -
  misc_feature (1)..(171): Homolog of NCBI NO: 20197630 NR Description: expressed protein [Arabidopsis thaliana]
  misc_feature (1)..(171): Homolog of NCBI NO: 13430618 NR Description: unknown protein [Arabidopsis thaliana]
  misc_feature (1)..(328): Homolog of NCBI NO: 30694919 NR Description: bHLH protein family [Arabidopsis thaliana]
  misc_feature (1)..(328): Homolog of NCBI NO: 30694924 NR Description: bHLH protein family [Arabidopsis thaliana]
  misc_feature (1)..(328): Homolog of NCBI NO: 20127070 NR Description: putative bHLH transcription factor [Arabidopsis
  misc_feature (1)..(193): Homolog of NCBI NO: 19698849 NR Description: putative protein [Arabidopsis thaliana]
  misc_feature (1)..(264): Homolog of NCBI NO: 25411969 NR Description: hypothetical protein At2g20180 [imported] - thaliana >gi|4580456|gb|AAD24380.1| unknown protein [Arabidopsis
MDPLQRPTSETVKPKSSPEPPQVMVKPKACPDPPPQVMPPPKFRLTNSSSGIRETEMEQYSVTTVGPSHCGSNPSQNDLDVSMSHDRSKNIEEKLNPNASSSSGGSSGCSFGKDIKEMASGRCITTDRKRKRINHTDESVSLSDAIGNKSNQRSGSNRRSRAAEVHNLSERRRRDRINERMKALQELIPHCSKTDKASILDEAIDYLKSLQLQLQVMWMGSGMAAAAASAPMMFPGVQPQQFIRQIQSPVQLPRFPVMDQSAIQNNPGLVCQNPVQNQIISDRFARYIGGFPHMQAATQMQPMEMLRFSSPAGQQSQQPSSVPTKTTDGSRLDH

SEQ ID NO: 85101 - protein, 311 aa, Arabidopsis thaliana
  peptide (1)..(311): Ceres Seq. ID no. 12678866
  misc_feature (139)..(188): Pfam Name: Helix-loop-helix DNA-binding domain Pfam Description: Helix-loop-helix DNA-binding domain
  misc_feature (1)..(311): Homolog of NCBI NO: 30689218 NR Description: transcription factor (BHLH9) -related
  misc_feature (1)..(311): Homolog of NCBI NO: 30689224 NR Description: transcription factor (BHLH9) -related
  misc_feature (1)..(311): Homolog of NCBI NO: 25408828 NR Description: hypothetical protein At2g43010 [imported] -
  misc_feature (1)..(148): Homolog of NCBI NO: 20197630 NR Description: expressed protein [Arabidopsis thaliana]
  misc_feature (1)..(148): Homolog of NCBI NO: 13430618 NR Description: unknown protein [Arabidopsis thaliana]
  misc_feature (1)..(305): Homolog of NCBI NO: 30694919 NR Description: bHLH protein family [Arabidopsis thaliana]
  misc_feature (1)..(305): Homolog of NCBI NO: 30694924 NR Description: bHLH protein family [Arabidopsis thaliana]
  misc_feature (1)..(305): Homolog of NCBI NO: 20127070 NR Description: putative bHLH transcription factor [Arabidopsis
  misc_feature (1)..(170): Homolog of NCBI NO: 19698849 NR Description: putative protein [Arabidopsis thaliana]
  misc_feature (1)..(241): Homolog of NCBI NO: 25411969 NR Description: hypothetical protein At2g20180 [imported] - thaliana >gi|4580456|gb|AAD24380.1| unknown protein [Arabidopsis
MVKPKACPDPPPQVMPPPKFRLTNSSSGIRETEMEQYSVTTVGPSHCGSNPSQNDLDVSMSHDRSKNIEEKLNPNASSSSGGSSGCSFGKDIKEMASGRCITTDRKRKRINHTDESVSLSDAIGNKSNQRSGSNRRSRAAEVHNLSERRRRDRINERMKALQELIPHCSKTDKASILDEAIDYLKSLQLQLQVMWMGSGMAAAAASAPMMFPGVQPQQFIRQIQSPVQLPRFPVMDQSAIQNNPGLVCQNPVQNQIISDRFARYIGGFPHMQAATQMQPMEMLRFSSPAGQQSQQPSSVPTKTTDGSRLDH

SEQ ID NO: 85102 - DNA, 1962 bp, Arabidopsis thaliana
  misc_feature (1)..(1962): Ceres Seq. ID no. 12678880
  misc_feature: MA Experiment ID: 20000166 Result: Up-regulated in Transcription
  misc_feature: MA Experiment 20000166 PARAMETER Experiment Name: At_100uM_ABA_P Parameter: Age (day) Value: 14
  misc_feature: MA Experiment 20000166 PARAMETER Experiment Name: At_100uM_ABA_P Parameter: Organism Value: A. thaliana
  misc_feature: MA Experiment 20000166 PARAMETER Experiment Name: At_100uM_ABA_P Parameter: Plant Line Value: WS
  misc_feature: MA Experiment 20000166 PARAMETER Experiment Name: At_100uM_ABA_P Parameter: Timepoint (hr) Value: 1
  misc_feature: MA Experiment 20000166 PARAMETER Experiment Name: At_100uM_ABA_P Parameter: Tissue Value: Aerial
  misc_feature: MA Experiment 20000166 PARAMETER Experiment Name: At_100uM_ABA_P Parameter: Treatment Value: 100uM ABA vs. No Treatment
  misc_feature: MA Experiment ID: 20000441 Result: Up-regulated in Transcription
  misc_feature: MA Experiment 20000441 PARAMETER Experiment Name: At_1uM_BR-BRZ__P Parameter: Tissue Value: Shoot Apices
  misc_feature: MA Experiment 20000441 PARAMETER Experiment Name: At_1uM_BR-BRZ__P Parameter: Treatment Value: 1uM BR vs. No Treatment
  misc_feature: MA Experiment ID: 20001247 Result: Up-regulated in Transcription
  misc_feature: MA Experiment 20001247 PARAMETER Experiment Name: At_Far-red-induction_P Parameter: Age (day) Value: 7
  misc_feature: MA Experiment 20001247 PARAMETER Experiment Name: At_Far-red-induction_P Parameter: Light Value: Far-red vs. White
  misc_feature: MA Experiment 20001247 PARAMETER Experiment Name: At_Far-red-induction_P Parameter: Organism Value: A. thaliana
  misc_feature: MA Experiment 20001247 PARAMETER Experiment Name: At_Far-red-induction_P Parameter: Plant Line Value: Columbia
  misc_feature: MA Experiment 20001247 PARAMETER Experiment Name: At_Far-red-induction_P Parameter: Timepoint (hr) Value: 1
  misc_feature: MA Experiment 20001247 PARAMETER Experiment Name: At_Far-red-induction_P Parameter: Tissue Value: Whole Plant
  misc_feature: MA Experiment ID: 20001450 Result: Up-regulated in Transcription
  misc_feature: MA Experiment 20001450 PARAMETER Experiment Name: At_Far-red-induction_P Parameter: Age (day) Value: 7
  misc_feature: MA Experiment 20001450 PARAMETER Experiment Name: At_Far-red-induction_P Parameter: Light Value: Far-red vs. White
  misc_feature: MA Experiment 20001450 PARAMETER Experiment Name: At_Far-red-induction_P Parameter: Organism Value: A. thaliana
  misc_feature: MA Experiment 20001450 PARAMETER Experiment Name: At_Far-red-induction_P Parameter: Plant Line Value: Columbia
  misc_feature: MA Experiment 20001450 PARAMETER Experiment Name: At_Far-red-induction_P Parameter: Timepoint (hr) Value: 8
  misc_feature: MA Experiment 20001450 PARAMETER Experiment Name: At_Far-red-induction_P Parameter: Tissue Value: Whole Plant
  misc_feature: MA Experiment ID: 20001557 Result: Down-regulated in Transcription
  misc_feature: MA Experiment 20001557 PARAMETER Experiment Name: At_Drought_Soil_Dry_P Parameter: Age (day) Value: 27
  misc_feature: MA Experiment 20001557 PARAMETER Experiment Name: At_Drought_Soil_Dry_P Parameter: Organism Value: A. thaliana
  misc_feature: MA Experiment 20001557 PARAMETER Experiment Name: At_Drought_Soil_Dry_P Parameter: Plant Line Value: WS
  misc_feature: MA Experiment 20001557 PARAMETER Experiment Name: At_Drought_Soil_Dry_P Parameter: Post Timepoint (hr) Value: 3
  misc_feature: MA Experiment 20001557 PARAMETER Experiment Name: At_Drought_Soil_Dry_P Parameter: Post-Treatment Value: Re-Water vs. No Drought
  misc_feature: MA Experiment 20001557 PARAMETER Experiment Name: At_Drought_Soil_Dry_P Parameter: Timepoint (day) Value: 13
  misc_feature: MA Experiment 20001557 PARAMETER Experiment Name: At_Drought_Soil_Dry_P Parameter: Treatment Value: Drought vs. No Drought
gtcgtctttttaaaaacgttttactttccacggcgaattttggtctgattccaaattcttccctagtttgaaaaatcttctgtattctgaaaagagattttatgcgtatcgctgaaataggaagaaaacagattcctttccatttcccaaattttgtcattgagtcttggcatttcaaccaatcgcaatttattgaaattccggcgagtcattagatttttttggattccgtttcaaggtacggtgctttttcgcagattgagaagagcttaataagaaagatgacattgacgatcccaaacgcacctgggagctccgggtacttggatatgttcccagagagaaggatgtcgtattttgggaattcttacattctgggtttgactgtcactgccggaatcggtggccttctgttcggttatgatacaggtgtaatttccggtgcccttttgtacattaaggatgatttcgaagttgttaagcagagcagtttcttacaggaaactattgtaagtatggctttagttggtgccatgattggtgctgcagctggaggttggatcaatgactactacggtcgtaaaaaggcgactctttttgcagatgttgtctttgcagctggagctatcgttatggctgctgctcctgatccgtatgttttgatatcgggtcgtctcttggtcggtttaggagttggtgttgcttctgtgactgctccggtttatatagcggaagcatctccatcggaagttagaggtggacttgtgagcaccaacgtattgatgatcactggtggacagtttctttcatatctcgttaattctgctttcacacaggttccaggaacatggagatggatgcttggtgtttcaggcgttcccgctgtgattcagttcatcctcatgcttttcatgccagaatcccctcgatggcttttcatgaaaaatcgtaaagcggaagccatccaagtgctcgccagaacctatgacatctcgcggttagaagacgagattgatcatctttcagcggctgaagaggaagaaaaacaaaggaagcgcactgttggctacttggatgttttcagatccaaagaattgagacttgcatttcttgccggagcaggacttcaggcgtttcagcagttcactggtatcaatacagttatgtactacagccctacgatagtccaaatggctggatttcactcaaaccagctcgctttgttcctgtctctcattgttgctgccatgaatgctgctggaacagtcgtggggatttacttcatcgatcattgtggaaggaaaaagctagctctctcaagtttatttggcgtcattatatcactcttaatcctctcagtctcgtttttcaaacaatctgagacatcatctgatggagggctctatggttggctcgctgtgcttggcttagctctatacattgttttctttgcaccgggaatgggaccagtcccatggacggtgaactcagagatataccctcaacaataccgaggcatatgcggaggcatgtcagctacagttaactggatcagcaatttgattgtggcacaaacattcttgacaatcgcggaagctgctggaacaggaatgactttcttgattttggcgggaattgcggttcttgctgtaatctttgtgattgtgtttgtccctgagactcaagggctaacgttttcggaagttgaacagatttggaaagaaagagcttatggaaatatcagtggctggggcagtagcagtgatagcaacaacatggaagggttactcgagcagggatctcaatcttaaagatcttggatggctcatgagtcatgcatgacttacacattgtgaaatcacatagtagtaaaccgggattggttccggtttagcaatgtgagatgtatgtgatgttggaattgtaatgttcttaggaactgtgattgtaaataaatacatt

SEQ ID NO: 85103 - protein, 509 aa, Arabidopsis thaliana; identical to SEQ ID NO: 49279
  peptide (1)..(509): Ceres Seq. ID no. 12678881
  misc_feature (34)..(479): Pfam Name: Sugar (and other) transporter Pfam Description: Sugar (and other) transporter
  misc_feature (1)..(509): Homolog of NCBI NO: 30689342 NR Description: sugar transporter family [Arabidopsis thaliana] putative membrane transporter protein [Arabidopsis thaliana]
  misc_feature (1)..(509): Homolog of NCBI NO: 25308955 NR Description: probable membrane transporter [imported] - thaliana >gi|2289003|gb|AAB64332.1| putative membrane transporter
  misc_feature (3)..(501): Homolog of NCBI NO: 29501739 NR Description: putative Na+/myo-inositol symporter
  misc_feature (1)..(486): Homolog of NCBI NO: 38347452 NR Description: OSJNBa0076N16.21 [Oryza sativa (japonica
  misc_feature (28)..(364): Homolog of NCBI NO: 15220697 NR Description: hypothetical protein; protein id: At1g30220.1, by cDNA: gi_18377758 [Arabidopsis thaliana]
  misc_feature (375)..(483): Homolog of NCBI NO: 15220697 NR Description: hypothetical protein; protein id: At1g30220.1, by cDNA: gi_18377758 [Arabidopsis thaliana]
  misc_feature (28)..(373): Homolog of NCBI NO: 33146705 NR Description: putative proton myo-inositol transporter [Oryza
  misc_feature (375)..(482): Homolog of NCBI NO: 33146705 NR Description: putative proton myo-inositol transporter [Oryza
  misc_feature (30)..(362): Homolog of NCBI NO: 15235767 NR Description: membrane transporter like protein; protein id:
  misc_feature (361)..(478): Homolog of NCBI NO: 15235767 NR Description: membrane transporter like protein; protein id:

SEQ ID NO: 85104 - protein, 493 aa, Arabidopsis thaliana; identical to SEQ ID NO: 49280
  peptide (1)..(493): Ceres Seq. ID no. 12678882
  misc_feature (18)..(463): Pfam Name: Sugar (and other) transporter Pfam Description: Sugar (and other) transporter
  misc_feature (1)..(493): Homolog of NCBI NO: 30689342 NR Description: sugar transporter family [Arabidopsis thaliana] putative membrane transporter protein [Arabidopsis thaliana]
  misc_feature (1)..(493): Homolog of NCBI NO: 25308955 NR Description: probable membrane transporter [imported] - thaliana >gi|2289003|gb|AAB64332.1| putative membrane transporter
  misc_feature (1)..(485): Homolog of NCBI NO: 29501739 NR Description: putative Na+/myo-inositol symporter
  misc_feature (1)..(470): Homolog of NCBI NO: 38347452 NR Description: OSJNBa0076N16.21 [Oryza sativa (japonica
  misc_feature (12)..(348): Homolog of NCBI NO: 15220697 NR Description: hypothetical protein; protein id: At1g30220.1, by cDNA: gi_18377758 [Arabidopsis thaliana]
  misc_feature (359)..(467): Homolog of NCBI NO: 15220697 NR Description: hypothetical protein; protein id: At1g30220.1, by cDNA: gi_18377758 [Arabidopsis thaliana]
  misc_feature (12)..(357): Homolog of NCBI NO: 33146705 NR Description: putative proton myo-inositol transporter [Oryza
  misc_feature (359)..(466): Homolog of NCBI NO: 33146705 NR Description: putative proton myo-inositol transporter [Oryza
  misc_feature (14)..(346): Homolog of NCBI NO: 15235767 NR Description: membrane transporter like protein; protein id:
  misc_feature (345)..(462): Homolog of NCBI NO: 15235767 NR Description: membrane transporter like protein; protein id:

SEQ ID NO: 85105 - protein, 487 aa, Arabidopsis thaliana; identical to SEQ ID NO: 49281
  peptide (1)..(487): Ceres Seq. ID no. 12678883
  misc_feature (12)..(457): Pfam Name: Sugar (and other) transporter Pfam Description: Sugar (and other) transporter
  misc_feature (1)..(487): Homolog of NCBI NO: 30689342 NR Description: sugar transporter family [Arabidopsis thaliana] putative membrane transporter protein [Arabidopsis thaliana]
  misc_feature (1)..(487): Homolog of NCBI NO: 25308955 NR Description: probable membrane transporter [imported] - thaliana >gi|2289003|gb|AAB64332.1| putative membrane transporter
  misc_feature (1)..(479): Homolog of NCBI NO: 29501739 NR Description: putative Na+/myo-inositol symporter
  misc_feature (1)..(464): Homolog of NCBI NO: 38347452 NR Description: OSJNBa0076N16.21 [Oryza sativa (japonica
  misc_feature (6)..(342): Homolog of NCBI NO: 15220697 NR Description: hypothetical protein; protein id: At1g30220.1, by cDNA: gi_18377758 [Arabidopsis thaliana]
  misc_feature (353)..(461): Homolog of NCBI NO: 15220697 NR Description: hypothetical protein; protein id: At1g30220.1, by cDNA: gi_18377758 [Arabidopsis thaliana]
  misc_feature (6)..(351): Homolog of NCBI NO: 33146705 NR Description: putative proton myo-inositol transporter [Oryza
  misc_feature (353)..(460): Homolog of NCBI NO: 33146705 NR Description: putative proton myo-inositol transporter [Oryza
  misc_feature (8)..(340): Homolog of NCBI NO: 15235767 NR Description: membrane transporter like protein; protein id:
  misc_feature (339)..(456): Homolog of NCBI NO: 15235767 NR Description: membrane transporter like protein; protein id:

SEQ ID NO: 85106 - DNA, 1852 bp, Arabidopsis thaliana
  misc_feature (1)..(1852): Ceres Seq. ID no. 12678886
  misc_feature: MA Experiment ID: 20000184 Result: Down-regulated in Transcription
  misc_feature: MA Experiment 20000184 PARAMETER Experiment Name: At_Shoots__P Parameter: Age (day) Value: 7
  misc_feature: MA Experiment 20000184 PARAMETER Experiment Name: At_Shoots__P Parameter: Tissue Value: Shoots vs. Whole Plant
  misc_feature: MA Experiment ID: 20001451 Result: Up-regulated in Transcription
  misc_feature: MA Experiment 20001451 PARAMETER Experiment Name: At_Far-red-induction_P Parameter: Age (day) Value: 7
  misc_feature: MA Experiment 20001451 PARAMETER Experiment Name: At_Far-red-induction_P Parameter: Light Value: Far-red vs. White
  misc_feature: MA Experiment 20001451 PARAMETER Experiment Name: At_Far-red-induction_P Parameter: Organism Value: A. thaliana
  misc_feature: MA Experiment 20001451 PARAMETER Experiment Name: At_Far-red-induction_P Parameter: Plant Line Value: Columbia
  misc_feature: MA Experiment 20001451 PARAMETER Experiment Name: At_Far-red-induction_P Parameter: Timepoint (hr) Value: 24
  misc_feature: MA Experiment 20001451 PARAMETER Experiment Name: At_Far-red-induction_P Parameter: Tissue Value: Whole Plant
ggtggcgttaagtcgttaactgcgtctgatctactcgtagcttcttcgttcttcagcatttgatcggagtagtgacctttttgattgacagatggaagctctgtcttctcttacgttcaagggttctcttccagaagccatatttgaagccaaagggaagaagaagctttttgttgtctacatttctggagaggatgaagagtcggataagttgaacagattgacttggactgatgcatcggtggcagattcgttgtcgaagtattgtattttagtgcatatccaagctggaagtgttgacgccacaaacttctctgcaatatacccatattcatctgttccttgtatagctgccattggattcagtggtacacaagtttggagaaccgaaggatttatcactgctgaagaccttgcatccagtttagagaaagcgtggttaggacttcatatccaggaaacaactgcaagtatcttttcagcagcacttgcatcacagaactcagagacacctgtttctagtgcttcgagtgttgtcttgcctcccggaagtgttcctttagatgcagcggttgcatctccatcgacggcttctagtgttcaaccctcagagacaaagtcaacggtaacatctgcatcaacaacagaaaacaatgatggcacagttgcagttaagggcaaagaatctgctgaacccagtaatttgtgtgatactactaaaaaccagccagcaccctctgttgatggaactaaggccaatgttgaacatgaagcgacagagacccctttgcgtgttcaggcagaaaaggagccaattcgtcctacagccccaggaacaaatgataatacatccagggttcgatcttctgttgatagaaaaaggaaacagggaactgtgataaatgaagaggatagtggtgtaggtgttagtggaagggacattaatctaacaaaatctgtcgatacaaaagagaccatgaagccaaaggatgaaggaggagaggaagaggatggagaaaaatccaaaaaagcatctgacgttcatttaaacattcgattacctgatggtagtagccttcaggagaagttttctgtgacaagtatattgagaatggtcaaggattatgtgaacagtaatcaaacaatcggactgggtgcttatgatcttgcggttccttacccacgtaaggtgtatactgaccaagatctggataagtctctatccgagttgagattgttcgatagacaagcacttgtagtagttccgcgaaaaagagcaaccgtctatcaaagaggaacatcttactcggagtctaacaacaacacagaccctaatagtggcggttactttgcttatgttagaagagtactgtcttatgcaaacccgttttcatattttggcggtggtactgccaacgcatcaagctctgttccagaacgtcaaacaagaccaaatacggaggtgagaaacaatctggggcaagtagggacgtcctttcaagatccatcagaaggtaggagcaacgttaggaataggagaccaaccacttctcggattggaagtaacatccatacgttgaatcacaatgaagatgaggctccgtttggtgatggaaacgctttttggaacggaaactccacacagtacggtggtggaagcggtggagacagtaatgatagacgatgaaataagagaagttgaaatctgtgtggatagatacagaaacagctcgggtgtttactttttatacttgactctttatgaaccatttaagagaccagctgcaaaatgtatcctgatgcgtttccgttttttcggttgctcgtattaaatttaaatctaaaaaaacta

SEQ ID NO: 85107 - protein, 531 aa, Arabidopsis thaliana; identical to SEQ ID NO: 28835
  peptide (1)..(531): Ceres Seq. ID no. 12678887
  misc_feature (311)..(392): Pfam Name: UBX domain Pfam Description: UBX domain
  misc_feature (1)..(531): Homolog of NCBI NO: 30689298 NR Description: expressed protein [Arabidopsis thaliana] expressed protein [Arabidopsis thaliana] expressed protein [Arabidopsis thaliana]
  misc_feature (1)..(531): Homolog of NCBI NO: 20147205 NR Description: MFL8.1/MFL8.1 [Arabidopsis thaliana]
  misc_feature (1)..(452): Homolog of NCBI NO: 25408846 NR Description: hypothetical protein At2g43210 [imported] -
  misc_feature (9)..(518): Homolog of NCBI NO: 40555755 NR Description: Unknown (protein for MGC:73362) [Danio rerio]
  misc_feature (7)..(518): Homolog of NCBI NO: 24307965 NR Description: UBX domain containing 2; UBX domain-containing 2;
  misc_feature (7)..(518): Homolog of NCBI NO: 1663704 NR Description: KIAA0242 protein [Homo sapiens]
  misc_feature (7)..(518): Homolog of NCBI NO: 26344511 NR Description: unnamed protein product [Mus musculus]
  misc_feature (7)..(518): Homolog of NCBI NO: 23956178 NR Description: RIKEN cDNA 1300013G12 [Mus musculus]
  misc_feature (7)..(203): Homolog of NCBI NO: 12859540 NR Description: unnamed protein product [Mus musculus]
  misc_feature (7)..(203): Homolog of NCBI NO: 12847220 NR Description: unnamed protein product [Mus musculus]

SEQ ID NO: 85108 - DNA, 1052 bp, Arabidopsis thaliana
  misc_feature (1)..(1052): Ceres Seq. ID no. 12678888
  misc_feature: MA Experiment ID: 20000227 Result: Up-regulated in Transcription
  misc_feature: MA Experiment 20000227 PARAMETER Experiment Name: At_Root-Tips-vs-Tops_P Parameter: Tissue Value: Root Tips vs. Root Tops
ccttgagatggttatgattcatatcttcctcaccgtgatggtggttggaggcgtcagtctcttcccggagacggcagaagcgatcgtgatgggaccgtcgatgcagaagctgacgtggcattactataaagtttacaacacttgcgagaatgcagagaattttgtgaggcaccaagttgagatattttacaagaacgataaaagtattgctcctaagctccttcgtctcctctactcagactgctttgtttccggatgcgatgcatcagttcttctagaaggtccaaactcagagaaaatggcgccacaaaacagaggacttggaggattcgttctcatagacaaaatcaaaatagtcttggaacagagatgtcctggtgttgtctcttgcgccgacattcttaatcttgcaactcgtgatgctgttcatttggcgggtgcaccatcttatcctgtgttcacaggcaggagagatggtttgacgtctgataagcaaaccgtggacctaccatcgccatccatctcatgggaccaagccatgtcttatttcaaatccagaggcttgaatgttcttgacatggctacacttctaggatcacattcaatggggagaacacattgcagctatgttgttgatcgactctacaattacaacaagaccggtaaaccaagccctactatgaacaagtatttcctatctgaaatggcaaagcaatgtcctccaagaacgaggaaaggccagaccgatccgctcgtgtacctaaacccggactcaggctcaaaccacagcttcacaagctcattttactcaagaattctatcaaacaaatctgtacttgaagtagatcaacaactgctttacaatgatgacaccaagcaaatatctaaggaattctcagagggtttcgaggattttcggaaatcatttgctctttcgatgagcaagatgggagcgataaatgtgttaactaaaacggaaggtgagatacgaaaagattgcaggcatataaactaaacacaaaagcacaatctctctctcaccactgtgatac

SEQ ID NO: 85109 - protein, 337 aa, Arabidopsis thaliana
  peptide (1)..(337): Ceres Seq. ID no. 12678889
  misc_feature (3)..(337): Homolog of NCBI NO: 30689391 NR Description: peroxidase, putative [Arabidopsis thaliana]
  misc_feature (3)..(337): Homolog of NCBI NO: 19310389 NR Description: At2g43480/T1O24.22 [Arabidopsis thaliana]
  misc_feature (13)..(337): Homolog of NCBI NO: 25285613 NR Description: probable peroxidase [imported] - Arabidopsis >gi|2288998|gb|AAB64327.1| putative peroxidase [Arabidopsis
  misc_feature (3)..(337): Homolog of NCBI NO: 15237884 NR Description: cationic peroxidase family; protein id: [Arabidopsis thaliana] >gi|26397805|sp|Q9FLV5|PE61_ARATH Probable
  misc_feature (48)..(334): Homolog of NCBI NO: 1546690 NR Description: peroxidase; peroxidase ATP14a [Arabidopsis
  misc_feature (48)..(334): Homolog of NCBI NO: 15242232 NR Description: peroxidase, putative; protein id: At5g22410.1 thaliana] >gi|26397811|sp|Q9FMR0|PE60_ARATH Peroxidase 60 (Atperox P60) (ATP14a) >gi|9757822|dbj|BAB08340.1| peroxidase
  misc_feature (50)..(337): Homolog of NCBI NO: 37536958 NR Description: putative peroxidase [Oryza sativa (japonica >gi|18855005|gb|AAL79697.1| putative peroxidase [Oryza sativa]
  misc_feature (46)..(337): Homolog of NCBI NO: 1232069 NR Description: cationic peroxidase [Stylosanthes humilis]
  misc_feature (37)..(333): Homolog of NCBI NO: 26397587 NR Description: Putative Peroxidase 48 (Atperox P48)
  misc_feature (47)..(337): Homolog of NCBI NO: 15238030 NR Description: peroxidase, putative; protein id: At5g17820.1, by cDNA: 39195. [Arabidopsis thaliana] Peroxidase 57 precursor (Atperox P57) (PRXR10) (ATP13a)
LEMVMIHIFLTVMVVGGVSLFPETAEAIVMGPSMQKLTWHYYKVYNTCENAENFVRHQVEIFYKNDKSIAPKLLRLLYSDCFVSGCDASVLLEGPNSEKMAPQNRGLGGFVLIDKIKIVLEQRCPGVVSCADILNLATRDAVHLAGAPSYPVFTGRRDGLTSDKQTVDLPSPSISWDQAMSYFKSRGLNVLDMATLLGSHSMGRTHCSYVVDRLYNYNKTGKPSPTMNKYFLSEMAKQCPPRTRKGQTDPLVYLNPDSGSNHSFTSSFYSRILSNKSVLEVDQQLLYNDDTKQISKEFSEGFEDFRKSFALSMSKMGAINVLTKTEGEIRKDCRHIN

SEQ ID NO: 85110 - protein, 335 aa, Arabidopsis thaliana
  peptide (1)..(335): Ceres Seq. ID no. 12678890
  misc_feature (1)..(335): Homolog of NCBI NO: 30689391 NR Description: peroxidase, putative [Arabidopsis thaliana]
  misc_feature (1)..(335): Homolog of NCBI NO: 19310389 NR Description: At2g43480/T1O24.22 [Arabidopsis thaliana]
  misc_feature (11)..(335): Homolog of NCBI NO: 25285613 NR Description: probable peroxidase [imported] - Arabidopsis >gi|2288998|gb|AAB64327.1| putative peroxidase [Arabidopsis
  misc_feature (1)..(335): Homolog of NCBI NO: 15237884 NR Description: cationic peroxidase family; protein id: [Arabidopsis thaliana] >gi|26397805|sp|Q9FLV5|PE61_ARATH Probable
  misc_feature (46)..(332): Homolog of NCBI NO: 1546690 NR Description: peroxidase; peroxidase ATP14a [Arabidopsis
  misc_feature (46)..(332): Homolog of NCBI NO: 15242232 NR Description: peroxidase, putative; protein id: At5g22410.1 thaliana] >gi|26397811|sp|Q9FMR0|PE60_ARATH Peroxidase 60 (Atperox P60) (ATP14a) >gi|9757822|dbj|BAB08340.1| peroxidase
  misc_feature (48)..(335): Homolog of NCBI NO: 37536958 NR Description: putative peroxidase [Oryza sativa (japonica >gi|18855005|gb|AAL79697.1| putative peroxidase [Oryza sativa]
  misc_feature (44)..(335): Homolog of NCBI NO: 1232069 NR Description: cationic peroxidase [Stylosanthes humilis]
  misc_feature (35)..(331): Homolog of NCBI NO: 26397587 NR Description: Putative Peroxidase 48 (Atperox P48)
  misc_feature (45)..(335): Homolog of NCBI NO: 15238030 NR Description: peroxidase, putative; protein id: At5g17820.1, by cDNA: 39195. [Arabidopsis thaliana] Peroxidase 57 precursor (Atperox P57) (PRXR10) (ATP13a)
MVMIHIFLTVMVVGGVSLFPETAEAIVMGPSMQKLTWHYYKVYNTCENAENFVRHQVEIFYKNDKSIAPKLLRLLYSDCFVSGCDASVLLEGPNSEKMAPQNRGLGGFVLIDKIKIVLEQRCPGVVSCADILNLATRDAVHLAGAPSYPVFTGRRDGLTSDKQTVDLPSPSISWDQAMSYFKSRGLNVLDMATLLGSHSMGRTHCSYVVDRLYNYNKTGKPSPTMNKYFLSEMAKQCPPRTRKGQTDPLVYLNPDSGSNHSFTSSFYSRILSNKSVLEVDQQLLYNDDTKQISKEFSEGFEDFRKSFALSMSKMGAINVLTKTEGEIRKDCRHIN

SEQ ID NO: 85111 - protein, 333 aa, Arabidopsis thaliana
  peptide (1)..(333): Ceres Seq. ID no. 12678891
  misc_feature (1)..(333): Homolog of NCBI NO: 30689391 NR Description: peroxidase, putative [Arabidopsis thaliana]
  misc_feature (1)..(333): Homolog of NCBI NO: 19310389 NR Description: At2g43480/T1O24.22 [Arabidopsis thaliana]
  misc_feature (9)..(333): Homolog of NCBI NO: 25285613 NR Description: probable peroxidase [imported] - Arabidopsis >gi|2288998|gb|AAB64327.1| putative peroxidase [Arabidopsis
  misc_feature (1)..(333): Homolog of NCBI NO: 15237884 NR Description: cationic peroxidase family; protein id: [Arabidopsis thaliana] >gi|26397805|sp|Q9FLV5|PE61_ARATH Probable
  misc_feature (44)..(330): Homolog of NCBI NO: 1546690 NR Description: peroxidase; peroxidase ATP14a [Arabidopsis
  misc_feature (44)..(330): Homolog of NCBI NO: 15242232 NR Description: peroxidase, putative; protein id: At5g22410.1 thaliana] >gi|26397811|sp|Q9FMR0|PE60_ARATH Peroxidase 60 (Atperox P60) (ATP14a) >gi|9757822|dbj|BAB08340.1| peroxidase
  misc_feature (46)..(333): Homolog of NCBI NO: 37536958 NR Description: putative peroxidase [Oryza sativa (japonica >gi|18855005|gb|AAL79697.1| putative peroxidase [Oryza sativa]
  misc_feature (42)..(333): Homolog of NCBI NO: 1232069 NR Description: cationic peroxidase [Stylosanthes humilis]
  misc_feature (33)..(329): Homolog of NCBI NO: 26397587 NR Description: Putative Peroxidase 48 (Atperox P48)
  misc_feature (43)..(333): Homolog of NCBI NO: 15238030 NR Description: peroxidase, putative; protein id: At5g17820.1, by cDNA: 39195. [Arabidopsis thaliana] Peroxidase 57 precursor (Atperox P57) (PRXR10) (ATP13a)
MIHIFLTVMVVGGVSLFPETAEAIVMGPSMQKLTWHYYKVYNTCENAENFVRHQVEIFYKNDKSIAPKLLRLLYSDCFVSGCDASVLLEGPNSEKMAPQNRGLGGFVLIDKIKIVLEQRCPGVVSCADILNLATRDAVHLAGAPSYPVFTGRRDGLTSDKQTVDLPSPSISWDQAMSYFKSRGLNVLDMATLLGSHSMGRTHCSYVVDRLYNYNKTGKPSPTMNKYFLSEMAKQCPPRTRKGQTDPLVYLNPDSGSNHSFTSSFYSRILSNKSVLEVDQQLLYNDDTKQISKEFSEGFEDFRKSFALSMSKMGAINVLTKTEGEIRKDCRHIN

SEQ ID NO: 85112 - DNA, 1876 bp, Arabidopsis thaliana
  misc_feature (1)..(1876): Ceres Seq. ID no. 12678904
  misc_feature: MA Experiment ID: 20000179 Result: Up-regulated in Transcription
  misc_feature: MA Experiment 20000179 PARAMETER Experiment Name: At_Germinating_Seeds_P Parameter: Age (hr) Value: 6 vs. 0
  misc_feature: MA Experiment 20000179 PARAMETER Experiment Name: At_Germinating_Seeds_P Parameter: Tissue Value: Germinating Seeds
gaagctctcacgtgacaaaaacacgcacaaaattattcaagttaccacgtttattaagcaaaacgattgagccaaaaaaaacgcatcagaatctggaacctggatcagatctagtcaggggtcagatcggagagccggcaatataatggcagcggcgagacgattacggacgctccaatctcagccggagaacaaggtctgtgtcgattgctcccagaagaatccacaatgggcatcgatttcatatggaatcttcatgtgcttggaatgctccggtaagcaccgtggtttaggtgttcacatctcattcgtcagatccgtcaccatggattcatggtccgagatccagatcaagaaaatggacgctggaggcaacgagcgtctcaacaattttctcgctcagtacgggatctcgaaagagactgatatcatctccaagtacaattccaacgccgcgtctgtgtatcgagatcggatccaagctttagctgagggaagacaatggagagatccgccgattgttaaggaatcggttggtggtggattgatgaataagaagcctccgttgtctcaaggcggtggtagagattctggtaatggtggatgggataattgggataacgatgattcgtttagatctacggatatgaggaggaatcaatcggcgggtgattttaggtcatcgggaggtcgtggtgctccggcgaagtcgaaatcgtctgaggatatatattcacggtctcagctggaggcgtcggcggcgaataaggagagtttctttgcgaaaaggatggctgagaatgagtctaagcctgagggacttcctccttcacaaggtggtaagtatgttgggtttggatctagtccaggtccagctccgagaagcaatcaacagagtggtggtggtgatgttttctctgttatgtctgagggttttggaagattgtctcttgttgctgcatcagctgcaaatgttgttcagactggaaccatggagtttacttccaaggtcaaagaaggtggcttagatcagacggtcagtgagactgttaatgttgttgcgagtaagacaacagagataggacagaggacatgggggatcatgaaaggagtgatggcaattgcctcacaaaaggttgaagagttcactaaagaagaagcatcaacttggaatcaacagaataaaactgagggcaacggttactaccagaactctgggattggaaacaaaacagcaaattcatcttttggaggatcacaatcatcatcaagtggtcacaacaacagttatcgtaactcgaattcttgggatgactggggagaagagaacaatagcaaaaaggaagcagcaccaaaggtgtcgacttctaatgatgatgacgacggcggttgggctggttgggatgataatgatgctaaagatgatgatttctattatcagcctgcaagcgataagaaatctgtaggtcacaatgggaaatcagacactgcttggaccggtggaggttttctctaacggtgttacaggataatggtgaatgaagtttgtacaattaaggaatagcagagcctgtggtcttctcgtgctctgtcacaagagagagcagagtggtcatctcaaccattaagccaccactggtctttcttttcacatatcaattgcttggcgttcaatcaaatcgatcgtcactatttgttcttctacaatatatatagtttttttttttatttgtacaagtttcacagtcacagaggattgcttgctaaactattcgggttagtcttcagctctttttttgagattcaaacttttatttttcttgaaatttgtaatgatcacaaaagacaaattttccgttttattgtcttctttctc

SEQ ID NO: 85113 - protein, 456 aa, Arabidopsis thaliana; identical to SEQ ID NO: 47114
  peptide (1)..(456): Ceres Seq. ID no. 12678905
  misc_feature (4)..(120): Pfam Name: Putative GTPase activating protein for Arf Pfam Description: Putative GTPase activating protein for Arf
  misc_feature (1)..(456): Homolog of NCBI NO: 15224315 NR Description: putative ADP ribosylation factor 1 GTPase protein; protein id: At2g37550.1, supported by cDNA: gi_14334619, by cDNA: gi_16930688, supported by cDNA: gi_17104724, supported
  misc_feature (1)..(456): Homolog of NCBI NO: 15231865 NR Description: putative protein; protein id: At3g53710.1
  misc_feature (1)..(447): Homolog of NCBI NO: 10441356 NR Description: ARF GAP-like zinc finger-containing protein ZIGA2
  misc_feature (143)..(455): Homolog of NCBI NO: 29367415 NR Description: ADP ribosylation GTPase-like protein [Oryza
  misc_feature (7)..(423): Homolog of NCBI NO: 21489979 NR Description: ADP-ribosylation factor 1 GTPase activating
  misc_feature (155)..(391): Homolog of NCBI NO: 6319975 NR Description: Zn-finger-containing protein that functions as
  misc_feature (5)..(122): Homolog of NCBI NO: 6319975 NR Description: Zn-finger-containing protein that functions as
  misc_feature (6)..(120): Homolog of NCBI NO: 19075686 NR Description: zinc finger protein, gcs1 homolog, putative
  misc_feature (206)..(261): Homolog of NCBI NO: 19075686 NR Description: zinc finger protein, gcs1 homolog, putative
  misc_feature (1)..(195): Homolog of NCBI NO: 17508013 NR Description: Putative GTP-ase activating protein for Arf (45.7

SEQ ID NO: 85114 - protein, 419 aa, Arabidopsis thaliana; identical to SEQ ID NO: 47115
  peptide (1)..(419): Ceres Seq. ID no. 12678906
  misc_feature (1)..(83): Pfam Name: Putative GTPase activating protein for Arf Pfam Description: Putative GTPase activating protein for Arf
  misc_feature (1)..(419): Homolog of NCBI NO: 15224315 NR Description: putative ADP ribosylation factor 1 GTPase protein; protein id: At2g37550.1, supported by cDNA: gi_14334619, by cDNA: gi_16930688, supported by cDNA: gi_17104724, supported
  misc_feature (1)..(419): Homolog of NCBI NO: 15231865 NR Description: putative protein; protein id: At3g53710.1
  misc_feature (1)..(410): Homolog of NCBI NO: 10441356 NR Description: ARF GAP-like zinc finger-containing protein ZIGA2
  misc_feature (106)..(418): Homolog of NCBI NO: 29367415 NR Description: ADP ribosylation GTPase-like protein [Oryza
  misc_feature (1)..(386): Homolog of NCBI NO: 21489979 NR Description: ADP-ribosylation factor 1 GTPase activating
  misc_feature (118)..(354): Homolog of NCBI NO: 6319975 NR Description: Zn-finger-containing protein that functions as
  misc_feature (1)..(85): Homolog of NCBI NO: 6319975 NR Description: Zn-finger-containing protein that functions as
  misc_feature (1)..(83): Homolog of NCBI NO: 19075686 NR Description: zinc finger protein, gcs1 homolog, putative
  misc_feature (169)..(224): Homolog of NCBI NO: 19075686 NR Description: zinc finger protein, gcs1 homolog, putative
  misc_feature (1)..(158): Homolog of NCBI NO: 17508013 NR Description: Putative GTP-ase activating protein for Arf (45.7

SEQ ID NO: 85115 - protein, 396 aa, Arabidopsis thaliana; identical to SEQ ID NO: 47116
  peptide (1)..(396): Ceres Seq. ID no. 12678907
  misc_feature (1)..(60): Pfam Name: Putative GTPase activating protein for Arf Pfam Description: Putative GTPase activating protein for Arf
  misc_feature (1)..(396): Homolog of NCBI NO: 15224315 NR Description: putative ADP ribosylation factor 1 GTPase protein; protein id: At2g37550.1, supported by cDNA: gi_14334619, by cDNA: gi_16930688, supported by cDNA: gi_17104724, supported
  misc_feature (1)..(396): Homolog of NCBI NO: 15231865 NR Description: putative protein; protein id: At3g53710.1
  misc_feature (1)..(387): Homolog of NCBI NO: 10441356 NR Description: ARF GAP-like zinc finger-containing protein ZIGA2
  misc_feature (83)..(395): Homolog of NCBI NO: 29367415 NR Description: ADP ribosylation GTPase-like protein [Oryza
  misc_feature (1)..(363): Homolog of NCBI NO: 21489979 NR Description: ADP-ribosylation factor 1 GTPase activating
  misc_feature (95)..(331): Homolog of NCBI NO: 6319975 NR Description: Zn-finger-containing protein that functions as
  misc_feature (1)..(62): Homolog of NCBI NO: 6319975 NR Description: Zn-finger-containing protein that functions as
  misc_feature (1)..(60): Homolog of NCBI NO: 19075686 NR Description: zinc finger protein, gcs1 homolog, putative
  misc_feature (146)..(201): Homolog of NCBI NO: 19075686 NR Description: zinc finger protein, gcs1 homolog, putative
  misc_feature (1)..(135): Homolog of NCBI NO: 17508013 NR Description: Putative GTP-ase activating protein for Arf (45.7

SEQ ID NO: 85116 - DNA, 2541 bp, Arabidopsis thaliana
  misc_feature (1)..(2541): Ceres Seq. ID no. 12678912
  misc_feature: MA Experiment ID: 20000173 Result: Down-regulated in Transcription
  misc_feature: MA Experiment 20000173 PARAMETER Experiment Name: At_42deg_Heat_P Parameter: Age (day) Value: 14
  misc_feature: MA Experiment 20000173 PARAMETER Experiment Name: At_42deg_Heat_P Parameter: Organism Value: A. thaliana
  misc_feature: MA Experiment 20000173 PARAMETER Experiment Name: At_42deg_Heat_P Parameter: Plant Line Value: WS
  misc_feature: MA Experiment 20000173 PARAMETER Experiment Name: At_42deg_Heat_P Parameter: Temperature (deg C) Value: 42 vs. 22
  misc_feature: MA Experiment 20000173 PARAMETER Experiment Name: At_42deg_Heat_P Parameter: Timepoint (hr) Value: 6
  misc_feature: MA Experiment 20000173 PARAMETER Experiment Name: At_42deg_Heat_P Parameter: Tissue Value: Aerial
  misc_feature: MA Experiment ID: 20000184 Result: Down-regulated in Transcription
  misc_feature: MA Experiment 20000184 PARAMETER Experiment Name: At_Shoots__P Parameter: Age (day) Value: 7
  misc_feature: MA Experiment 20000184 PARAMETER Experiment Name: At_Shoots__P Parameter: Tissue Value: Shoots vs. Whole Plant
  misc_feature: MA Experiment ID: 20000185 Result: Up-regulated in Transcription
  misc_feature: MA Experiment 20000185 PARAMETER Experiment Name: At_Roots__P Parameter: Age (day) Value: 7 vs. 21
  misc_feature: MA Experiment 20000185 PARAMETER Experiment Name: At_Roots__P Parameter: Organism Value: A. thaliana
  misc_feature: MA Experiment 20000185 PARAMETER Experiment Name: At_Roots__P Parameter: Tissue Value: Roots vs. Whole Plant
  misc_feature: MA Experiment ID: 20000439 Result: Up-regulated in Transcription
  misc_feature: MA Experiment 20000439 PARAMETER Experiment Name: At_Roots__P Parameter: Age (day) Value: 14 vs. 21
  misc_feature: MA Experiment 20000439 PARAMETER Experiment Name: At_Roots__P Parameter: Organism Value: A. thaliana
  misc_feature: MA Experiment 20000439 PARAMETER Experiment Name: At_Roots__P Parameter: Tissue Value: Roots vs. Whole Plant
  misc_feature: MA Experiment ID: 20000495 Result: Up-regulated in Transcription
  misc_feature: MA Experiment 20000495 PARAMETER Experiment Name: At_Guard_Cells_P Parameter: Harvest Date Value: 8/2/2002
  misc_feature: MA Experiment 20000495 PARAMETER Experiment Name: At_Guard_Cells_P Parameter: Organism Value: A. thaliana
  misc_feature: MA Experiment 20000495 PARAMETER Experiment Name: At_Guard_Cells_P Parameter: Tissue Value: Guard Cells vs. Leaves
  misc_feature: MA Experiment ID: 20000794 Result: Up-regulated in Transcription
  misc_feature: MA Experiment 20000794 PARAMETER Experiment Name: At_Petals_P Parameter: Age (day) Value: 23-25 days
  misc_feature: MA Experiment 20000794 PARAMETER Experiment Name: At_Petals_P Parameter: Plant Line Value: WS
  misc_feature: MA Experiment 20000794 PARAMETER Experiment Name: At_Petals_P Parameter: Tissue Value: Petals vs. Whole plant
  misc_feature: MA Experiment ID: 20001557 Result: Down-regulated in Transcription
  misc_feature: MA Experiment 20001557 PARAMETER Experiment Name: At_Drought_Soil_Dry_P Parameter: Age (day) Value: 27
  misc_feature: MA Experiment 20001557 PARAMETER Experiment Name: At_Drought_Soil_Dry_P Parameter: Organism Value: A. thaliana
  misc_feature: MA Experiment 20001557 PARAMETER Experiment Name: At_Drought_Soil_Dry_P Parameter: Plant Line Value: WS
  misc_feature: MA Experiment 20001557 PARAMETER Experiment Name: At_Drought_Soil_Dry_P Parameter: Post Timepoint (hr) Value: 3
  misc_feature: MA Experiment 20001557 PARAMETER Experiment Name: At_Drought_Soil_Dry_P Parameter: Post-Treatment Value: Re-Water vs. No Drought
  misc_feature: MA Experiment 20001557 PARAMETER Experiment Name: At_Drought_Soil_Dry_P Parameter: Timepoint (day) Value: 13
  misc_feature: MA Experiment 20001557 PARAMETER Experiment Name: At_Drought_Soil_Dry_P Parameter: Treatment Value: Drought vs. No Drought
aaaagattcctctttctcagctcaatttccaaaagctccgacctttacgatcctctagattctcggcgccggtttctcggagtaaataatggctcagttcacgggtcgggtcgttggagactacttggtgggtcgtcaaatcgggtcgggttcgttctctgttgtttgggaagcgaggcaccgcgttgacggtactgaggttgctatcaaagagatcgccatggacaggcttaacaagaagctgcaggaaagtctcatgtctgagatttttatcttgaggaggatcaatcatcctaacatcatccgtctgatcgacatgatcaagtctcctgggaaagtacatttggtgttggagtactgcaaaggaggtgacttgtctgtgtatgtccaaagacatgggattgtccctgaagctactgctaagcatttcatgcagcagttagcggccggcttacaagttcttcgtgacaataatattattcaccgagatttaaagcctcagaatcttcttctatccacaaatgaaaatgatgcagatctgaagattgctgattttggatttgcaagatcgttgcaacctagggggctcgcagagactttatgtggttcaccattgtatatggccccagagatcatgcaactccagaagtatgatgcaaaggcagatctctggagtgttggtgctattttatttcaacttgtgacaggcagaaccccttttacaggaaacagccaaattcagttgctccaaaacattataagatcaaccgaattacattttccaggggactgtagagatttaagcttggactgcatagacctgtgtcagaagttactgcgccgtaatccagtggaacgtttgacatttgaagagttctttaatcaccctttcctttcggacaggcagtcatatgatttctccaggagtagattggggttaagaacaatggacggttttctttcgtctggaagcagtccctcgagaaacatggaagaaagttctcaagaagactgtttgccgttccttctagatgatgattctagtggacctgaggggagcccttcatatttaaaaaagacatcctcaatgaagtcgtcctctggaattaaagtcgatacgagaattgagaggaaggaggtggaatctagtcctttaaaacatacagaacttacttctggatatagtagtttcaaccaaaaagtggaaaacgatagatttagatttgaaactcaaataaattcagataggagaaaccgcagggaaccgacaggattgactgattctagatcacttattgctccaggaagagtagatgattctcaagactccatggatcaagacttcgttctcgtatctggaccaccagtagatatgccatcatcttcatcaagttcttcgaagccttataattttccattcaagtctcagtctcctcctgtagagttattcaacagaagcataagttcaacggctcccatgccaataattggtgctactagcaacagcattggtcagtttgggagccttgacagtcagtattctgccccgagcacttctcatgggtctctggatcttggtgatgcttttgaacagccatcaactcacagcctgacaagaatcaggtctctgagaaaatatgcagcaacaattgcagaactagtttatgaaaggattgaatctgacaaacatctagaagctttctcgatccaattggcgattctggcaatttggaaacaggcactgcacatatgtcatactcaggcaatttcaggtttggaaggaagcccaagccaagacattaacaaactaagaagtagcagcctgaaacacgatactcacagttctaataaagtcactgatctcagccatgatggatcggaggagatatcctctcagattcagaggcaatttatacaggagattgagcttgctgaagaacttgccaagagtattgaacctggaaatacaaaaatgccagatgcaatggagacgatatttgaagcagcacttgatcttggaaaacttggaggagttaaggaggttatgggagatacagagaacgccggaaaccaatattcgaaagcagtgcgtttgctggtattccttttagtagaagcaccaatgctgattctgaatccgccactgtctctcacaaactcagtcaggtatcgtctcaggacatatattgatttcctcagcagaagattaaaacatctgcagtcacatagaagaagttcagctggtcagatgcaaggatcatcgttagctatgatgaacagacaatcataaatccattcacttgggttgggttctcttgtttcttgtgttcttttatgaaaaaaaaaaaaaaatctaaaagagaaaaatgtatatgtttttgtacagcaacatcatatattcttattcttttggggttaatctggagggacgttggggaaatgatctgtgtgatggatgttgtaacttgtaacattttcttgttctattttgatcttaatcctatgttttttacttgactttatgcaaaaatatatgttatg

SEQ ID NO: 85117 - protein, 733 aa, Arabidopsis thaliana
  peptide (1)..(733): Ceres Seq. ID no. 12678913
  misc_feature (12)..(269): Pfam Name: Protein kinase domain Pfam Description: Protein kinase domain
  misc_feature (159)..(733): Homolog of NCBI NO: 30687278 NR Description: protein kinase family [Arabidopsis thaliana]
  misc_feature (287)..(733): Homolog of NCBI NO: 25408568 NR Description: hypothetical protein At2g37850 [imported] -
  misc_feature (5)..(581): Homolog of NCBI NO: 30693945 NR Description: protein kinase family [Arabidopsis thaliana]
  misc_feature (45)..(581): Homolog of NCBI NO: 26452168 NR Description: unknown protein [Arabidopsis thaliana]
  misc_feature (218)..(581): Homolog of NCBI NO: 11357820 NR Description: hypothetical protein F5K20.230 - Arabidopsis >gi|7630013|emb|CAB88355.1| putative protein [Arabidopsis
  misc_feature (5)..(191): Homolog of NCBI NO: 11357820 NR Description: hypothetical protein F5K20.230 - Arabidopsis >gi|7630013|emb|CAB88355.1| putative protein [Arabidopsis
  misc_feature (298)..(722): Homolog of NCBI NO: 11357820 NR Description: hypothetical protein F5K20.230 - Arabidopsis >gi|7630013|emb|CAB88355.1| putative protein [Arabidopsis
  misc_feature (5)..(308): Homolog of NCBI NO: 18412205 NR Description: serine/threonine-protein kinase-like protein; id: At3g61960.1, supported by cDNA: gi_14334751 [Arabidopsis
  misc_feature (441)..(710): Homolog of NCBI NO: 18412205 NR Description: serine/threonine-protein kinase-like protein; id: At3g61960.1, supported by cDNA: gi_14334751 [Arabidopsis
  misc_feature (298)..(722): Homolog of NCBI NO: 26452168 NR Description: unknown protein [Arabidopsis thaliana]
MAQFTGRVVGDYLVGRQIGSGSFSVVWEARHRVDGTEVAIKEIAMDRLNKKLQESLMSEIFILRRINHPNIIRLIDMIKSPGKVHLVLEYCKGGDLSVYVQRHGIVPEATAKHFMQQLAAGLQVLRDNNIIHRDLKPQNLLLSTNENDADLKIADFGFARSLQPRGLAETLCGSPLYMAPEIMQLQKYDAKADLWSVGAILFQLVTGRTPFTGNSQIQLLQNIIRSTELHFPGDCRDLSLDCIDLCQKLLRRNPVERLTFEEFFNHPFLSDRQSYDFSRSRLGLRTMDGFLSSGSSPSRNMEESSQEDCLPFLLDDDSSGPEGSPSYLKKTSSMKSSSGIKVDTRIERKEVESSPLKHTELTSGYSSFNQKVENDRFRFETQINSDRRNRREPTGLTDSRSLIAPGRVDDSQDSMDQDFVLVSGPPVDMPSSSSSSSKPYNFPFKSQSPPVELFNRSISSTAPMPIIGATSNSIGQFGSLDSQYSAPSTSHGSLDLGDAFEQPSTHSLTRIRSLRKYAATIAELVYERIESDKHLEAFSIQLAILAIWKQALHICHTQAISGLEGSPSQDINKLRSSSLKHDTHSSNKVTDLSHDGSEEISSQIQRQFIQEIELAEELAKSIEPGNTKMPDAMETIFEAALDLGKLGGVKEVMGDTENAGNQYSKAVRLLVFLLVEAPMLILNPPLSLTNSVRYRLRTYIDFLSRRLKHLQSHRRSSAGQMQGSSLAMMNRQS

SEQ ID NO: 85118 - protein, 689 aa, Arabidopsis thaliana
  peptide (1)..(689): Ceres Seq. ID no. 12678914
  misc_feature (1)..(225): Pfam Name: Protein kinase domain Pfam Description: Protein kinase domain
  misc_feature (115)..(689): Homolog of NCBI NO: 30687278 NR Description: protein kinase family [Arabidopsis thaliana]
  misc_feature (243)..(689): Homolog of NCBI NO: 25408568 NR Description: hypothetical protein At2g37850 [imported] -
  misc_feature (1)..(537): Homolog of NCBI NO: 30693945 NR Description: protein kinase family [Arabidopsis thaliana]
  misc_feature (1)..(537): Homolog of NCBI NO: 26452168 NR Description: unknown protein [Arabidopsis thaliana]
  misc_feature (174)..(537): Homolog of NCBI NO: 11357820 NR Description: hypothetical protein F5K20.230 - Arabidopsis >gi|7630013|emb|CAB88355.1| putative protein [Arabidopsis
  misc_feature (1)..(147): Homolog of NCBI NO: 11357820 NR Description: hypothetical protein F5K20.230 - Arabidopsis >gi|7630013|emb|CAB88355.1| putative protein [Arabidopsis
  misc_feature (254)..(678): Homolog of NCBI NO: 11357820 NR Description: hypothetical protein F5K20.230 - Arabidopsis >gi|7630013|emb|CAB88355.1| putative protein [Arabidopsis
  misc_feature (1)..(264): Homolog of NCBI NO: 18412205 NR Description: serine/threonine-protein kinase-like protein; id: At3g61960.1, supported by cDNA: gi_14334751 [Arabidopsis
  misc_feature (397)..(666): Homolog of NCBI NO: 18412205 NR Description: serine/threonine-protein kinase-like protein; id: At3g61960.1, supported by cDNA: gi_14334751 [Arabidopsis
  misc_feature (254)..(678): Homolog of NCBI NO: 26452168 NR Description: unknown protein [Arabidopsis thaliana]
MDRLNKKLQESLMSEIFILRRINHPNIIRLIDMIKSPGKVHLVLEYCKGGDLSVYVQRHGIVPEATAKHFMQQLAAGLQVLRDNNIIHRDLKPQNLLLSTNENDADLKIADFGFARSLQPRGLAETLCGSPLYMAPEIMQLQKYDAKADLWSVGAILFQLVTGRTPFTGNSQIQLLQNIIRSTELHFPGDCRDLSLDCIDLCQKLLRRNPVERLTFEEFFNHPFLSDRQSYDFSRSRLGLRTMDGFLSSGSSPSRNMEESSQEDCLPFLLDDDSSGPEGSPSYLKKTSSMKSSSGIKVDTRIERKEVESSPLKHTELTSGYSSFNQKVENDRFRFETQINSDRRNRREPTGLTDSRSLIAPGRVDDSQDSMDQDFVLVSGPPVDMPSSSSSSSKPYNFPFKSQSPPVELFNRSISSTAPMPIIGATSNSIGQFGSLDSQYSAPSTSHGSLDLGDAFEQPSTHSLTRIRSLRKYAATIAELVYERIESDKHLEAFSIQLAILAIWKQALHICHTQAISGLEGSPSQDINKLRSSSLKHDTHSSNKVTDLSHDGSEEISSQIQRQFIQEIELAEELAKSIEPGNTKMPDAMETIFEAALDLGKLGGVKEVMGDTENAGNQYSKAVRLLVFLLVEAPMLILNPPLSLTNSVRYRLRTYIDFLSRRLKHLQSHRRSSAGQMQGSSLAMMNRQS

SEQ ID NO: 85119 - protein, 677 aa, Arabidopsis thaliana
  peptide (1)..(677): Ceres Seq. ID no. 12678915
  misc_feature (1)..(213): Pfam Name: Protein kinase domain Pfam Description: Protein kinase domain
  misc_feature (103)..(677): Homolog of NCBI NO: 30687278 NR Description: protein kinase family [Arabidopsis thaliana]
  misc_feature (231)..(677): Homolog of NCBI NO: 25408568 NR Description: hypothetical protein At2g37850 [imported] -
  misc_feature (1)..(525): Homolog of NCBI NO: 30693945 NR Description: protein kinase family [Arabidopsis thaliana]
  misc_feature (1)..(525): Homolog of NCBI NO: 26452168 NR Description: unknown protein [Arabidopsis thaliana]
  misc_feature (162)..(525): Homolog of NCBI NO: 11357820 NR Description: hypothetical protein F5K20.230 - Arabidopsis >gi|7630013|emb|CAB88355.1| putative protein [Arabidopsis
  misc_feature (1)..(135): Homolog of NCBI NO: 11357820 NR Description: hypothetical protein F5K20.230 - Arabidopsis >gi|7630013|emb|CAB88355.1| putative protein [Arabidopsis
  misc_feature (242)..(666): Homolog of NCBI NO: 11357820 NR Description: hypothetical protein F5K20.230 - Arabidopsis >gi|7630013|emb|CAB88355.1| putative protein [Arabidopsis
  misc_feature (1)..(252): Homolog of NCBI NO: 18412205 NR Description: serine/threonine-protein kinase-like protein; id: At3g61960.1, supported by cDNA: gi_14334751 [Arabidopsis
  misc_feature (385)..(654): Homolog of NCBI NO: 18412205 NR Description: serine/threonine-protein kinase-like protein; id: At3g61960.1, supported by cDNA: gi_14334751 [Arabidopsis
  misc_feature (242)..(666): Homolog of NCBI NO: 26452168 NR Description: unknown protein [Arabidopsis thaliana]
MSEIFILRRINHPNIIRLIDMIKSPGKVHLVLEYCKGGDLSVYVQRHGIVPEATAKHFMQQLAAGLQVLRDNNIIHRDLKPQNLLLSTNENDADLKIADFGFARSLQPRGLAETLCGSPLYMAPEIMQLQKYDAKADLWSVGAILFQLVTGRTPFTGNSQIQLLQNIIRSTELHFPGDCRDLSLDCIDLCQKLLRRNPVERLTFEEFFNHPFLSDRQSYDFSRSRLGLRTMDGFLSSGSSPSRNMEESSQEDCLPFLLDDDSSGPEGSPSYLKKTSSMKSSSGIKVDTRIERKEVESSPLKHTELTSGYSSFNQKVENDRFRFETQINSDRRNRREPTGLTDSRSLIAPGRVDDSQDSMDQDFVLVSGPPVDMPSSSSSSSKPYNFPFKSQSPPVELFNRSISSTAPMPIIGATSNSIGQFGSLDSQYSAPSTSHGSLDLGDAFEQPSTHSLTRIRSLRKYAATIAELVYERIESDKHLEAFSIQLAILAIWKQALHICHTQAISGLEGSPSQDINKLRSSSLKHDTHSSNKVTDLSHDGSEEISSQIQRQFIQEIELAEELAKSIEPGNTKMPDAMETIFEAALDLGKLGGVKEVMGDTENAGNQYSKAVRLLVFLLVEAPMLILNPPLSLTNSVRYRLRTYIDFLSRRLKHLQSHRRSSAGQMQGSSLAMMNRQS

SEQ ID NO: 85120 - DNA, 1033 bp, Arabidopsis thaliana
  misc_feature (1)..(1033): Ceres Seq. ID no. 12678936
  misc_feature: MA Experiment ID: 20000113 Result: Down-regulated in Transcription
  misc_feature: MA Experiment 20000113 PARAMETER Experiment Name: At_42deg_Heat_cDNA_P Parameter: Temperature (deg C) Value: 42 vs. 22
  misc_feature: MA Experiment 20000113 PARAMETER Experiment Name: At_42deg_Heat_cDNA_P Parameter: Timepoint (hr) Value: 8
  misc_feature: MA Experiment 20000113 PARAMETER Experiment Name: At_42deg_Heat_cDNA_P Parameter: Tissue Value: Aerial
  misc_feature: MA Experiment ID: 20000173 Result: Down-regulated in Transcription
  misc_feature: MA Experiment 20000173 PARAMETER Experiment Name: At_42deg_Heat_P Parameter: Age (day) Value: 14
  misc_feature: MA Experiment 20000173 PARAMETER Experiment Name: At_42deg_Heat_P Parameter: Organism Value: A. thaliana
  misc_feature: MA Experiment 20000173 PARAMETER Experiment Name: At_42deg_Heat_P Parameter: Plant Line Value: WS
  misc_feature: MA Experiment 20000173 PARAMETER Experiment Name: At_42deg_Heat_P Parameter: Temperature (deg C) Value: 42 vs. 22
  misc_feature: MA Experiment 20000173 PARAMETER Experiment Name: At_42deg_Heat_P Parameter: Timepoint (hr) Value: 6
  misc_feature: MA Experiment 20000173 PARAMETER Experiment Name: At_42deg_Heat_P Parameter: Tissue Value: Aerial
  misc_feature: MA Experiment ID: 20000439 Result: Up-regulated in Transcription
  misc_feature: MA Experiment 20000439 PARAMETER Experiment Name: At_Roots__P Parameter: Age (day) Value: 14 vs. 21
  misc_feature: MA Experiment 20000439 PARAMETER Experiment Name: At_Roots__P Parameter: Organism Value: A. thaliana
  misc_feature: MA Experiment 20000439 PARAMETER Experiment Name: At_Roots__P Parameter: Tissue Value: Roots vs. Whole Plant
  misc_feature: MA Experiment ID: 20000495 Result: Up-regulated in Transcription
  misc_feature: MA Experiment 20000495 PARAMETER Experiment Name: At_Guard_Cells_P Parameter: Harvest Date Value: 8/2/2002
  misc_feature: MA Experiment 20000495 PARAMETER Experiment Name: At_Guard_Cells_P Parameter: Organism Value: A. thaliana
  misc_feature: MA Experiment 20000495 PARAMETER Experiment Name: At_Guard_Cells_P Parameter: Tissue Value: Guard Cells vs. Leaves
  misc_feature: MA Experiment ID: 20000496 Result: Up-regulated in Transcription
  misc_feature: MA Experiment 20000496 PARAMETER Experiment Name: At_Guard_Cells_P Parameter: Harvest Date Value: 7/19/2002
  misc_feature: MA Experiment 20000496 PARAMETER Experiment Name: At_Guard_Cells_P Parameter: Organism Value: Canola
  misc_feature: MA Experiment 20000496 PARAMETER Experiment Name: At_Guard_Cells_P Parameter: Tissue Value: Guard Cells vs. Leaves
  misc_feature: MA Experiment ID: 20001451 Result: Up-regulated in Transcription
  misc_feature: MA Experiment 20001451 PARAMETER Experiment Name: At_Far-red-induction_P Parameter: Age (day) Value: 7
  misc_feature: MA Experiment 20001451 PARAMETER Experiment Name: At_Far-red-induction_P Parameter: Light Value: Far-red vs. White
  misc_feature: MA Experiment 20001451 PARAMETER Experiment Name: At_Far-red-induction_P Parameter: Organism Value: A. thaliana
  misc_feature: MA Experiment 20001451 PARAMETER Experiment Name: At_Far-red-induction_P Parameter: Plant Line Value: Columbia
  misc_feature: MA Experiment 20001451 PARAMETER Experiment Name: At_Far-red-induction_P Parameter: Timepoint (hr) Value: 24
  misc_feature: MA Experiment 20001451 PARAMETER Experiment Name: At_Far-red-induction_P Parameter: Tissue Value: Whole Plant
  misc_feature: MA Experiment ID: 20001905 Result: Down-regulated in Transcription
  misc_feature: MA Experiment 20001905 PARAMETER Experiment Name: At_Drought_Reproduction_P Parameter: Age (day) Value: 40
  misc_feature: MA Experiment 20001905 PARAMETER Experiment Name: At_Drought_Reproduction_P Parameter: Organism Value: A. thaliana
  misc_feature: MA Experiment 20001905 PARAMETER Experiment Name: At_Drought_Reproduction_P Parameter: Plant Line Value: WS
  misc_feature: MA Experiment 20001905 PARAMETER Experiment Name: At_Drought_Reproduction_P Parameter: Timepoint (day) Value: 10
  misc_feature: MA Experiment 20001905 PARAMETER Experiment Name: At_Drought_Reproduction_P Parameter: Tissue Value: Rosettes
  misc_feature: MA Experiment 20001905 PARAMETER Experiment Name: At_Drought_Reproduction_P Parameter: Treatment Value: Drought vs. No Drought
aattaaagttctccaattggagttgattctgcccttattagagagatctgatctttccccaattccataacccgaaaaatggaagaaatcgccgataaaaccttcttccgatactgtctcctcactcttattttcgccggcccaccaaccgccgtccttctgaaattcctccaagctccttacggtaaacacaaccgtaccggatggggtcccaccgtatctccaccgattgcttggttcgtcatggagagcccaaccttgtggctcactctcctcctcttcccctttggtcgtcacgctctcaaccctaaatctctacttctattctctccttatctcattcattacttccaccgcaccatcatttaccctcttcgcctcttccgcagctccttccccgccggtaaaaacggatttccgatcaccatcgccgccttggctttcacctttaatctcctcaatggttatatccaggcgaggtgggtttcgcattacaaggatgactacgaagacggaaactggttctggtggcggtttgttatcggtatggtggttttcataaccggcatgtatataaatatcacgtcggaccggactttggtacgattgaagaaagagaaccggggaggttatgtgataccgagaggaggctggttcgagttggtaagctgtccgaattattttggagaggcgattgagtggttgggctgggctgttatgacttggtcttgggccggtattggattttttctgtacacgtgttccaatttgtttccgcgtgcacgtgcgagtcacaagtggtacattgccaagttcaaggaagagtatcccaagactcgtaaagctgttattccttttgtgtactgagaattgagaaagttgaaaactagtttatcatatgttatgtgtcaatttgtttccaaactacctttgtcaaaatttccagtaaccggtttaattccaacacggtttagatcttatgttggtatcttcaacaatgcacaacaaactgtgtattctttagacaaatttt

SEQ ID NO: 85121 - protein, 262 aa, Arabidopsis thaliana; identical to SEQ ID NO: 39193
  peptide (1)..(262): Ceres Seq. ID no. 12678937
  misc_feature (111)..(262): Pfam Name: 3-oxo-5-alpha-steroid 4-dehydrogenase Pfam Description: 3-oxo-5-alpha-steroid 4-dehydrogenase
  misc_feature (1)..(262): Homolog of NCBI NO: 15224430 NR Description: 3-oxo-5-alpha-steroid 4-dehydrogenase; protein At2g38050.1, supported by cDNA: gi_1280610, supported by cDNA: supported by cDNA: gi_19310674 [Arabidopsis thaliana]
  misc_feature (1)..(262): Homolog of NCBI NO: 1280611 NR Description: steroid reductase DET2 [Arabidopsis thaliana]
  misc_feature (5)..(262): Homolog of NCBI NO: 23476464 NR Description: steroid 5-alpha-reductase [Gossypium hirsutum]

SEQ ID NO: 85122 - protein, 207 aa, Arabidopsis thaliana; identical to SEQ ID NO: 39194
  peptide (1)..(207): Ceres Seq. ID no. 12678938
  misc_feature (56)..(207): Pfam Name: 3-oxo-5-alpha-steroid 4-dehydrogenase Pfam Description: 3-oxo-5-alpha-steroid 4-dehydrogenase
  misc_feature (1)..(207): Homolog of NCBI NO: 15224430 NR Description: 3-oxo-5-alpha-steroid 4-dehydrogenase; protein At2g38050.1, supported by cDNA: gi_1280610, supported by cDNA: supported by cDNA: gi_19310674 [Arabidopsis thaliana]
  misc_feature (1)..(207): Homolog of NCBI NO: 1280611 NR Description: steroid reductase DET2 [Arabidopsis thaliana]
  misc_feature (1)..(207): Homolog of NCBI NO: 23476464 NR Description: steroid 5-alpha-reductase [Gossypium hirsutum]

SEQ ID NO: 85123 - DNA, 1241 bp, Arabidopsis thaliana
  misc_feature (1)..(1241): Ceres Seq. ID no. 12678949
  misc_feature: MA Experiment ID: 108434 Result: Down-regulated in Transcription
  misc_feature: MA Experiment 108434 PARAMETER Experiment Name: At_Root_Tips_cDNA_P Parameter: Tissue Value: Root Tips
  misc_feature: MA Experiment ID: 108461 Result: Up-regulated in Transcription
  misc_feature: MA Experiment 108461 PARAMETER Experiment Name: At_Germinating_Seeds_cDNA_P Parameter: Age (day) Value: 1 vs. 0
  misc_feature: MA Experiment 108461 PARAMETER Experiment Name: At_Germinating_Seeds_cDNA_P Parameter: Tissue Value: Germinating Seeds
  misc_feature: MA Experiment ID: 108462 Result: Up-regulated in Transcription
  misc_feature: MA Experiment 108462 PARAMETER Experiment Name: At_Germinating_Seeds_cDNA_P Parameter: Age (day) Value: 2 vs. 0
  misc_feature: MA Experiment 108462 PARAMETER Experiment Name: At_Germinating_Seeds_cDNA_P Parameter: Tissue Value: Germinating Seeds
  misc_feature: MA Experiment ID: 108463 Result: Up-regulated in Transcription
  misc_feature: MA Experiment 108463 PARAMETER Experiment Name: At_Germinating_Seeds_cDNA_P Parameter: Age (day) Value: 3 vs. 0
  misc_feature: MA Experiment 108463 PARAMETER Experiment Name: At_Germinating_Seeds_cDNA_P Parameter: Tissue Value: Germinating Seeds
  misc_feature: MA Experiment ID: 108464 Result: Up-regulated in Transcription
  misc_feature: MA Experiment 108464 PARAMETER Experiment Name: At_Germinating_Seeds_cDNA_P Parameter: Age (day) Value: 4 vs. 0
  misc_feature: MA Experiment 108464 PARAMETER Experiment Name: At_Germinating_Seeds_cDNA_P Parameter: Tissue Value: Germinating Seeds
  misc_feature: MA Experiment ID: 108469 Result: Down-regulated in Transcription
  misc_feature: MA Experiment ID: 108501 Result: Up-regulated in Transcription
  misc_feature: MA Experiment 108501 PARAMETER Experiment Name: At_ap2_floral_buds_cDNA_P Parameter: Plant Line Value: ap2 (Ler.)
  misc_feature: MA Experiment 108501 PARAMETER Experiment Name: At_ap2_floral_buds_cDNA_P Parameter: Tissue Value: Closed Flower
  misc_feature: MA Experiment ID: 108569 Result: Up-regulated in Transcription
  misc_feature: MA Experiment 108569 PARAMETER Experiment Name: At_0.001%_MeJA__cDNA_P Parameter: Timepoint (hr) Value: 6
  misc_feature: MA Experiment 108569 PARAMETER Experiment Name: At_0.001%_MeJA__cDNA_P Parameter: Tissue Value: Aerial
  misc_feature: MA Experiment 108569 PARAMETER Experiment Name: At_0.001%_MeJA__cDNA_P Parameter: Treatment Value: 0.001% MeJA vs. No Treatment
  misc_feature: MA Experiment ID: 108573 Result: Down-regulated in Transcription
  misc_feature: MA Experiment 108573 PARAMETER Experiment Name: At_Drought_cDNA_P Parameter: Timepoint (hr) Value: 6
  misc_feature: MA Experiment 108573 PARAMETER Experiment Name: At_Drought_cDNA_P Parameter: Tissue Value: Aerial
  misc_feature: MA Experiment 108573 PARAMETER Experiment Name: At_Drought_cDNA_P Parameter: Treatment Value: Drought vs. No Drought
  misc_feature: MA Experiment ID: 108574 Result: Up-regulated in Transcription
  misc_feature: MA Experiment 108574 PARAMETER Experiment Name: At_Wounding__cDNA_P Parameter: Timepoint (hr) Value: 1
  misc_feature: MA Experiment 108574 PARAMETER Experiment Name: At_Wounding__cDNA_P Parameter: Tissue Value: Aerial
  misc_feature: MA Experiment 108574 PARAMETER Experiment Name: At_Wounding__cDNA_P Parameter: Treatment Value: Wounding vs. No Wounding
  misc_feature: MA Experiment ID: 108577 Result: Down-regulated in Transcription
  misc_feature: MA Experiment 108577 PARAMETER Experiment Name: At_42deg_Heat_cDNA_P Parameter: Temperature (deg C) Value: 42 vs. 22
  misc_feature: MA Experiment 108577 PARAMETER Experiment Name: At_42deg_Heat_cDNA_P Parameter: Timepoint (hr) Value: 6
  misc_feature: MA Experiment 108577 PARAMETER Experiment Name: At_42deg_Heat_cDNA_P Parameter: Tissue Value: Aerial
  misc_feature: MA Experiment ID: 108579 Result: Up-regulated in Transcription
  misc_feature: MA Experiment 108579 PARAMETER Experiment Name: At_4deg_Cold_cDNA_P Parameter: Temperature (deg C) Value: 4 vs. 22
  misc_feature: MA Experiment 108579 PARAMETER Experiment Name: At_4deg_Cold_cDNA_P Parameter: Timepoint (hr) Value: 6
  misc_feature: MA Experiment 108579 PARAMETER Experiment Name: At_4deg_Cold_cDNA_P Parameter: Tissue Value: Aerial
  misc_feature: MA Experiment ID: 108594 Result: Down-regulated in Transcription
  misc_feature: MA Experiment 108594 PARAMETER Experiment Name: At_Ler-rhl_Root_cDNA_P Parameter: Plant Line Value: null
  misc_feature: MA Experiment ID: 108605 Result: Up-regulated in Transcription
  misc_feature: MA Experiment 108605 PARAMETER Experiment Name: At_100uM_ABA_cDNA_P Parameter: Timepoint (hr) Value: 6
  misc_feature: MA Experiment 108605 PARAMETER Experiment Name: At_100uM_ABA_cDNA_P Parameter: Tissue Value: Aerial
  misc_feature: MA Experiment 108605 PARAMETER Experiment Name: At_100uM_ABA_cDNA_P Parameter: Treatment Value: 100uM ABA vs. No Treatment
  misc_feature: MA Experiment ID: 108607 Result: Up-regulated in Transcription
  misc_feature: MA Experiment 108607 PARAMETER Experiment Name: At_100uM_ABA_cDNA_P Parameter: Timepoint (hr) Value: 4
  misc_feature: MA Experiment 108607 PARAMETER Experiment Name: At_100uM_ABA_cDNA_P Parameter: Tissue Value: Aerial
  misc_feature: MA Experiment 108607 PARAMETER Experiment Name: At_100uM_ABA_cDNA_P Parameter: Treatment Value: 100uM ABA vs. No Treatment
  misc_feature: MA Experiment ID: 20000069 Result: Up-regulated in Transcription
  misc_feature: MA Experiment 20000069 PARAMETER Experiment Name: At_100uM_ABA_Mutants_cDNA_P Parameter: Plant Line Value: CS23
  misc_feature: MA Experiment 20000069 PARAMETER Experiment Name: At_100uM_ABA_Mutants_cDNA_P Parameter: Timepoint (hr) Value: 6
  misc_feature: MA Experiment 20000069 PARAMETER Experiment Name: At_100uM_ABA_Mutants_cDNA_P Parameter: Tissue Value: Aerial
  misc_feature: MA Experiment 20000069 PARAMETER Experiment Name: At_100uM_ABA_Mutants_cDNA_P Parameter: Treatment Value: 100uM ABA vs. No Treatment
  misc_feature: MA Experiment ID: 20000071 Result: Up-regulated in Transcription
  misc_feature: MA Experiment 20000071 PARAMETER Experiment Name: At_100uM_ABA_Mutants_cDNA_P Parameter: Plant Line Value: CS8104
  misc_feature: MA Experiment 20000071 PARAMETER Experiment Name: At_100uM_ABA_Mutants_cDNA_P Parameter: Timepoint (hr) Value: 6
  misc_feature: MA Experiment 20000071 PARAMETER Experiment Name: At_100uM_ABA_Mutants_cDNA_P Parameter: Tissue Value: Aerial
  misc_feature: MA Experiment 20000071 PARAMETER Experiment Name: At_100uM_ABA_Mutants_cDNA_P Parameter: Treatment Value: 100uM ABA vs. No Treatment
  misc_feature: MA Experiment ID: 20000086 Result: Up-regulated in Transcription
  misc_feature: MA Experiment 20000086 PARAMETER Experiment Name: At_100uM_ABA_Mutants_cDNA_P Parameter: Plant Line Value: CS22
  misc_feature: MA Experiment 20000086 PARAMETER Experiment Name: At_100uM_ABA_Mutants_cDNA_P Parameter: Timepoint (hr) Value: 6
  misc_feature: MA Experiment 20000086 PARAMETER Experiment Name: At_100uM_ABA_Mutants_cDNA_P Parameter: Tissue Value: Aerial
  misc_feature: MA Experiment 20000086 PARAMETER Experiment Name: At_100uM_ABA_Mutants_cDNA_P Parameter: Treatment Value: 100uM ABA vs. No Treatment
  misc_feature: MA Experiment ID: 20000087 Result: Up-regulated in Transcription
  misc_feature: MA Experiment 20000087 PARAMETER Experiment Name: At_100uM_ABA_Mutants_cDNA_P Parameter: Plant Line Value: WS
  misc_feature: MA Experiment 20000087 PARAMETER Experiment Name: At_100uM_ABA_Mutants_cDNA_P Parameter: Timepoint (hr) Value: 6
  misc_feature: MA Experiment 20000087 PARAMETER Experiment Name: At_100uM_ABA_Mutants_cDNA_P Parameter: Tissue Value: Aerial
  misc_feature: MA Experiment 20000087 PARAMETER Experiment Name: At_100uM_ABA_Mutants_cDNA_P Parameter: Treatment Value: 100uM ABA vs. No Treatment
  misc_feature: MA Experiment ID: 20000117 Result: Up-regulated in Transcription
  misc_feature: MA Experiment 20000117 PARAMETER Experiment Name: At_100uM_ABA_Mutants_cDNA_P Parameter: Plant Line Value: Columbia
  misc_feature: MA Experiment 20000117 PARAMETER Experiment Name: At_100uM_ABA_Mutants_cDNA_P Parameter: Timepoint (hr) Value: 6
  misc_feature: MA Experiment 20000117 PARAMETER Experiment Name: At_100uM_ABA_Mutants_cDNA_P Parameter: Tissue Value: Aerial
  misc_feature: MA Experiment 20000117 PARAMETER Experiment Name: At_100uM_ABA_Mutants_cDNA_P Parameter: Treatment Value: 100uM ABA vs. No Treatment
  misc_feature: MA Experiment ID: 20000166 Result: Up-regulated in Transcription
  misc_feature: MA Experiment 20000166 PARAMETER Experiment Name: At_100uM_ABA_P Parameter: Age (day) Value: 14
  misc_feature: MA Experiment 20000166 PARAMETER Experiment Name: At_100uM_ABA_P Parameter: Organism Value: A. thaliana
  misc_feature: MA Experiment 20000166 PARAMETER Experiment Name: At_100uM_ABA_P Parameter: Plant Line Value: WS
  misc_feature: MA Experiment 20000166 PARAMETER Experiment Name: At_100uM_ABA_P Parameter: Timepoint (hr) Value: 1
  misc_feature: MA Experiment 20000166 PARAMETER Experiment Name: At_100uM_ABA_P Parameter: Tissue Value: Aerial
  misc_feature: MA Experiment 20000166 PARAMETER Experiment Name: At_100uM_ABA_P Parameter: Treatment Value: 100uM ABA vs. No Treatment
  misc_feature: MA Experiment ID: 20000173 Result: Down-regulated in Transcription
  misc_feature: MA Experiment 20000173 PARAMETER Experiment Name: At_42deg_Heat_P Parameter: Age (day) Value: 14
  misc_feature: MA Experiment 20000173 PARAMETER Experiment Name: At_42deg_Heat_P Parameter: Organism Value: A. thaliana
  misc_feature: MA Experiment 20000173 PARAMETER Experiment Name: At_42deg_Heat_P Parameter: Plant Line Value: WS
  misc_feature: MA Experiment 20000173 PARAMETER Experiment Name: At_42deg_Heat_P Parameter: Temperature (deg C) Value: 42 vs. 22
  misc_feature: MA Experiment 20000173 PARAMETER Experiment Name: At_42deg_Heat_P Parameter: Timepoint (hr) Value: 6
  misc_feature: MA Experiment 20000173 PARAMETER Experiment Name: At_42deg_Heat_P Parameter: Tissue Value: Aerial
  misc_feature: MA Experiment ID: 20000185 Result: Up-regulated in Transcription
  misc_feature: MA Experiment 20000185 PARAMETER Experiment Name: At_Roots__P Parameter: Age (day) Value: 7 vs. 21
  misc_feature: MA Experiment 20000185 PARAMETER Experiment Name: At_Roots__P Parameter: Organism Value: A. thaliana
  misc_feature: MA Experiment 20000185 PARAMETER Experiment Name: At_Roots__P Parameter: Tissue Value: Roots vs. Whole Plant
  misc_feature: MA Experiment ID: 20000211 Result: Up-regulated in Transcription
  misc_feature: MA Experiment 20000211 PARAMETER Experiment Name: At_0.001percent_MeJA__P Parameter: Age (day) Value: 14
  misc_feature: MA Experiment 20000211 PARAMETER Experiment Name: At_0.001percent_MeJA__P Parameter: Organism Value: A. thaliana
  misc_feature: MA Experiment 20000211 PARAMETER Experiment Name: At_0.001percent_MeJA__P Parameter: Plant Line Value: WS
  misc_feature: MA Experiment 20000211 PARAMETER Experiment Name: At_0.001percent_MeJA__P Parameter: Timepoint (hr) Value: 1
  misc_feature: MA Experiment 20000211 PARAMETER Experiment Name: At_0.001percent_MeJA__P Parameter: Tissue Value: Aerial
  misc_feature: MA Experiment 20000211 PARAMETER Experiment Name: At_0.001percent_MeJA__P Parameter: Treatment Value: 0.001percent MeJA vs. No Treatment
  misc_feature: MA Experiment ID: 20000224 Result: Up-regulated in Transcription
  misc_feature: MA Experiment ID: 20000227 Result: Up-regulated in Transcription
  misc_feature: MA Experiment 20000227 PARAMETER Experiment Name: At_Root-Tips-vs-Tops_P Parameter: Tissue Value: Root Tips vs. Root Tops
  misc_feature: MA Experiment ID: 20000265 Result: Up-regulated in Transcription
  misc_feature: MA Experiment 20000265 PARAMETER Experiment Name: At_Open_Flower_P Parameter: Age (day) Value: 21
  misc_feature: MA Experiment 20000265 PARAMETER Experiment Name: At_Open_Flower_P Parameter: Plant Line Value: WS
  misc_feature: MA Experiment 20000265 PARAMETER Experiment Name: At_Open_Flower_P Parameter: Tissue Value: Closed Flower vs. Whole Plant
  misc_feature: MA Experiment ID: 20000286 Result: Up-regulated in Transcription
  misc_feature: MA Experiment 20000286 PARAMETER Experiment Name: At_Open_Flower_P Parameter: Age (day) Value: 21
  misc_feature: MA Experiment 20000286 PARAMETER Experiment Name: At_Open_Flower_P Parameter: Plant Line Value: WS
  misc_feature: MA Experiment 20000286 PARAMETER Experiment Name: At_Open_Flower_P Parameter: Tissue Value: Half Open vs. Whole Plant
  misc_feature: MA Experiment ID: 20000438 Result: Up-regulated in Transcription
  misc_feature: MA Experiment 20000438 PARAMETER Experiment Name: At_Shoots__P Parameter: Age (day) Value: 14
  misc_feature: MA Experiment 20000438 PARAMETER Experiment Name: At_Shoots__P Parameter: Tissue Value: Shoots vs. Whole Plant
  misc_feature: MA Experiment ID: 20000439 Result: Up-regulated in Transcription
  misc_feature: MA Experiment 20000439 PARAMETER Experiment Name: At_Roots__P Parameter: Age (day) Value: 14 vs. 21
  misc_feature: MA Experiment 20000439 PARAMETER Experiment Name: At_Roots__P Parameter: Organism Value: A. thaliana
  misc_feature: MA Experiment 20000439 PARAMETER Experiment Name: At_Roots__P Parameter: Tissue Value: Roots vs. Whole Plant
  misc_feature: MA Experiment ID: 20000495 Result: Down-regulated in Transcription
  misc_feature: MA Experiment 20000495 PARAMETER Experiment Name: At_Guard_Cells_P Parameter: Harvest Date Value: 8/2/2002
  misc_feature: MA Experiment 20000495 PARAMETER Experiment Name: At_Guard_Cells_P Parameter: Organism Value: A. thaliana
  misc_feature: MA Experiment 20000495 PARAMETER Experiment Name: At_Guard_Cells_P Parameter: Tissue Value: Guard Cells vs. Leaves
  misc_feature: MA Experiment ID: 20000527 Result: Down-regulated in Transcription
  misc_feature: MA Experiment 20000527 PARAMETER Experiment Name: At_10percent_PEG_P Parameter: Age (day) Value: 20
  misc_feature: MA Experiment 20000527 PARAMETER Experiment Name: At_10percent_PEG_P Parameter: Organism Value: A. thaliana
  misc_feature: MA Experiment 20000527 PARAMETER Experiment Name: At_10percent_PEG_P Parameter: Plant Line Value: WS
  misc_feature: MA Experiment 20000527 PARAMETER Experiment Name: At_10percent_PEG_P Parameter: Timepoint (day) Value: 20
  misc_feature: MA Experiment 20000527 PARAMETER Experiment Name: At_10percent_PEG_P Parameter: Tissue Value: Whole Plant
  misc_feature: MA Experiment 20000527 PARAMETER Experiment Name: At_10percent_PEG_P Parameter: Treatment Value: 10percent PEG vs. No Treatment
  misc_feature: MA Experiment ID: 20000573 Result: Down-regulated in Transcription
  misc_feature: MA Experiment 20000573 PARAMETER Experiment Name: At_100uM_ABA_Mutants__P Parameter: Organism Value: A. thaliana
  misc_feature: MA Experiment 20000573 PARAMETER Experiment Name: At_100uM_ABA_Mutants__P Parameter: Plant Line Value: CS22 vs. Ler wt
  misc_feature: MA Experiment 20000573 PARAMETER Experiment Name: At_100uM_ABA_Mutants__P Parameter: Timepoint (hr) Value: N/A
  misc_feature: MA Experiment 20000573 PARAMETER Experiment Name: At_100uM_ABA_Mutants__P Parameter: Tissue Value: Whole Plant
  misc_feature: MA Experiment 20000573 PARAMETER Experiment Name: At_100uM_ABA_Mutants__P Parameter: Treatment Value: None
  misc_feature: MA Experiment ID: 20000794 Result: Down-regulated in Transcription
  misc_feature: MA Experiment 20000794 PARAMETER Experiment Name: At_Petals_P Parameter: Age (day) Value: 23-25 days
  misc_feature: MA Experiment 20000794 PARAMETER Experiment Name: At_Petals_P Parameter: Plant Line Value: WS
  misc_feature: MA Experiment 20000794 PARAMETER Experiment Name: At_Petals_P Parameter: Tissue Value: Petals vs. Whole plant
  misc_feature: MA Experiment ID: 20001248 Result: Down-regulated in Transcription
  misc_feature: MA Experiment 20001248 PARAMETER Experiment Name: At_Far-red-induction_P Parameter: Age (day) Value: 7
  misc_feature: MA Experiment 20001248 PARAMETER Experiment Name: At_Far-red-induction_P Parameter: Light Value: Far-red vs. White
  misc_feature: MA Experiment 20001248 PARAMETER Experiment Name: At_Far-red-induction_P Parameter: Organism Value: A. thaliana
  misc_feature: MA Experiment 20001248 PARAMETER Experiment Name: At_Far-red-induction_P Parameter: Plant Line Value: Columbia
  misc_feature: MA Experiment 20001248 PARAMETER Experiment Name: At_Far-red-induction_P Parameter: Timepoint (hr) Value: 4
  misc_feature: MA Experiment 20001248 PARAMETER Experiment Name: At_Far-red-induction_P Parameter: Tissue Value: Whole Plant
  misc_feature: MA Experiment ID: 20001450 Result: Down-regulated in Transcription
  misc_feature: MA Experiment 20001450 PARAMETER Experiment Name: At_Far-red-induction_P Parameter: Age (day) Value: 7
  misc_feature: MA Experiment 20001450 PARAMETER Experiment Name: At_Far-red-induction_P Parameter: Light Value: Far-red vs. White
  misc_feature: MA Experiment 20001450 PARAMETER Experiment Name: At_Far-red-induction_P Parameter: Organism Value: A. thaliana
  misc_feature: MA Experiment 20001450 PARAMETER Experiment Name: At_Far-red-induction_P Parameter: Plant Line Value: Columbia
  misc_feature: MA Experiment 20001450 PARAMETER Experiment Name: At_Far-red-induction_P Parameter: Timepoint (hr) Value: 8
  misc_feature: MA Experiment 20001450 PARAMETER Experiment Name: At_Far-red-induction_P Parameter: Tissue Value: Whole Plant
  misc_feature: MA Experiment ID: 20001451 Result: Down-regulated in Transcription
  misc_feature: MA Experiment 20001451 PARAMETER Experiment Name: At_Far-red-induction_P Parameter: Age (day) Value: 7
  misc_feature: MA Experiment 20001451 PARAMETER Experiment Name: At_Far-red-induction_P Parameter: Light Value: Far-red vs. White
  misc_feature: MA Experiment 20001451 PARAMETER Experiment Name: At_Far-red-induction_P Parameter: Organism Value: A. thaliana
  misc_feature: MA Experiment 20001451 PARAMETER Experiment Name: At_Far-red-induction_P Parameter: Plant Line Value: Columbia
  misc_feature: MA Experiment 20001451 PARAMETER Experiment Name: At_Far-red-induction_P Parameter: Timepoint (hr) Value: 24
  misc_feature: MA Experiment 20001451 PARAMETER Experiment Name: At_Far-red-induction_P Parameter: Tissue Value: Whole Plant
  misc_feature: MA Experiment ID: 20001560 Result: Up-regulated in Transcription
  misc_feature: MA Experiment 20001560 PARAMETER Experiment Name: At_Drought_Soil_Dry_P Parameter: Age (day) Value: 28
  misc_feature: MA Experiment 20001560 PARAMETER Experiment Name: At_Drought_Soil_Dry_P Parameter: Organism Value: A. thaliana
  misc_feature: MA Experiment 20001560 PARAMETER Experiment Name: At_Drought_Soil_Dry_P Parameter: Plant Line Value: WS
  misc_feature: MA Experiment 20001560 PARAMETER Experiment Name: At_Drought_Soil_Dry_P Parameter: Post Timepoint (hr) Value: None
  misc_feature: MA Experiment 20001560 PARAMETER Experiment Name: At_Drought_Soil_Dry_P Parameter: Post-Treatment Value: None
  misc_feature: MA Experiment 20001560 PARAMETER Experiment Name: At_Drought_Soil_Dry_P Parameter: Timepoint (day) Value: 14
  misc_feature: MA Experiment 20001560 PARAMETER Experiment Name: At_Drought_Soil_Dry_P Parameter: Treatment Value: Drought vs. No Drought
  misc_feature: MA Experiment ID: 20001911 Result: Down-regulated in Transcription
  misc_feature: MA Experiment 20001911 PARAMETER Experiment Name: At_Drought_Reproduction_P Parameter: Age (day) Value: 40
  misc_feature: MA Experiment 20001911 PARAMETER Experiment Name: At_Drought_Reproduction_P Parameter: Organism Value: A. thaliana
  misc_feature: MA Experiment 20001911 PARAMETER Experiment Name: At_Drought_Reproduction_P Parameter: Plant Line Value: WS
  misc_feature: MA Experiment 20001911 PARAMETER Experiment Name: At_Drought_Reproduction_P Parameter: Timepoint (day) Value: 10
  misc_feature: MA Experiment 20001911 PARAMETER Experiment Name: At_Drought_Reproduction_P Parameter: Tissue Value: Flowers
  misc_feature: MA Experiment 20001911 PARAMETER Experiment Name: At_Drought_Reproduction_P Parameter: Treatment Value: Drought vs. No Drought
acagaaaccaaaccaagagccggaaatcaaaaacagtaataaaagatcaactgcaagaaaatggctcttcctctcgagctcgaaagcctcactgaagccatctcagctgggatgggaatgggagttgatgagaatgcattgataagcacactggggaaatcgcaaaaggaacatagaaaattgtttaggaaagcaagcaaaagtttctttgttgaagatgaggaaagagcttttgagaaatgtcatgatcacttcgtcagacacctcaagcttgagttctcccgcttcaatactgcggtggtgatgtgggcaatgcatccatgggagagagatgcaaggttggtgaagaaagctttgaagaaaggagaagaagcttacaacctcatcgttgaggtctcatgcacacgctctgctgaggatctcctcggtgcacgtaaagcttaccactctctcttcgaccaatcaatggaagaagacattgcctctcacgtccacggtcctcagcgcaagttgcttgtggggctcgtgagtgcttatagatacgaaggaaataaggtgaaggatgattctgccaaatccgatgctaagattctagccgaagcagtggcttcttcaggcgaagaagccgtggagaaggatgaggttgttaggattttgaccacaagaagcaaacttcatctccaacatctctacaaacactttaacgaaatcaaaggctctgatcttcttgggggtgtatctaagtcttctcttctcaatgaagcattgatttgtttgctcaaaccggctctgtatttcagcaagattttggatgcgtctctgaacaaagacgcagacaagactaccaagaaatggttgacaagagtgttcgttacaagagcagatcatagtgatgagatgaatgagatcaaagaagagtacaataacctttatggtgagactttggctcaaagaatccaagagaagataaaagggaactacagagatttcttgctcacacttctctccaaatccgattgatttcgtgttgagaaacctattaccaatacttttggttattgaagatttatgatttccctttttatggttttatgtttctaattcctaaatttgcgttttctctaccgtttggtaataaagacatgaaaatttgatgaactcggtgaatcgagagtaagagttttgcgattgtgacaatgagtgattaatacaaggattaagctccaataaaaaaatgttgc

SEQ ID NO: 85124 - protein, 319 aa, Arabidopsis thaliana; identical to SEQ ID NO: 22126
  peptide (1)..(319): Ceres Seq. ID no. 12678950
  misc_feature (243)..(314): Pfam Name: Annexin Pfam Description: Annexin
  misc_feature (1)..(319): Homolog of NCBI NO: 15224946 NR Description: putative annexin; protein id: At2g38750.1, by cDNA: 32721., supported by cDNA: gi_14596094, supported by gi_20148308, supported by cDNA: gi_6503083 [Arabidopsis thaliana]
  misc_feature (6)..(319): Homolog of NCBI NO: 21264397 NR Description: Annexin-like protein RJ4
  misc_feature (15)..(315): Homolog of NCBI NO: 22326753 NR Description: annexin-like protein; protein id: At5g12380.1
  misc_feature (6)..(314): Homolog of NCBI NO: 7484723 NR Description: fiber annexin - upland cotton
  misc_feature (155)..(317): Homolog of NCBI NO: 3043430 NR Description: annexin [Cicer arietinum]
  misc_feature (2)..(319): Homolog of NCBI NO: 15220216 NR Description: Ca2+-dependent membrane-binding protein annexin; id: At1g35720.1, supported by cDNA: 25846., supported by cDNA:
  misc_feature (6)..(314): Homolog of NCBI NO: 15214410 NR Description: annexin [Gossypium hirsutum]
  misc_feature (6)..(314): Homolog of NCBI NO: 33357398 NR Description: Chain A, Annexin Gh1 From Cotton
  misc_feature (57)..(319): Homolog of NCBI NO: 1362037 NR Description: annexin homolog RJ4 (clone RJ4) - garden
  misc_feature (2)..(319): Homolog of NCBI NO: 1621539 NR Description: annexin-like protein

SEQ ID NO: 85125 - protein, 302 aa, Arabidopsis thaliana; identical to SEQ ID NO: 22127
  peptide (1)..(302): Ceres Seq. ID no. 12678951
  misc_feature (226)..(297): Pfam Name: Annexin Pfam Description: Annexin
  misc_feature (1)..(302): Homolog of NCBI NO: 15224946 NR Description: putative annexin; protein id: At2g38750.1, by cDNA: 32721., supported by cDNA: gi_14596094, supported by gi_20148308, supported by cDNA: gi_6503083 [Arabidopsis thaliana]
  misc_feature (1)..(302): Homolog of NCBI NO: 21264397 NR Description: Annexin-like protein RJ4
  misc_feature (1)..(298): Homolog of NCBI NO: 22326753 NR Description: annexin-like protein; protein id: At5g12380.1
  misc_feature (1)..(297): Homolog of NCBI NO: 7484723 NR Description: fiber annexin - upland cotton
  misc_feature (138)..(300): Homolog of NCBI NO: 3043430 NR Description: annexin [Cicer arietinum]
  misc_feature (1)..(302): Homolog of NCBI NO: 15220216 NR Description: Ca2+-dependent membrane-binding protein annexin; id: At1g35720.1, supported by cDNA: 25846., supported by cDNA:
  misc_feature (1)..(297): Homolog of NCBI NO: 15214410 NR Description: annexin [Gossypium hirsutum]
  misc_feature (1)..(297): Homolog of NCBI NO: 33357398 NR Description: Chain A, Annexin Gh1 From Cotton
  misc_feature (40)..(302): Homolog of NCBI NO: 1362037 NR Description: annexin homolog RJ4 (clone RJ4) - garden
  misc_feature (1)..(302): Homolog of NCBI NO: 1621539 NR Description: annexin-like protein

SEQ ID NO: 85126 - protein, 300 aa, Arabidopsis thaliana; identical to SEQ ID NO: 22128
  peptide (1)..(300): Ceres Seq. ID no. 12678952
  misc_feature (224)..(295): Pfam Name: Annexin Pfam Description: Annexin
  misc_feature (1)..(300): Homolog of NCBI NO: 15224946 NR Description: putative annexin; protein id: At2g38750.1, by cDNA: 32721., supported by cDNA: gi_14596094, supported by gi_20148308, supported by cDNA: gi_6503083 [Arabidopsis thaliana]
  misc_feature (1)..(300): Homolog of NCBI NO: 21264397 NR Description: Annexin-like protein RJ4
  misc_feature (1)..(296): Homolog of NCBI NO: 22326753 NR Description: annexin-like protein; protein id: At5g12380.1
  misc_feature (1)..(295): Homolog of NCBI NO: 7484723 NR Description: fiber annexin - upland cotton
  misc_feature (136)..(298): Homolog of NCBI NO: 3043430 NR Description: annexin [Cicer arietinum]
  misc_feature (1)..(300): Homolog of NCBI NO: 15220216 NR Description: Ca2+-dependent membrane-binding protein annexin; id: At1g35720.1, supported by cDNA: 25846., supported by cDNA:
  misc_feature (1)..(295): Homolog of NCBI NO: 15214410 NR Description: annexin [Gossypium hirsutum]
  misc_feature (1)..(295): Homolog of NCBI NO: 33357398 NR Description: Chain A, Annexin Gh1 From Cotton
  misc_feature (38)..(300): Homolog of NCBI NO: 1362037 NR Description: annexin homolog RJ4 (clone RJ4) - garden
  misc_feature (1)..(300): Homolog of NCBI NO: 1621539 NR Description: annexin-like protein

SEQ ID NO: 85127 - DNA, 1193 bp, Arabidopsis thaliana
  misc_feature (1)..(1193): Ceres Seq. ID no. 12678960
  misc_feature: MA Experiment ID: 20000166 Result: Up-regulated in Transcription
  misc_feature: MA Experiment 20000166 PARAMETER Experiment Name: At_100uM_ABA_P Parameter: Age (day) Value: 14
  misc_feature: MA Experiment 20000166 PARAMETER Experiment Name: At_100uM_ABA_P Parameter: Organism Value: A. thaliana
  misc_feature: MA Experiment 20000166 PARAMETER Experiment Name: At_100uM_ABA_P Parameter: Plant Line Value: WS
  misc_feature: MA Experiment 20000166 PARAMETER Experiment Name: At_100uM_ABA_P Parameter: Timepoint (hr) Value: 1
  misc_feature: MA Experiment 20000166 PARAMETER Experiment Name: At_100uM_ABA_P Parameter: Tissue Value: Aerial
  misc_feature: MA Experiment 20000166 PARAMETER Experiment Name: At_100uM_ABA_P Parameter: Treatment Value: 100uM ABA vs. No Treatment
  misc_feature: MA Experiment ID: 20000169 Result: Up-regulated in Transcription
  misc_feature: MA Experiment 20000169 PARAMETER Experiment Name: At_100uM_ABA_P Parameter: Age (day) Value: 14
  misc_feature: MA Experiment 20000169 PARAMETER Experiment Name: At_100uM_ABA_P Parameter: Organism Value: A. thaliana
  misc_feature: MA Experiment 20000169 PARAMETER Experiment Name: At_100uM_ABA_P Parameter: Plant Line Value: WS
  misc_feature: MA Experiment 20000169 PARAMETER Experiment Name: At_100uM_ABA_P Parameter: Timepoint (hr) Value: 6
  misc_feature: MA Experiment 20000169 PARAMETER Experiment Name: At_100uM_ABA_P Parameter: Tissue Value: Aerial
  misc_feature: MA Experiment 20000169 PARAMETER Experiment Name: At_100uM_ABA_P Parameter: Treatment Value: 100uM ABA vs. No Treatment
  misc_feature: MA Experiment ID: 20000234 Result: Down-regulated in Transcription
  misc_feature: MA Experiment 20000234 PARAMETER Experiment Name: At_Siliques_P Parameter: Age (day) Value: 21
  misc_feature: MA Experiment 20000234 PARAMETER Experiment Name: At_Siliques_P Parameter: Organism Value: A. thaliana
  misc_feature: MA Experiment 20000234 PARAMETER Experiment Name: At_Siliques_P Parameter: Plant Line Value: WS
  misc_feature: MA Experiment 20000234 PARAMETER Experiment Name: At_Siliques_P Parameter: Tissue Value: Less Than 5mm Siliques vs. Whole Plant
  misc_feature: MA Experiment ID: 20000235 Result: Down-regulated in Transcription
  misc_feature: MA Experiment 20000235 PARAMETER Experiment Name: At_Siliques_P Parameter: Age (day) Value: 21
  misc_feature: MA Experiment 20000235 PARAMETER Experiment Name: At_Siliques_P Parameter: Organism Value: A. thaliana
  misc_feature: MA Experiment 20000235 PARAMETER Experiment Name: At_Siliques_P Parameter: Plant Line Value: WS
  misc_feature: MA Experiment 20000235 PARAMETER Experiment Name: At_Siliques_P Parameter: Tissue Value: 5-10mm Siliques vs. Whole Plant
  misc_feature: MA Experiment ID: 20000267 Result: Up-regulated in Transcription
  misc_feature: MA Experiment 20000267 PARAMETER Experiment Name: At_Drought_P Parameter: Age (day) Value: 7
  misc_feature: MA Experiment 20000267 PARAMETER Experiment Name: At_Drought_P Parameter: Organism Value: A. thaliana
  misc_feature: MA Experiment 20000267 PARAMETER Experiment Name: At_Drought_P Parameter: Plant Line Value: WS
  misc_feature: MA Experiment 20000267 PARAMETER Experiment Name: At_Drought_P Parameter: Timepoint (hr) Value: 6
  misc_feature: MA Experiment 20000267 PARAMETER Experiment Name: At_Drought_P Parameter: Tissue Value: Whole Plant
  misc_feature: MA Experiment 20000267 PARAMETER Experiment Name: At_Drought_P Parameter: Treatment Value: Drought vs. No Drought
  misc_feature: MA Experiment ID: 20000436 Result: Up-regulated in Transcription
  misc_feature: MA Experiment 20000436 PARAMETER Experiment Name: At_Drought_P Parameter: Age (day) Value: 7
  misc_feature: MA Experiment 20000436 PARAMETER Experiment Name: At_Drought_P Parameter: Organism Value: A. thaliana
  misc_feature: MA Experiment 20000436 PARAMETER Experiment Name: At_Drought_P Parameter: Plant Line Value: WS
  misc_feature: MA Experiment 20000436 PARAMETER Experiment Name: At_Drought_P Parameter: Timepoint (hr) Value: 12
  misc_feature: MA Experiment 20000436 PARAMETER Experiment Name: At_Drought_P Parameter: Tissue Value: Whole Plant
  misc_feature: MA Experiment 20000436 PARAMETER Experiment Name: At_Drought_P Parameter: Treatment Value: Drought vs. No Drought
  misc_feature: MA Experiment ID: 20000437 Result: Up-regulated in Transcription
  misc_feature: MA Experiment 20000437 PARAMETER Experiment Name: At_Drought_P Parameter: Age (day) Value: 8
  misc_feature: MA Experiment 20000437 PARAMETER Experiment Name: At_Drought_P Parameter: Organism Value: A. thaliana
  misc_feature: MA Experiment 20000437 PARAMETER Experiment Name: At_Drought_P Parameter: Plant Line Value: WS
  misc_feature: MA Experiment 20000437 PARAMETER Experiment Name: At_Drought_P Parameter: Timepoint (hr) Value: 24
  misc_feature: MA Experiment 20000437 PARAMETER Experiment Name: At_Drought_P Parameter: Tissue Value: Whole Plant
  misc_feature: MA Experiment 20000437 PARAMETER Experiment Name: At_Drought_P Parameter: Treatment Value: Drought vs. No Drought
  misc_feature: MA Experiment ID: 20000438 Result: Down-regulated in Transcription
  misc_feature: MA Experiment 20000438 PARAMETER Experiment Name: At_Shoots__P Parameter: Age (day) Value: 14
  misc_feature: MA Experiment 20000438 PARAMETER Experiment Name: At_Shoots__P Parameter: Tissue Value: Shoots vs. Whole Plant
  misc_feature: MA Experiment ID: 20000453 Result: Up-regulated in Transcription
  misc_feature: MA Experiment 20000453 PARAMETER Experiment Name: At_100uM_ABA_P Parameter: Age (day) Value: 15
  misc_feature: MA Experiment 20000453 PARAMETER Experiment Name: At_100uM_ABA_P Parameter: Organism Value: A. thaliana
  misc_feature: MA Experiment 20000453 PARAMETER Experiment Name: At_100uM_ABA_P Parameter: Plant Line Value: WS
  misc_feature: MA Experiment 20000453 PARAMETER Experiment Name: At_100uM_ABA_P Parameter: Timepoint (hr) Value: 24
  misc_feature: MA Experiment 20000453 PARAMETER Experiment Name: At_100uM_ABA_P Parameter: Tissue Value: Aerial
  misc_feature: MA Experiment 20000453 PARAMETER Experiment Name: At_100uM_ABA_P Parameter: Treatment Value: 100uM ABA vs. No Treatment
  misc_feature: MA Experiment ID: 20000794 Result: Up-regulated in Transcription
  misc_feature: MA Experiment 20000794 PARAMETER Experiment Name: At_Petals_P Parameter: Age (day) Value: 23-25 days
  misc_feature: MA Experiment 20000794 PARAMETER Experiment Name: At_Petals_P Parameter: Plant Line Value: WS
  misc_feature: MA Experiment 20000794 PARAMETER Experiment Name: At_Petals_P Parameter: Tissue Value: Petals vs. Whole plant
  misc_feature: MA Experiment ID: 20001905 Result: Up-regulated in Transcription
  misc_feature: MA Experiment 20001905 PARAMETER Experiment Name: At_Drought_Reproduction_P Parameter: Age (day) Value: 40
  misc_feature: MA Experiment 20001905 PARAMETER Experiment Name: At_Drought_Reproduction_P Parameter: Organism Value: A. thaliana
  misc_feature: MA Experiment 20001905 PARAMETER Experiment Name: At_Drought_Reproduction_P Parameter: Plant Line Value: WS
  misc_feature: MA Experiment 20001905 PARAMETER Experiment Name: At_Drought_Reproduction_P Parameter: Timepoint (day) Value: 10
  misc_feature: MA Experiment 20001905 PARAMETER Experiment Name: At_Drought_Reproduction_P Parameter: Tissue Value: Rosettes
  misc_feature: MA Experiment 20001905 PARAMETER Experiment Name: At_Drought_Reproduction_P Parameter: Treatment Value: Drought vs. No Drought
  misc_feature: MA Experiment ID: 20001911 Result: Up-regulated in Transcription
  misc_feature: MA Experiment 20001911 PARAMETER Experiment Name: At_Drought_Reproduction_P Parameter: Age (day) Value: 40
  misc_feature: MA Experiment 20001911 PARAMETER Experiment Name: At_Drought_Reproduction_P Parameter: Organism Value: A. thaliana
  misc_feature: MA Experiment 20001911 PARAMETER Experiment Name: At_Drought_Reproduction_P Parameter: Plant Line Value: WS
  misc_feature: MA Experiment 20001911 PARAMETER Experiment Name: At_Drought_Reproduction_P Parameter: Timepoint (day) Value: 10
  misc_feature: MA Experiment 20001911 PARAMETER Experiment Name: At_Drought_Reproduction_P Parameter: Tissue Value: Flowers
  misc_feature: MA Experiment 20001911 PARAMETER Experiment Name: At_Drought_Reproduction_P Parameter: Treatment Value: Drought vs. No Drought
aagccatgtggtaattctaattttgtgtatttattattttctgttaagacgaatcggacagagagaactccggcggcggattgcacttccggcaagatctcgtggggataaataagatggcggatgagaggtataatcggaagaatccggcggtgaagaggattttgcaggaggttaaggagatgcaagctaatccgtctgatgattttatgtctcttcctcttgaggagaatatctttgagtggcaattcgccatccgaggtcctggtgatactgaattcgagggcgggatttatcatgggagaattcagttgcctgcagattatccattcaaacctccttcattcatgttattgacccctaacgggcgctttgaaactaacaccaagatttgcttgagcatttcaaactaccaccctgagcattggcaaccttcatggagtgttcggactgctttggtggctctcattgcatttatgcccacaagtcccaatggagcactgggctcagtagattatccaaaggatgagagacgtacactagccattaaatcacgtgagacaccacctaagtatggctctcctgaacggcaaaaaattattgatgagattcatcagtacatccttagcaaagcaaccgtggttccaaaacctcttcctctggaatgtagccaagcaccttccatcgtatcagaagctcactcccaagttgagccacaggaagcgataactgtagtagaagagcggtccatcgctacaacagacaccatagttgatgatcaaatcatagaagagacagctgaagcagtcaatacagcagctagtgtggttcccgctgcagcacctttaccagcggttgaagttgtggtcaaagcttctgtaagtggtgagcaaaggatggccagaagagcggctcagaagccagtcgatgacagactcttcacgtgggcggcggttgggctcacaatcgctatcatggttcttcttctgaagaagttcataaaatcaaatggttacagtactgggtttatggatgatcagtcttgaactctgatgaaagtcaatgctgcgtttaagaaatggggttgtgttgtttaatattttataaatataattaaagtgcataatggcgtaaataatttctgtgtgacattgtcttgcaacttagttgatagattggattatagcttgtga

SEQ ID NO: 85128 - protein, 309 aa, Arabidopsis thaliana; identical to SEQ ID NO: 49516
  peptide (1)..(309): Ceres Seq. ID no. 12678961
  misc_feature (1)..(309): Homolog of NCBI NO: 18401338 NR Description: E2, ubiquitin-conjugating enzyme, putative; id: At3g17000.1, supported by cDNA: gi_14423395 [Arabidopsis >gi|7670024|dbj|BAA94978.1| contains similarity to similar to
  misc_feature (4)..(298): Homolog of NCBI NO: 17532649 NR Description: Ubiquitin conjugating enzyme UBC-6 (35.3 kD) [Caenorhabditis elegans] >gi|15617759|gb|AAB93334.2| Ubiquitin
  misc_feature (3)..(270): Homolog of NCBI NO: 38181767 NR Description: Unknown (protein for MGC:63554) [Danio rerio]
  misc_feature (3)..(268): Homolog of NCBI NO: 7362937 NR Description: Non-Canonical UBiquitin Conjugating Enzyme 1
  misc_feature (3)..(268): Homolog of NCBI NO: 7363050 NR Description: Non-Canonical UBiquitin Conjugating Enzyme 1
  misc_feature (3)..(268): Homolog of NCBI NO: 31980960 NR Description: ubiquitin-conjugating enzyme E2, J1; ubiquitin conjugating enzyme 1 [Mus musculus]
  misc_feature (13)..(298): Homolog of NCBI NO: 7498090 NR Description: hypothetical protein D1022.1 - Caenorhabditis
  misc_feature (3)..(148): Homolog of NCBI NO: 6841528 NR Description: HSPC153 [Homo sapiens]
  misc_feature (3)..(148): Homolog of NCBI NO: 9453733 NR Description: bA11D8.1 (yeast ubiquitin conjugating enzyme UBC6
  misc_feature (3)..(148): Homolog of NCBI NO: 15277421 NR Description: non-canonical ubquitin conjugating enzyme 1 [Homo

SEQ ID NO: 85129 - protein, 287 aa, Arabidopsis thaliana; identical to SEQ ID NO: 49517
  peptide (1)..(287): Ceres Seq. ID no. 12678962
  misc_feature (1)..(287): Homolog of NCBI NO: 18401338 NR Description: E2, ubiquitin-conjugating enzyme, putative; id: At3g17000.1, supported by cDNA: gi_14423395 [Arabidopsis >gi|7670024|dbj|BAA94978.1| contains similarity to similar to
  misc_feature (1)..(276): Homolog of NCBI NO: 17532649 NR Description: Ubiquitin conjugating enzyme UBC-6 (35.3 kD) [Caenorhabditis elegans] >gi|15617759|gb|AAB93334.2| Ubiquitin
  misc_feature (1)..(248): Homolog of NCBI NO: 38181767 NR Description: Unknown (protein for MGC:63554) [Danio rerio]
  misc_feature (1)..(246): Homolog of NCBI NO: 7362937 NR Description: Non-Canonical UBiquitin Conjugating Enzyme 1
  misc_feature (1)..(246): Homolog of NCBI NO: 7363050 NR Description: Non-Canonical UBiquitin Conjugating Enzyme 1
  misc_feature (1)..(246): Homolog of NCBI NO: 31980960 NR Description: ubiquitin-conjugating enzyme E2, J1; ubiquitin conjugating enzyme 1 [Mus musculus]
  misc_feature (1)..(276): Homolog of NCBI NO: 7498090 NR Description: hypothetical protein D1022.1 - Caenorhabditis
  misc_feature (1)..(126): Homolog of NCBI NO: 6841528 NR Description: HSPC153 [Homo sapiens]
  misc_feature (1)..(126): Homolog of NCBI NO: 9453733 NR Description: bA11D8.1 (yeast ubiquitin conjugating enzyme UBC6
  misc_feature (1)..(126): Homolog of NCBI NO: 15277421 NR Description: non-canonical ubquitin conjugating enzyme 1 [Homo

SEQ ID NO: 85130 - protein, 278 aa, Arabidopsis thaliana; identical to SEQ ID NO: 49518
  peptide (1)..(278): Ceres Seq. ID no. 12678963
  misc_feature (1)..(278): Homolog of NCBI NO: 18401338 NR Description: E2, ubiquitin-conjugating enzyme, putative; id: At3g17000.1, supported by cDNA: gi_14423395 [Arabidopsis >gi|7670024|dbj|BAA94978.1| contains similarity to similar to
  misc_feature (1)..(267): Homolog of NCBI NO: 17532649 NR Description: Ubiquitin conjugating enzyme UBC-6 (35.3 kD) [Caenorhabditis elegans] >gi|15617759|gb|AAB93334.2| Ubiquitin
  misc_feature (1)..(239): Homolog of NCBI NO: 38181767 NR Description: Unknown (protein for MGC:63554) [Danio rerio]
  misc_feature (1)..(237): Homolog of NCBI NO: 7362937 NR Description: Non-Canonical UBiquitin Conjugating Enzyme 1
  misc_feature (1)..(237): Homolog of NCBI NO: 7363050 NR Description: Non-Canonical UBiquitin Conjugating Enzyme 1
  misc_feature (1)..(237): Homolog of NCBI NO: 31980960 NR Description: ubiquitin-conjugating enzyme E2, J1; ubiquitin conjugating enzyme 1 [Mus musculus]
  misc_feature (1)..(267): Homolog of NCBI NO: 7498090 NR Description: hypothetical protein D1022.1 - Caenorhabditis
  misc_feature (1)..(117): Homolog of NCBI NO: 6841528 NR Description: HSPC153 [Homo sapiens]
  misc_feature (1)..(117): Homolog of NCBI NO: 9453733 NR Description: bA11D8.1 (yeast ubiquitin conjugating enzyme UBC6
  misc_feature (1)..(117): Homolog of NCBI NO: 15277421 NR Description: non-canonical ubquitin conjugating enzyme 1 [Homo

SEQ ID NO: 85131 - DNA, 1289 bp, Arabidopsis thaliana
  misc_feature (1)..(1289): Ceres Seq. ID no. 12678968
  misc_feature: MA Experiment ID: 108576 Result: Up-regulated in Transcription
  misc_feature: MA Experiment 108576 PARAMETER Experiment Name: At_42deg_Heat_cDNA_P Parameter: Temperature (deg C) Value: 42 vs. 22
  misc_feature: MA Experiment 108576 PARAMETER Experiment Name: At_42deg_Heat_cDNA_P Parameter: Timepoint (hr) Value: 1
  misc_feature: MA Experiment 108576 PARAMETER Experiment Name: At_42deg_Heat_cDNA_P Parameter: Tissue Value: Aerial
  misc_feature: MA Experiment ID: 20000234 Result: Up-regulated in Transcription
  misc_feature: MA Experiment 20000234 PARAMETER Experiment Name: At_Siliques_P Parameter: Age (day) Value: 21
  misc_feature: MA Experiment 20000234 PARAMETER Experiment Name: At_Siliques_P Parameter: Organism Value: A. thaliana
  misc_feature: MA Experiment 20000234 PARAMETER Experiment Name: At_Siliques_P Parameter: Plant Line Value: WS
  misc_feature: MA Experiment 20000234 PARAMETER Experiment Name: At_Siliques_P Parameter: Tissue Value: Less Than 5mm Siliques vs. Whole Plant
  misc_feature: MA Experiment ID: 20000264 Result: Up-regulated in Transcription
  misc_feature: MA Experiment 20000264 PARAMETER Experiment Name: At_Open_Flower_P Parameter: Age (day) Value: 21
  misc_feature: MA Experiment 20000264 PARAMETER Experiment Name: At_Open_Flower_P Parameter: Plant Line Value: WS
  misc_feature: MA Experiment 20000264 PARAMETER Experiment Name: At_Open_Flower_P Parameter: Tissue Value: Open Flower vs. Whole Plant
  misc_feature: MA Experiment ID: 20000265 Result: Up-regulated in Transcription
  misc_feature: MA Experiment 20000265 PARAMETER Experiment Name: At_Open_Flower_P Parameter: Age (day) Value: 21
  misc_feature: MA Experiment 20000265 PARAMETER Experiment Name: At_Open_Flower_P Parameter: Plant Line Value: WS
  misc_feature: MA Experiment 20000265 PARAMETER Experiment Name: At_Open_Flower_P Parameter: Tissue Value: Closed Flower vs. Whole Plant
  misc_feature: MA Experiment ID: 20000286 Result: Up-regulated in Transcription
  misc_feature: MA Experiment 20000286 PARAMETER Experiment Name: At_Open_Flower_P Parameter: Age (day) Value: 21
  misc_feature: MA Experiment 20000286 PARAMETER Experiment Name: At_Open_Flower_P Parameter: Plant Line Value: WS
  misc_feature: MA Experiment 20000286 PARAMETER Experiment Name: At_Open_Flower_P Parameter: Tissue Value: Half Open vs. Whole Plant
  misc_feature: MA Experiment ID: 20000794 Result: Up-regulated in Transcription
  misc_feature: MA Experiment 20000794 PARAMETER Experiment Name: At_Petals_P Parameter: Age (day) Value: 23-25 days
  misc_feature: MA Experiment 20000794 PARAMETER Experiment Name: At_Petals_P Parameter: Plant Line Value: WS
  misc_feature: MA Experiment 20000794 PARAMETER Experiment Name: At_Petals_P Parameter: Tissue Value: Petals vs. Whole plant
  misc_feature: MA Experiment ID: 20001757 Result: Down-regulated in Transcription
  misc_feature: MA Experiment 20001757 PARAMETER Experiment Name: At_50mM_NH4NO3_L-to-H_P Parameter: Timepoint (hr) Value: 6
  misc_feature: MA Experiment 20001757 PARAMETER Experiment Name: At_50mM_NH4NO3_L-to-H_P Parameter: Tissue Value: Leaf
  misc_feature: MA Experiment 20001757 PARAMETER Experiment Name: At_50mM_NH4NO3_L-to-H_P Parameter: Treatment Value: 50mM NH4NO3 vs 100mM Mannitol
  misc_feature: MA Experiment ID: 20001910 Result: Up-regulated in Transcription
  misc_feature: MA Experiment 20001910 PARAMETER Experiment Name: At_Drought_Reproduction_P Parameter: Age (day) Value: 37
  misc_feature: MA Experiment 20001910 PARAMETER Experiment Name: At_Drought_Reproduction_P Parameter: Organism Value: A. thaliana
  misc_feature: MA Experiment 20001910 PARAMETER Experiment Name: At_Drought_Reproduction_P Parameter: Plant Line Value: WS
  misc_feature: MA Experiment 20001910 PARAMETER Experiment Name: At_Drought_Reproduction_P Parameter: Timepoint (day) Value: 7
  misc_feature: MA Experiment 20001910 PARAMETER Experiment Name: At_Drought_Reproduction_P Parameter: Tissue Value: Flowers
  misc_feature: MA Experiment 20001910 PARAMETER Experiment Name: At_Drought_Reproduction_P Parameter: Treatment Value: Drought vs. No Drought
aaaagaaaagtagaaaccccaagaaaaaataaaaaaaataatgggtcatcgacaatgcaaaagacgaaattcgacgccccacttttgactgaaaaaatcgcgacaaatagatcgataattgtagatatcgaaggcaaaggagactacacttcggttcagaaagccatcgatgctgtccctgttggtaactctaattggattattgtccatgtccgtaaaggaatctacaaggagagagtgcacattccggagaacaagccgttcatattcatgaggggtaatggaaaaggaaaaacggtgatcgaatcttcgcaaagttcggtcgacaatgttgcttcagctactttcaaagtcgaggctaatcactttgtcgcttttggtatcagcatccgaaatgatgcacctgtcggaatggcattcacatctgagaaccaatcggtggcagcgtttgtggctgctgacaaagtagcgttttaccattgtgcgttctacagcttacacaacactttgtttgataacaaaggtagacattactaccatgagtgttacatccaaggctccatagacttcatcttcggtcgcgcaacttccattttcaacaattgtgagatatttgtgatatcagacaagagggtgaaaccgtatgggtcaatcacagcacaccatagggaaagcgcagaggaaaaaacgggttacgtgttcataagaggcaaagtgtacggaattgatgaggtttacttgggccgagccaaaggaccttattctcgagtcatctttgccaagacttacttgtccaagaccgttgtgcctgatggttggacaaactggagttaccatggctcgacccagaatctataccatggggagtataaatgtcatggaccaggagctgagaggcaaaagagatctgactgggccaaagatcttaccaaacaagaagttgagtctttcttgtccattgattttattgatggcacttcttggctccctgtttggcttcaggaaaagttttagagttccttatgctgtcgcgtttggcttttgacatttcgcgttttggtgtggcttggaaaaaaaacatatgaagaaagaagagtacttcatcctttcttcgacggtatactatacgaaatagttttctctcttttttttttgtgtacttctactctaaaatgttcttagagtgattggaaactcttatgttgtttgcaaacattatataagattgtttccatcttaataatatatgtaacctaaatttaaatcctataaatttaaaatattttccc

SEQ ID NO: 85132 - protein, 337 aa, Arabidopsis thaliana
  peptide (1)..(337): Ceres Seq. ID no. 12678969
  misc_feature (38)..(326): Pfam Name: Pectinesterase Pfam Description: Pectinesterase
  misc_feature (16)..(337): Homolog of NCBI NO: 15228955 NR Description: pectinesterase family; protein id: At3g17060.1,
  misc_feature (25)..(332): Homolog of NCBI NO: 39653369 NR Description: putative pectinesterase [Oryza sativa (indica
  misc_feature (46)..(329): Homolog of NCBI NO: 15241163 NR Description: pectinesterase family; protein id: At5g19730.1, by cDNA: gi_17529289, supported by cDNA: gi_20465498 [Arabidopsis >gi|17529290|gb|AAL38872.1| putative pectin methylesterase
  misc_feature (38)..(329): Homolog of NCBI NO: 34909402 NR Description: putative pectin methylesterase [Oryza sativa
  misc_feature (29)..(329): Homolog of NCBI NO: 15228023 NR Description: pectinesterase family; protein id: At2g36710.1
  misc_feature (29)..(329): Homolog of NCBI NO: 27754550 NR Description: putative pectinesterase family protein
  misc_feature (39)..(329): Homolog of NCBI NO: 15226598 NR Description: pectinesterase family; protein id: At2g21610.1
  misc_feature (34)..(329): Homolog of NCBI NO: 15240544 NR Description: pectinesterase family; protein id: At5g55590.1 thaliana] >gi|9758593|dbj|BAB09226.1| contains similarity to
  misc_feature (24)..(329): Homolog of NCBI NO: 15239623 NR Description: pectinesterase family; protein id: At5g18990.1
  misc_feature (36)..(329): Homolog of NCBI NO: 15238111 NR Description: pectinesterase family; protein id: At5g47500.1, by cDNA: gi_20856814 [Arabidopsis thaliana] AT5g47500/MNJ7_9 [Arabidopsis thaliana]
KRKVETPRKNKKNNGSSTMQKTKFDAPLLTEKIATNRSIIVDIEGKGDYTSVQKAIDAVPVGNSNWIIVHVRKGIYKERVHIPENKPFIFMRGNGKGKTVIESSQSSVDNVASATFKVEANHFVAFGISIRNDAPVGMAFTSENQSVAAFVAADKVAFYHCAFYSLHNTLFDNKGRHYYHECYIQGSIDFIFGRATSIFNNCEIFVISDKRVKPYGSITAHHRESAEEKTGYVFIRGKVYGIDEVYLGRAKGPYSRVIFAKTYLSKTVVPDGWTNWSYHGSTQNLYHGEYKCHGPGAERQKRSDWAKDLTKQEVESFLSIDFIDGTSWLPVWLQEKF

SEQ ID NO: 85133 - protein, 319 aa, Arabidopsis thaliana
  peptide (1)..(319): Ceres Seq. ID no. 12678970
  misc_feature (20)..(308): Pfam Name: Pectinesterase Pfam Description: Pectinesterase
  misc_feature (1)..(319): Homolog of NCBI NO: 15228955 NR Description: pectinesterase family; protein id: At3g17060.1,
  misc_feature (7)..(314): Homolog of NCBI NO: 39653369 NR Description: putative pectinesterase [Oryza sativa (indica
  misc_feature (28)..(311): Homolog of NCBI NO: 15241163 NR Description: pectinesterase family; protein id: At5g19730.1, by cDNA: gi_17529289, supported by cDNA: gi_20465498 [Arabidopsis >gi|17529290|gb|AAL38872.1| putative pectin methylesterase
  misc_feature (20)..(311): Homolog of NCBI NO: 34909402 NR Description: putative pectin methylesterase [Oryza sativa
  misc_feature (11)..(311): Homolog of NCBI NO: 15228023 NR Description: pectinesterase family; protein id: At2g36710.1
  misc_feature (11)..(311): Homolog of NCBI NO: 27754550 NR Description: putative pectinesterase family protein
  misc_feature (21)..(311): Homolog of NCBI NO: 15226598 NR Description: pectinesterase family; protein id: At2g21610.1
  misc_feature (16)..(311): Homolog of NCBI NO: 15240544 NR Description: pectinesterase family; protein id: At5g55590.1 thaliana] >gi|9758593|dbj|BAB09226.1| contains similarity to
  misc_feature (6)..(311): Homolog of NCBI NO: 15239623 NR Description: pectinesterase family; protein id: At5g18990.1
  misc_feature (18)..(311): Homolog of NCBI NO: 15238111 NR Description: pectinesterase family; protein id: At5g47500.1, by cDNA: gi_20856814 [Arabidopsis thaliana] AT5g47500/MNJ7_9 [Arabidopsis thaliana]
MQKTKFDAPLLTEKIATNRSIIVDIEGKGDYTSVQKAIDAVPVGNSNWIIVHVRKGIYKERVHIPENKPFIFMRGNGKGKTVIESSQSSVDNVASATFKVEANHFVAFGISIRNDAPVGMAFTSENQSVAAFVAADKVAFYHCAFYSLHNTLFDNKGRHYYHECYIQGSIDFIFGRATSIFNNCEIFVISDKRVKPYGSITAHHRESAEEKTGYVFIRGKVYGIDEVYLGRAKGPYSRVIFAKTYLSKTVVPDGWTNWSYHGSTQNLYHGEYKCHGPGAERQKRSDWAKDLTKQEVESFLSIDFIDGTSWLPVWLQEKF

SEQ ID NO: 85134 - protein, 247 aa, Arabidopsis thaliana; identical to SEQ ID NO: 23532
  peptide (1)..(247): Ceres Seq. ID no. 12678971
  misc_feature (1)..(236): Pfam Name: Pectinesterase Pfam Description: Pectinesterase
  misc_feature (1)..(247): Homolog of NCBI NO: 15228955 NR Description: pectinesterase family; protein id: At3g17060.1,
  misc_feature (1)..(242): Homolog of NCBI NO: 39653369 NR Description: putative pectinesterase [Oryza sativa (indica
  misc_feature (1)..(239): Homolog of NCBI NO: 15241163 NR Description: pectinesterase family; protein id: At5g19730.1, by cDNA: gi_17529289, supported by cDNA: gi_20465498 [Arabidopsis >gi|17529290|gb|AAL38872.1| putative pectin methylesterase
  misc_feature (1)..(239): Homolog of NCBI NO: 34909402 NR Description: putative pectin methylesterase [Oryza sativa
  misc_feature (1)..(239): Homolog of NCBI NO: 15228023 NR Description: pectinesterase family; protein id: At2g36710.1
  misc_feature (1)..(239): Homolog of NCBI NO: 27754550 NR Description: putative pectinesterase family protein
  misc_feature (1)..(239): Homolog of NCBI NO: 15226598 NR Description: pectinesterase family; protein id: At2g21610.1
  misc_feature (1)..(239): Homolog of NCBI NO: 15240544 NR Description: pectinesterase family; protein id: At5g55590.1 thaliana] >gi|9758593|dbj|BAB09226.1| contains similarity to
  misc_feature (1)..(239): Homolog of NCBI NO: 15239623 NR Description: pectinesterase family; protein id: At5g18990.1
  misc_feature (1)..(239): Homolog of NCBI NO: 15238111 NR Description: pectinesterase family; protein id: At5g47500.1, by cDNA: gi_20856814 [Arabidopsis thaliana] AT5g47500/MNJ7_9 [Arabidopsis thaliana]

SEQ ID NO: 85135 - DNA, 639 bp, Arabidopsis thaliana
  misc_feature (1)..(639): Ceres Seq. ID no. 12678973
  misc_feature: MA Experiment ID: 20000794 Result: Down-regulated in Transcription
  misc_feature: MA Experiment 20000794 PARAMETER Experiment Name: At_Petals_P Parameter: Age (day) Value: 23-25 days
  misc_feature: MA Experiment 20000794 PARAMETER Experiment Name: At_Petals_P Parameter: Plant Line Value: WS
  misc_feature: MA Experiment 20000794 PARAMETER Experiment Name: At_Petals_P Parameter: Tissue Value: Petals vs. Whole plant
  misc_feature: MA Experiment ID: 20001557 Result: Up-regulated in Transcription
  misc_feature: MA Experiment 20001557 PARAMETER Experiment Name: At_Drought_Soil_Dry_P Parameter: Age (day) Value: 27
  misc_feature: MA Experiment 20001557 PARAMETER Experiment Name: At_Drought_Soil_Dry_P Parameter: Organism Value: A. thaliana
  misc_feature: MA Experiment 20001557 PARAMETER Experiment Name: At_Drought_Soil_Dry_P Parameter: Plant Line Value: WS
  misc_feature: MA Experiment 20001557 PARAMETER Experiment Name: At_Drought_Soil_Dry_P Parameter: Post Timepoint (hr) Value: 3
  misc_feature: MA Experiment 20001557 PARAMETER Experiment Name: At_Drought_Soil_Dry_P Parameter: Post-Treatment Value: Re-Water vs. No Drought
  misc_feature: MA Experiment 20001557 PARAMETER Experiment Name: At_Drought_Soil_Dry_P Parameter: Timepoint (day) Value: 13
  misc_feature: MA Experiment 20001557 PARAMETER Experiment Name: At_Drought_Soil_Dry_P Parameter: Treatment Value: Drought vs. No Drought
  misc_feature: MA Experiment ID: 20001558 Result: Up-regulated in Transcription
  misc_feature: MA Experiment 20001558 PARAMETER Experiment Name: At_Drought_Soil_Dry_P Parameter: Age (day) Value: 27
  misc_feature: MA Experiment 20001558 PARAMETER Experiment Name: At_Drought_Soil_Dry_P Parameter: Organism Value: A. thaliana
  misc_feature: MA Experiment 20001558 PARAMETER Experiment Name: At_Drought_Soil_Dry_P Parameter: Plant Line Value: WS
  misc_feature: MA Experiment 20001558 PARAMETER Experiment Name: At_Drought_Soil_Dry_P Parameter: Post Timepoint (hr) Value: 6
  misc_feature: MA Experiment 20001558 PARAMETER Experiment Name: At_Drought_Soil_Dry_P Parameter: Post-Treatment Value: Re-Water vs. No Drought
  misc_feature: MA Experiment 20001558 PARAMETER Experiment Name: At_Drought_Soil_Dry_P Parameter: Timepoint (day) Value: 13
  misc_feature: MA Experiment 20001558 PARAMETER Experiment Name: At_Drought_Soil_Dry_P Parameter: Treatment Value: Drought vs. No Drought
  misc_feature: MA Experiment ID: 20001757 Result: Up-regulated in Transcription
  misc_feature: MA Experiment 20001757 PARAMETER Experiment Name: At_50mM_NH4NO3_L-to-H_P Parameter: Timepoint (hr) Value: 6
  misc_feature: MA Experiment 20001757 PARAMETER Experiment Name: At_50mM_NH4NO3_L-to-H_P Parameter: Tissue Value: Leaf
  misc_feature: MA Experiment 20001757 PARAMETER Experiment Name: At_50mM_NH4NO3_L-to-H_P Parameter: Treatment Value: 50mM NH4NO3 vs 100mM Mannitol
tttgcagggatgcatgaaaagacatggtttcagtggaatgccggcatcacatggtgcttcattgtcccatcgaagcgggggttccacagggcaaagagatgctcctggaaaggtgttcaagggcagaaagatggctgggagaatgggtgcagatcagaggacagtaaagaacgtttgggtctacaagatcgatcctgcgaggaacctcatgtgggtgagaggacaagttcctggtgcagaaggaaactttgtgttcataaaagatgcatggtgcaagaaaccagacatctcaaagcttccgtttccaacttacttagctccagaagatgaagatccatcagaattagaaccgttggttgcagatcttggagaagttgacccatttatgttggcagagtgatgaaaacagcatgatcttgatctttatttgggcttttacaatgattagagaccagaaagaagctgtggaagtgaaggaatcacagagctaaagctttttgcagatgaatttgtctttttcttattttagttgtttggatgtatgatttgaaaacgattaaatagaggaatttaggcttgctcgcatttgttatatcacaatgcttaagagtttgcaataagcaatgaggaaaacacaag

SEQ ID NO: 85136 - protein, 132 aa, Arabidopsis thaliana
  peptide (1)..(132): Ceres Seq. ID no. 12678974
  misc_feature (2)..(87): Pfam Name: Ribosomal protein L3 Pfam Description: Ribosomal protein L3
  misc_feature (2)..(132): Homolog of NCBI NO: 18401521 NR Description: ribosomal protein L3; protein id: At3g17465.1
  misc_feature (2)..(132): Homolog of NCBI NO: 21450877 NR Description: putative ribosomal protein L3 [Arabidopsis
  misc_feature (3)..(132): Homolog of NCBI NO: 34902796 NR Description: unnamed protein product [Oryza sativa (japonica group)] >gi|7106521|dbj|BAA92206.1| unnamed protein product
  misc_feature (3)..(94): Homolog of NCBI NO: 22956505 NR Description: hypothetical protein [Rhodobacter sphaeroides]
  misc_feature (3)..(97): Homolog of NCBI NO: 34581369 NR Description: 50S ribosomal protein L3 [Rickettsia sibirica]
  misc_feature (3)..(102): Homolog of NCBI NO: 23014088 NR Description: hypothetical protein [Magnetospirillum
  misc_feature (3)..(97): Homolog of NCBI NO: 15604505 NR Description: 50S RIBOSOMAL PROTEIN L3 (rplC) [Rickettsia >gi|6226691|sp|P48952|RL3_RICPR 50S ribosomal protein L3
  misc_feature (3)..(97): Homolog of NCBI NO: 15892929 NR Description: 50S ribosomal protein L3 [Rickettsia conorii]
  misc_feature (2)..(105): Homolog of NCBI NO: 23108389 NR Description: hypothetical protein [Novosphingobium
  misc_feature (3)..(89): Homolog of NCBI NO: 17987040 NR Description: LSU ribosomal protein L3P [Brucella melitensis]
LQGCMKRHGFSGMPASHGASLSHRSGGSTGQRDAPGKVFKGRKMAGRMGADQRTVKNVWVYKIDPARNLMWVRGQVPGAEGNFVFIKDAWCKKPDISKLPFPTYLAPEDEDPSELEPLVADLGEVDPFMLAE

SEQ ID NO: 85137 - protein, 128 aa, Arabidopsis thaliana
  peptide (1)..(128): Ceres Seq. ID no. 12678975
  misc_feature (1)..(83): Pfam Name: Ribosomal protein L3 Pfam Description: Ribosomal protein L3
  misc_feature (1)..(128): Homolog of NCBI NO: 18401521 NR Description: ribosomal protein L3; protein id: At3g17465.1
  misc_feature (1)..(128): Homolog of NCBI NO: 21450877 NR Description: putative ribosomal protein L3 [Arabidopsis
  misc_feature (1)..(128): Homolog of NCBI NO: 34902796 NR Description: unnamed protein product [Oryza sativa (japonica group)] >gi|7106521|dbj|BAA92206.1| unnamed protein product
  misc_feature (1)..(90): Homolog of NCBI NO: 22956505 NR Description: hypothetical protein [Rhodobacter sphaeroides]
  misc_feature (1)..(93): Homolog of NCBI NO: 34581369 NR Description: 50S ribosomal protein L3 [Rickettsia sibirica]
  misc_feature (1)..(98): Homolog of NCBI NO: 23014088 NR Description: hypothetical protein [Magnetospirillum
  misc_feature (1)..(93): Homolog of NCBI NO: 15604505 NR Description: 50S RIBOSOMAL PROTEIN L3 (rplC) [Rickettsia >gi|6226691|sp|P48952|RL3_RICPR 50S ribosomal protein L3
  misc_feature (1)..(93): Homolog of NCBI NO: 15892929 NR Description: 50S ribosomal protein L3 [Rickettsia conorii]
  misc_feature (1)..(101): Homolog of NCBI NO: 23108389 NR Description: hypothetical protein [Novosphingobium
  misc_feature (1)..(85): Homolog of NCBI NO: 17987040 NR Description: LSU ribosomal protein L3P [Brucella melitensis]
MKRHGFSGMPASHGASLSHRSGGSTGQRDAPGKVFKGRKMAGRMGADQRTVKNVWVYKIDPARNLMWVRGQVPGAEGNFVFIKDAWCKKPDISKLPFPTYLAPEDEDPSELEPLVADLGEVDPFMLAE

SEQ ID NO: 85138 - protein, 120 aa, Arabidopsis thaliana
  peptide (1)..(120): Ceres Seq. ID no. 12678976
  misc_feature (1)..(75): Pfam Name: Ribosomal protein L3 Pfam Description: Ribosomal protein L3
  misc_feature (1)..(120): Homolog of NCBI NO: 18401521 NR Description: ribosomal protein L3; protein id: At3g17465.1
  misc_feature (1)..(120): Homolog of NCBI NO: 21450877 NR Description: putative ribosomal protein L3 [Arabidopsis
  misc_feature (1)..(120): Homolog of NCBI NO: 34902796 NR Description: unnamed protein product [Oryza sativa (japonica group)] >gi|7106521|dbj|BAA92206.1| unnamed protein product
  misc_feature (1)..(82): Homolog of NCBI NO: 22956505 NR Description: hypothetical protein [Rhodobacter sphaeroides]
  misc_feature (1)..(85): Homolog of NCBI NO: 34581369 NR Description: 50S ribosomal protein L3 [Rickettsia sibirica]
  misc_feature (1)..(90): Homolog of NCBI NO: 23014088 NR Description: hypothetical protein [Magnetospirillum
  misc_feature (1)..(85): Homolog of NCBI NO: 15604505 NR Description: 50S RIBOSOMAL PROTEIN L3 (rplC) [Rickettsia >gi|6226691|sp|P48952|RL3_RICPR 50S ribosomal protein L3
  misc_feature (1)..(85): Homolog of NCBI NO: 15892929 NR Description: 50S ribosomal protein L3 [Rickettsia conorii]
  misc_feature (1)..(93): Homolog of NCBI NO: 23108389 NR Description: hypothetical protein [Novosphingobium
  misc_feature (1)..(77): Homolog of NCBI NO: 17987040 NR Description: LSU ribosomal protein L3P [Brucella melitensis]
MPASHGASLSHRSGGSTGQRDAPGKVFKGRKMAGRMGADQRTVKNVWVYKIDPARNLMWVRGQVPGAEGNFVFIKDAWCKKPDISKLPFPTYLAPEDEDPSELEPLVADLGEVDPFMLAE

SEQ ID NO: 85139 - DNA, 1911 bp, Arabidopsis thaliana
  misc_feature (1)..(1911): Ceres Seq. ID no. 12678996
  misc_feature: MA Experiment ID: 20000179 Result: Up-regulated in Transcription
  misc_feature: MA Experiment 20000179 PARAMETER Experiment Name: At_Germinating_Seeds_P Parameter: Age (hr) Value: 6 vs. 0
  misc_feature: MA Experiment 20000179 PARAMETER Experiment Name: At_Germinating_Seeds_P Parameter: Tissue Value: Germinating Seeds
  misc_feature: MA Experiment ID: 20000180 Result: Up-regulated in Transcription
  misc_feature: MA Experiment 20000180 PARAMETER Experiment Name: At_Germinating_Seeds_P Parameter: Age (hr) Value: 24 vs. 0
  misc_feature: MA Experiment 20000180 PARAMETER Experiment Name: At_Germinating_Seeds_P Parameter: Tissue Value: Germinating Seeds
  misc_feature: MA Experiment ID: 20000182 Result: Down-regulated in Transcription
  misc_feature: MA Experiment 20000182 PARAMETER Experiment Name: At_2mM_SA_P Parameter: Age (day) Value: 14
  misc_feature: MA Experiment 20000182 PARAMETER Experiment Name: At_2mM_SA_P Parameter: Organism Value: A. thaliana
  misc_feature: MA Experiment 20000182 PARAMETER Experiment Name: At_2mM_SA_P Parameter: Plant Line Value: WS
  misc_feature: MA Experiment 20000182 PARAMETER Experiment Name: At_2mM_SA_P Parameter: Timepoint (hr) Value: 6
  misc_feature: MA Experiment 20000182 PARAMETER Experiment Name: At_2mM_SA_P Parameter: Tissue Value: Aerial
  misc_feature: MA Experiment 20000182 PARAMETER Experiment Name: At_2mM_SA_P Parameter: Treatment Value: 2mM SA vs. No Treatment
  misc_feature: MA Experiment ID: 20000227 Result: Up-regulated in Transcription
  misc_feature: MA Experiment 20000227 PARAMETER Experiment Name: At_Root-Tips-vs-Tops_P Parameter: Tissue Value: Root Tips vs. Root Tops
  misc_feature: MA Experiment ID: 20000234 Result: Up-regulated in Transcription
  misc_feature: MA Experiment 20000234 PARAMETER Experiment Name: At_Siliques_P Parameter: Age (day) Value: 21
  misc_feature: MA Experiment 20000234 PARAMETER Experiment Name: At_Siliques_P Parameter: Organism Value: A. thaliana
  misc_feature: MA Experiment 20000234 PARAMETER Experiment Name: At_Siliques_P Parameter: Plant Line Value: WS
  misc_feature: MA Experiment 20000234 PARAMETER Experiment Name: At_Siliques_P Parameter: Tissue Value: Less Than 5mm Siliques vs. Whole Plant
  misc_feature: MA Experiment ID: 20000308 Result: Up-regulated in Transcription
  misc_feature: MA Experiment 20000308 PARAMETER Experiment Name: At_100mM_NaCl__P Parameter: Age (day) Value: 17
  misc_feature: MA Experiment 20000308 PARAMETER Experiment Name: At_100mM_NaCl__P Parameter: Organism Value: A. thaliana
  misc_feature: MA Experiment 20000308 PARAMETER Experiment Name: At_100mM_NaCl__P Parameter: Plant Line Value: WS
  misc_feature: MA Experiment 20000308 PARAMETER Experiment Name: At_100mM_NaCl__P Parameter: Timepoint (hr) Value: 72
  misc_feature: MA Experiment 20000308 PARAMETER Experiment Name: At_100mM_NaCl__P Parameter: Tissue Value: Whole Plant
  misc_feature: MA Experiment 20000308 PARAMETER Experiment Name: At_100mM_NaCl__P Parameter: Treatment Value: 100mM NaCl vs. No Treatment
  misc_feature: MA Experiment ID: 20000441 Result: Down-regulated in Transcription
  misc_feature: MA Experiment 20000441 PARAMETER Experiment Name: At_1uM_BR-BRZ__P Parameter: Tissue Value: Shoot Apices
  misc_feature: MA Experiment 20000441 PARAMETER Experiment Name: At_1uM_BR-BRZ__P Parameter: Treatment Value: 1uM BR vs. No Treatment
  misc_feature: MA Experiment ID: 20000495 Result: Up-regulated in Transcription
  misc_feature: MA Experiment 20000495 PARAMETER Experiment Name: At_Guard_Cells_P Parameter: Harvest Date Value: 8/2/2002
  misc_feature: MA Experiment 20000495 PARAMETER Experiment Name: At_Guard_Cells_P Parameter: Organism Value: A. thaliana
  misc_feature: MA Experiment 20000495 PARAMETER Experiment Name: At_Guard_Cells_P Parameter: Tissue Value: Guard Cells vs. Leaves
  misc_feature: MA Experiment ID: 20000794 Result: Down-regulated in Transcription
  misc_feature: MA Experiment 20000794 PARAMETER Experiment Name: At_Petals_P Parameter: Age (day) Value: 23-25 days
  misc_feature: MA Experiment 20000794 PARAMETER Experiment Name: At_Petals_P Parameter: Plant Line Value: WS
  misc_feature: MA Experiment 20000794 PARAMETER Experiment Name: At_Petals_P Parameter: Tissue Value: Petals vs. Whole plant
  misc_feature: MA Experiment ID: 20001247 Result: Down-regulated in Transcription
  misc_feature: MA Experiment 20001247 PARAMETER Experiment Name: At_Far-red-induction_P Parameter: Age (day) Value: 7
  misc_feature: MA Experiment 20001247 PARAMETER Experiment Name: At_Far-red-induction_P Parameter: Light Value: Far-red vs. White
  misc_feature: MA Experiment 20001247 PARAMETER Experiment Name: At_Far-red-induction_P Parameter: Organism Value: A. thaliana
  misc_feature: MA Experiment 20001247 PARAMETER Experiment Name: At_Far-red-induction_P Parameter: Plant Line Value: Columbia
  misc_feature: MA Experiment 20001247 PARAMETER Experiment Name: At_Far-red-induction_P Parameter: Timepoint (hr) Value: 1
  misc_feature: MA Experiment 20001247 PARAMETER Experiment Name: At_Far-red-induction_P Parameter: Tissue Value: Whole Plant
  misc_feature: MA Experiment ID: 20001248 Result: Down-regulated in Transcription
  misc_feature: MA Experiment 20001248 PARAMETER Experiment Name: At_Far-red-induction_P Parameter: Age (day) Value: 7
  misc_feature: MA Experiment 20001248 PARAMETER Experiment Name: At_Far-red-induction_P Parameter: Light Value: Far-red vs. White
  misc_feature: MA Experiment 20001248 PARAMETER Experiment Name: At_Far-red-induction_P Parameter: Organism Value: A. thaliana
  misc_feature: MA Experiment 20001248 PARAMETER Experiment Name: At_Far-red-induction_P Parameter: Plant Line Value: Columbia
  misc_feature: MA Experiment 20001248 PARAMETER Experiment Name: At_Far-red-induction_P Parameter: Timepoint (hr) Value: 4
  misc_feature: MA Experiment 20001248 PARAMETER Experiment Name: At_Far-red-induction_P Parameter: Tissue Value: Whole Plant
  misc_feature: MA Experiment ID: 20001451 Result: Down-regulated in Transcription
  misc_feature: MA Experiment 20001451 PARAMETER Experiment Name: At_Far-red-induction_P Parameter: Age (day) Value: 7
  misc_feature: MA Experiment 20001451 PARAMETER Experiment Name: At_Far-red-induction_P Parameter: Light Value: Far-red vs. White
  misc_feature: MA Experiment 20001451 PARAMETER Experiment Name: At_Far-red-induction_P Parameter: Organism Value: A. thaliana
  misc_feature: MA Experiment 20001451 PARAMETER Experiment Name: At_Far-red-induction_P Parameter: Plant Line Value: Columbia
  misc_feature: MA Experiment 20001451 PARAMETER Experiment Name: At_Far-red-induction_P Parameter: Timepoint (hr) Value: 24
  misc_feature: MA Experiment 20001451 PARAMETER Experiment Name: At_Far-red-induction_P Parameter: Tissue Value: Whole Plant
  misc_feature: MA Experiment ID: 20001905 Result: Down-regulated in Transcription
  misc_feature: MA Experiment 20001905 PARAMETER Experiment Name: At_Drought_Reproduction_P Parameter: Age (day) Value: 40
  misc_feature: MA Experiment 20001905 PARAMETER Experiment Name: At_Drought_Reproduction_P Parameter: Organism Value: A. thaliana
  misc_feature: MA Experiment 20001905 PARAMETER Experiment Name: At_Drought_Reproduction_P Parameter: Plant Line Value: WS
  misc_feature: MA Experiment 20001905 PARAMETER Experiment Name: At_Drought_Reproduction_P Parameter: Timepoint (day) Value: 10
  misc_feature: MA Experiment 20001905 PARAMETER Experiment Name: At_Drought_Reproduction_P Parameter: Tissue Value: Rosettes
  misc_feature: MA Experiment 20001905 PARAMETER Experiment Name: At_Drought_Reproduction_P Parameter: Treatment Value: Drought vs. No Drought
acactcttttcgctctcagatctgaaaccttatctgaattacatttccccgattcgacgttgtgcgaattgatgcagcagagaggacgatccgtcaaccgcagatcacgaagcttctctagatccagactcgccgtcgaaggccactgaattactctctcccctctcttggcagatcttcttcttcgttttttcccgacaaacgacatttccgaaatggctgcatcgtacgaagaagagcgtgatattcagaagaattactggatagagcattccgctgatctgactgttgaagctatgatgcttgactcgagagcttctgatctcgacaaggaagaacgtcctgaggtactctctttgctccctccatatgaaggcaaatcagtgttggaacttggagctggtattggtcgtttcactggtgaattagctcaaaaggctggtgaactcattgctcttgacttcattgataacgttatcaagaagaatgaaagtatcaatgggcattacaagaatgtcaagtttatgtgtgctgatgttacatcccctgacctcaagatcactgatggatctcttgacttgattttctccaactggctgctcatgtatctttctgacaaagaggtggagcttttggcagaaaggatggtcggttggatcaaggttggaggatacattttcttccgtgaatcttgcttccaccaatcaggggacagtaagcggaaatccaaccccactcactaccgtgaaccccgtttctattccaaggtctttcaagagtgtcagactcgggatgctgctggaaattcatttgagctctctatgatcggatgcaagtgcattggagcttatgtcaagaacaagaagaatcagaatcagatttgttggatatggcagaaggtcagctcagaaaatgacagaggcttccaacgtttcttggacaatgtccaatacaaatccagtggaatcctacgctatgagcgtgtctttggccaagggtttgtgagcactggtggacttgagacaaccaaagaatttgtggagaaaatgaatctgaaaccaggacagaaagtcttagatgttgggtgtggcattggtggaggtgacttctacatggctgagaagtttgatgttcacgttgttggtatcgatctttctgtcaacatgatctctttcgcattggaacgtgctattggactcagctgctcggttgagtttgaggttgctgattgcaccacaaaacactacccagataattcgtttgatgtcatttacagccgtgacactattctgcacatccaagacaaaccagccttgtttaggactttcttcaaatggcttaaaccgggaggtaaagttctcatcagcgactactgtagaagccccaaaactccatctgctgagttttcagagtacatcaaacagagaggatatgatctccatgacgttcaagcttatggacagatgctaaaagacgctggcttcactgatgtgatcgcagaggaccgtactgatcagtttatgcaagtcctgaaacgtgaattagacagggtggagaaagaaaaggaaaaattcatctccgacttctccaaagaggattacgatgacattgttggaggatggaagtcaaagctggagaggtgtgcatcggatgagcagaaatggggacttttcatcgccaacaagaattaagcaaatcgaaatctactacttctatgttttcttctttctttgtttgttcaataaaaatgtcatttccgctaggtgatgatatatgcctgtagtgtgttatgtggacttgttgagtggtgttaaatcttgtttcccttatgtgatatgtaaaccgaattatgtttggtcttagtttatactctttgatttgaagaattttctaaatgcatttgtgttatgc

SEQ ID NO: 85140 - protein, 491 aa, Arabidopsis thaliana
  peptide (1)..(491): Ceres Seq. ID no. 12678997
  misc_feature (1)..(491): Homolog of NCBI NO: 30684743 NR Description: phosphoethanolamine N-methyltransferase, putative
  misc_feature (1)..(491): Homolog of NCBI NO: 20260388 NR Description: unknown protein [Arabidopsis thaliana]
  misc_feature (1)..(491): Homolog of NCBI NO: 9294501 NR Description: methyl transferase-like protein [Arabidopsis
  misc_feature (17)..(490): Homolog of NCBI NO: 15221909 NR Description: phosphoethanolamine N-methyltransferase, protein id: At1g48600.1, supported by cDNA: gi_16226648, by cDNA: gi_17380783 [Arabidopsis thaliana]
  misc_feature (1)..(491): Homolog of NCBI NO: 15219502 NR Description: phosphoethanolamine N-methyltransferase, protein id: At1g73600.1 [Arabidopsis thaliana]
  misc_feature (3)..(491): Homolog of NCBI NO: 24212080 NR Description: Putative phosphoethanolamine N-methyltransferase 3
  misc_feature (7)..(490): Homolog of NCBI NO: 34911440 NR Description: putative phosphoethanolamine methyltransferase
  misc_feature (7)..(490): Homolog of NCBI NO: 24212082 NR Description: Phosphoethanolamine N-methyltransferase
  misc_feature (7)..(490): Homolog of NCBI NO: 28804509 NR Description: phosphoethanolamine N-methyltransferase [Aster
  misc_feature (1)..(490): Homolog of NCBI NO: 12584943 NR Description: phosphoethanolamine N-methyltransferase
MAASYEEERDIQKNYWIEHSADLTVEAMMLDSRASDLDKEERPEVLSLLPPYEGKSVLELGAGIGRFTGELAQKAGELIALDFIDNVIKKNESINGHYKNVKFMCADVTSPDLKITDGSLDLIFSNWLLMYLSDKEVELLAERMVGWIKVGGYIFFRESCFHQSGDSKRKSNPTHYREPRFYSKVFQECQTRDAAGNSFELSMIGCKCIGAYVKNKKNQNQICWIWQKVSSENDRGFQRFLDNVQYKSSGILRYERVFGQGFVSTGGLETTKEFVEKMNLKPGQKVLDVGCGIGGGDFYMAEKFDVHVVGIDLSVNMISFALERAIGLSCSVEFEVADCTTKHYPDNSFDVIYSRDTILHIQDKPALFRTFFKWLKPGGKVLISDYCRSPKTPSAEFSEYIKQRGYDLHDVQAYGQMLKDAGFTDVIAEDRTDQFMQVLKRELDRVEKEKEKFISDFSKEDYDDIVGGWKSKLERCASDEQKWGLFIANKN

SEQ ID NO: 85141 - protein, 464 aa, Arabidopsis thaliana
  peptide (1)..(464): Ceres Seq. ID no. 12678998
  misc_feature (1)..(464): Homolog of NCBI NO: 30684743 NR Description: phosphoethanolamine N-methyltransferase, putative
  misc_feature (1)..(464): Homolog of NCBI NO: 20260388 NR Description: unknown protein [Arabidopsis thaliana]
  misc_feature (1)..(464): Homolog of NCBI NO: 9294501 NR Description: methyl transferase-like protein [Arabidopsis
  misc_feature (1)..(463): Homolog of NCBI NO: 15221909 NR Description: phosphoethanolamine N-methyltransferase, protein id: At1g48600.1, supported by cDNA: gi_16226648, by cDNA: gi_17380783 [Arabidopsis thaliana]
  misc_feature (1)..(464): Homolog of NCBI NO: 15219502 NR Description: phosphoethanolamine N-methyltransferase, protein id: At1g73600.1 [Arabidopsis thaliana]
  misc_feature (1)..(464): Homolog of NCBI NO: 24212080 NR Description: Putative phosphoethanolamine N-methyltransferase 3
  misc_feature (1)..(463): Homolog of NCBI NO: 34911440 NR Description: putative phosphoethanolamine methyltransferase
  misc_feature (1)..(463): Homolog of NCBI NO: 24212082 NR Description: Phosphoethanolamine N-methyltransferase
  misc_feature (1)..(463): Homolog of NCBI NO: 28804509 NR Description: phosphoethanolamine N-methyltransferase [Aster
  misc_feature (1)..(463): Homolog of NCBI NO: 12584943 NR Description: phosphoethanolamine N-methyltransferase
MMLDSRASDLDKEERPEVLSLLPPYEGKSVLELGAGIGRFTGELAQKAGELIALDFIDNVIKKNESINGHYKNVKFMCADVTSPDLKITDGSLDLIFSNWLLMYLSDKEVELLAERMVGWIKVGGYIFFRESCFHQSGDSKRKSNPTHYREPRFYSKVFQECQTRDAAGNSFELSMIGCKCIGAYVKNKKNQNQICWIWQKVSSENDRGFQRFLDNVQYKSSGILRYERVFGQGFVSTGGLETTKEFVEKMNLKPGQKVLDVGCGIGGGDFYMAEKFDVHVVGIDLSVNMISFALERAIGLSCSVEFEVADCTTKHYPDNSFDVIYSRDTILHIQDKPALFRTFFKWLKPGGKVLISDYCRSPKTPSAEFSEYIKQRGYDLHDVQAYGQMLKDAGFTDVIAEDRTDQFMQVLKRELDRVEKEKEKFISDFSKEDYDDIVGGWKSKLERCASDEQKWGLFIANKN

SEQ ID NO: 85142 - protein, 463 aa, Arabidopsis thaliana
  peptide (1)..(463): Ceres Seq. ID no. 12678999
  misc_feature (1)..(463): Homolog of NCBI NO: 30684743 NR Description: phosphoethanolamine N-methyltransferase, putative
  misc_feature (1)..(463): Homolog of NCBI NO: 20260388 NR Description: unknown protein [Arabidopsis thaliana]
  misc_feature (1)..(463): Homolog of NCBI NO: 9294501 NR Description: methyl transferase-like protein [Arabidopsis
  misc_feature (1)..(462): Homolog of NCBI NO: 15221909 NR Description: phosphoethanolamine N-methyltransferase, protein id: At1g48600.1, supported by cDNA: gi_16226648, by cDNA: gi_17380783 [Arabidopsis thaliana]
  misc_feature (1)..(463): Homolog of NCBI NO: 15219502 NR Description: phosphoethanolamine N-methyltransferase, protein id: At1g73600.1 [Arabidopsis thaliana]
  misc_feature (1)..(463): Homolog of NCBI NO: 24212080 NR Description: Putative phosphoethanolamine N-methyltransferase 3
  misc_feature (1)..(462): Homolog of NCBI NO: 34911440 NR Description: putative phosphoethanolamine methyltransferase
  misc_feature (1)..(462): Homolog of NCBI NO: 24212082 NR Description: Phosphoethanolamine N-methyltransferase
  misc_feature (1)..(462): Homolog of NCBI NO: 28804509 NR Description: phosphoethanolamine N-methyltransferase [Aster
  misc_feature (1)..(462): Homolog of NCBI NO: 12584943 NR Description: phosphoethanolamine N-methyltransferase
MLDSRASDLDKEERPEVLSLLPPYEGKSVLELGAGIGRFTGELAQKAGELIALDFIDNVIKKNESINGHYKNVKFMCADVTSPDLKITDGSLDLIFSNWLLMYLSDKEVELLAERMVGWIKVGGYIFFRESCFHQSGDSKRKSNPTHYREPRFYSKVFQECQTRDAAGNSFELSMIGCKCIGAYVKNKKNQNQICWIWQKVSSENDRGFQRFLDNVQYKSSGILRYERVFGQGFVSTGGLETTKEFVEKMNLKPGQKVLDVGCGIGGGDFYMAEKFDVHVVGIDLSVNMISFALERAIGLSCSVEFEVADCTTKHYPDNSFDVIYSRDTILHIQDKPALFRTFFKWLKPGGKVLISDYCRSPKTPSAEFSEYIKQRGYDLHDVQAYGQMLKDAGFTDVIAEDRTDQFMQVLKRELDRVEKEKEKFISDFSKEDYDDIVGGWKSKLERCASDEQKWGLFIANKN

SEQ ID NO: 85143 - DNA, 1544 bp, Arabidopsis thaliana
  misc_feature (1)..(1544): Ceres Seq. ID no. 12679004
  misc_feature: MA Experiment ID: 20000171 Result: Up-regulated in Transcription
  misc_feature: MA Experiment 20000171 PARAMETER Experiment Name: At_42deg_Heat_P Parameter: Age (day) Value: 14
  misc_feature: MA Experiment 20000171 PARAMETER Experiment Name: At_42deg_Heat_P Parameter: Organism Value: A. thaliana
  misc_feature: MA Experiment 20000171 PARAMETER Experiment Name: At_42deg_Heat_P Parameter: Plant Line Value: WS
  misc_feature: MA Experiment 20000171 PARAMETER Experiment Name: At_42deg_Heat_P Parameter: Temperature (deg C) Value: 42 vs. 22
  misc_feature: MA Experiment 20000171 PARAMETER Experiment Name: At_42deg_Heat_P Parameter: Timepoint (hr) Value: 1
  misc_feature: MA Experiment 20000171 PARAMETER Experiment Name: At_42deg_Heat_P Parameter: Tissue Value: Aerial
  misc_feature: MA Experiment ID: 20000234 Result: Down-regulated in Transcription
  misc_feature: MA Experiment 20000234 PARAMETER Experiment Name: At_Siliques_P Parameter: Age (day) Value: 21
  misc_feature: MA Experiment 20000234 PARAMETER Experiment Name: At_Siliques_P Parameter: Organism Value: A. thaliana
  misc_feature: MA Experiment 20000234 PARAMETER Experiment Name: At_Siliques_P Parameter: Plant Line Value: WS
  misc_feature: MA Experiment 20000234 PARAMETER Experiment Name: At_Siliques_P Parameter: Tissue Value: Less Than 5mm Siliques vs. Whole Plant
  misc_feature: MA Experiment ID: 20000436 Result: Up-regulated in Transcription
  misc_feature: MA Experiment 20000436 PARAMETER Experiment Name: At_Drought_P Parameter: Age (day) Value: 7
  misc_feature: MA Experiment 20000436 PARAMETER Experiment Name: At_Drought_P Parameter: Organism Value: A. thaliana
  misc_feature: MA Experiment 20000436 PARAMETER Experiment Name: At_Drought_P Parameter: Plant Line Value: WS
  misc_feature: MA Experiment 20000436 PARAMETER Experiment Name: At_Drought_P Parameter: Timepoint (hr) Value: 12
  misc_feature: MA Experiment 20000436 PARAMETER Experiment Name: At_Drought_P Parameter: Tissue Value: Whole Plant
  misc_feature: MA Experiment 20000436 PARAMETER Experiment Name: At_Drought_P Parameter: Treatment Value: Drought vs. No Drought
  misc_feature: MA Experiment ID: 20000495 Result: Down-regulated in Transcription
  misc_feature: MA Experiment 20000495 PARAMETER Experiment Name: At_Guard_Cells_P Parameter: Harvest Date Value: 8/2/2002
  misc_feature: MA Experiment 20000495 PARAMETER Experiment Name: At_Guard_Cells_P Parameter: Organism Value: A. thaliana
  misc_feature: MA Experiment 20000495 PARAMETER Experiment Name: At_Guard_Cells_P Parameter: Tissue Value: Guard Cells vs. Leaves
  misc_feature: MA Experiment ID: 20001247 Result: Up-regulated in Transcription
  misc_feature: MA Experiment 20001247 PARAMETER Experiment Name: At_Far-red-induction_P Parameter: Age (day) Value: 7
  misc_feature: MA Experiment 20001247 PARAMETER Experiment Name: At_Far-red-induction_P Parameter: Light Value: Far-red vs. White
  misc_feature: MA Experiment 20001247 PARAMETER Experiment Name: At_Far-red-induction_P Parameter: Organism Value: A. thaliana
  misc_feature: MA Experiment 20001247 PARAMETER Experiment Name: At_Far-red-induction_P Parameter: Plant Line Value: Columbia
  misc_feature: MA Experiment 20001247 PARAMETER Experiment Name: At_Far-red-induction_P Parameter: Timepoint (hr) Value: 1
  misc_feature: MA Experiment 20001247 PARAMETER Experiment Name: At_Far-red-induction_P Parameter: Tissue Value: Whole Plant
  misc_feature: MA Experiment ID: 20001248 Result: Down-regulated in Transcription
  misc_feature: MA Experiment 20001248 PARAMETER Experiment Name: At_Far-red-induction_P Parameter: Age (day) Value: 7
  misc_feature: MA Experiment 20001248 PARAMETER Experiment Name: At_Far-red-induction_P Parameter: Light Value: Far-red vs. White
  misc_feature: MA Experiment 20001248 PARAMETER Experiment Name: At_Far-red-induction_P Parameter: Organism Value: A. thaliana
  misc_feature: MA Experiment 20001248 PARAMETER Experiment Name: At_Far-red-induction_P Parameter: Plant Line Value: Columbia
  misc_feature: MA Experiment 20001248 PARAMETER Experiment Name: At_Far-red-induction_P Parameter: Timepoint (hr) Value: 4
  misc_feature: MA Experiment 20001248 PARAMETER Experiment Name: At_Far-red-induction_P Parameter: Tissue Value: Whole Plant
  misc_feature: MA Experiment ID: 20001450 Result: Up-regulated in Transcription
  misc_feature: MA Experiment 20001450 PARAMETER Experiment Name: At_Far-red-induction_P Parameter: Age (day) Value: 7
  misc_feature: MA Experiment 20001450 PARAMETER Experiment Name: At_Far-red-induction_P Parameter: Light Value: Far-red vs. White
  misc_feature: MA Experiment 20001450 PARAMETER Experiment Name: At_Far-red-induction_P Parameter: Organism Value: A. thaliana
  misc_feature: MA Experiment 20001450 PARAMETER Experiment Name: At_Far-red-induction_P Parameter: Plant Line Value: Columbia
  misc_feature: MA Experiment 20001450 PARAMETER Experiment Name: At_Far-red-induction_P Parameter: Timepoint (hr) Value: 8
  misc_feature: MA Experiment 20001450 PARAMETER Experiment Name: At_Far-red-induction_P Parameter: Tissue Value: Whole Plant
  misc_feature: MA Experiment ID: 20001558 Result: Down-regulated in Transcription
  misc_feature: MA Experiment 20001558 PARAMETER Experiment Name: At_Drought_Soil_Dry_P Parameter: Age (day) Value: 27
  misc_feature: MA Experiment 20001558 PARAMETER Experiment Name: At_Drought_Soil_Dry_P Parameter: Organism Value: A. thaliana
  misc_feature: MA Experiment 20001558 PARAMETER Experiment Name: At_Drought_Soil_Dry_P Parameter: Plant Line Value: WS
  misc_feature: MA Experiment 20001558 PARAMETER Experiment Name: At_Drought_Soil_Dry_P Parameter: Post Timepoint (hr) Value: 6
  misc_feature: MA Experiment 20001558 PARAMETER Experiment Name: At_Drought_Soil_Dry_P Parameter: Post-Treatment Value: Re-Water vs. No Drought
  misc_feature: MA Experiment 20001558 PARAMETER Experiment Name: At_Drought_Soil_Dry_P Parameter: Timepoint (day) Value: 13
  misc_feature: MA Experiment 20001558 PARAMETER Experiment Name: At_Drought_Soil_Dry_P Parameter: Treatment Value: Drought vs. No Drought
  misc_feature: MA Experiment ID: 20001560 Result: Down-regulated in Transcription
  misc_feature: MA Experiment 20001560 PARAMETER Experiment Name: At_Drought_Soil_Dry_P Parameter: Age (day) Value: 28
  misc_feature: MA Experiment 20001560 PARAMETER Experiment Name: At_Drought_Soil_Dry_P Parameter: Organism Value: A. thaliana
  misc_feature: MA Experiment 20001560 PARAMETER Experiment Name: At_Drought_Soil_Dry_P Parameter: Plant Line Value: WS
  misc_feature: MA Experiment 20001560 PARAMETER Experiment Name: At_Drought_Soil_Dry_P Parameter: Post Timepoint (hr) Value: None
  misc_feature: MA Experiment 20001560 PARAMETER Experiment Name: At_Drought_Soil_Dry_P Parameter: Post-Treatment Value: None
  misc_feature: MA Experiment 20001560 PARAMETER Experiment Name: At_Drought_Soil_Dry_P Parameter: Timepoint (day) Value: 14
  misc_feature: MA Experiment 20001560 PARAMETER Experiment Name: At_Drought_Soil_Dry_P Parameter: Treatment Value: Drought vs. No Drought
  misc_feature: MA Experiment ID: 20001757 Result: Down-regulated in Transcription
  misc_feature: MA Experiment 20001757 PARAMETER Experiment Name: At_50mM_NH4NO3_L-to-H_P Parameter: Timepoint (hr) Value: 6
  misc_feature: MA Experiment 20001757 PARAMETER Experiment Name: At_50mM_NH4NO3_L-to-H_P Parameter: Tissue Value: Leaf
  misc_feature: MA Experiment 20001757 PARAMETER Experiment Name: At_50mM_NH4NO3_L-to-H_P Parameter: Treatment Value: 50mM NH4NO3 vs 100mM Mannitol
aggaaaactaaaccaaagtctgtttaccagtaatatcaatcgatcgccattctcgacatttctctctctcaagctagtctaaagtttcttcttatctccttcctccgaccaaaacttcgacttctctcttattttcaccctcagagagtaaccatggatgccttgacctcgagtttggttcgatctcccatcgtaccatcgagaacttccgacaacggttctggatctatgttccttaccgccagtggccctggattcacgcgttctggttcttcaagacttcaacttcgtttaaggcaaaacgcgtctgctagatcctcaagatcattacagagcttaacaacgactgctaaaactcggagaagttttgtggttagagcttcttcagcgtctaatgatgcttcatctggttcttcccccaaaccgatcgctccgctccagctgcaatcgcctgctggtcagtttctgtctcagattttggtgagccatcctcatcttgtgcctgcagctgttgaacagcagcttgagcagcttcaaactgatcgggactctcagggacagaacaaagattcagcgtctgtacctggaaccgacatcgttctctacaggagaattgcggagttgaaggaaaacgagagaagaagaacattggaagagattttgtatgcattggtggttcaaaagttcatggaagctaacgtatcacttgtaccttcagtaagcccatcttcagatccgtctggtcgggttgatacttggccgaccaaagtggagaaactcgagcggcttcactcgcccgagatgtacgagatgattcacaaccatcttgccttgattcttggaagcagaatgggtgatctgaactctgttgcacagataagcaagctcagagttggccaagtttacgctgcttctgtgatgtatggatatttcttgaagagggtggaccaaaggtttcagcttgagaagacgatgaagattcttccgggtgggtcggatgaaagtaaaacaagcgttgagcaagccgaggggacggcaacatatcaggcggctgtatcgtctcacccagaggttggtgcatttgcgggcggagttagtgctaagggcttcggcagcgagattaaaccatcccgattaaggtcatatgtgatgtcatttgatgcggagacgctgcagagatacgccactataagatcaagagaagcagttggaatcatcgagaagcacacagaggcattgtttggtaagcctgagattgtaataacaccggagggcacagtcgattcatcgaaggacgaacagataaagatcagcttcggtggaatgaagaggctcgtcttggaggcagttactttcgggtcgttcctttgggatgttgagagccatgtagatgcgaggtaccactttgtattgaactaaaaacatggtctgtaatgcagttgactaacttatgtagcattaagaagatacccattaagggtatcattacacttgtatcaaaaatttgaggaaaagatcgtacattatatatgttattgtgatgg

SEQ ID NO: 85144 - protein, 421 aa, Arabidopsis thaliana; identical to SEQ ID NO: 39462
  peptide (1)..(421): Ceres Seq. ID no. 12679005
  misc_feature (11)..(421): Pfam Name: Protein of unknown function (DUF760) Pfam Description: Protein of unknown function (DUF760)
  misc_feature (1)..(421): Homolog of NCBI NO: 18401645 NR Description: expressed protein; protein id: At3g17800.1, by cDNA: 15577., supported by cDNA: gi_17064819, supported by gi_20259855, supported by cDNA: gi_20466176 [Arabidopsis
  misc_feature (1)..(421): Homolog of NCBI NO: 17064820 NR Description: Unknown protein [Arabidopsis thaliana]
  misc_feature (1)..(421): Homolog of NCBI NO: 15221185 NR Description: unknown protein; protein id: At1g48450.1, by cDNA: gi_17380819, supported by cDNA: gi_18086464 [Arabidopsis >gi|8778707|gb|AAF79715.1|AC020889_23 T1N15.6 [Arabidopsis
  misc_feature (165)..(421): Homolog of NCBI NO: 13561930 NR Description: unknown [Brassica napus]
  misc_feature (39)..(421): Homolog of NCBI NO: 28301943 NR Description: unknown protein [Oryza sativa (japonica
  misc_feature (59)..(419): Homolog of NCBI NO: 18398302 NR Description: expressed protein; protein id: At1g32160.1, by cDNA: 39425., supported by cDNA: gi_14335033 [Arabidopsis
  misc_feature (30)..(419): Homolog of NCBI NO: 32489097 NR Description: OSJNBa0093F12.3 [Oryza sativa (japonica
  misc_feature (68)..(271): Homolog of NCBI NO: 15239021 NR Description: putative protein; protein id: At5g48590.1, by cDNA: 7891. [Arabidopsis thaliana] gb|AAF02142.1~gene_id:K15N18.6~strong similarity to unknown
  misc_feature (327)..(416): Homolog of NCBI NO: 15239021 NR Description: putative protein; protein id: At5g48590.1, by cDNA: 7891. [Arabidopsis thaliana] gb|AAF02142.1~gene_id:K15N18.6~strong similarity to unknown
  misc_feature (71)..(352): Homolog of NCBI NO: 18397912 NR Description: expressed protein; protein id: At3g07310.1, by cDNA: 37200., supported by cDNA: gi_14596186 [Arabidopsis >gi|6041833|gb|AAF02142.1|AC009853_2 unknown protein [Arabidopsis

SEQ ID NO: 85145 - protein, 396 aa, Arabidopsis thaliana; identical to SEQ ID NO: 39463
  peptide (1)..(396): Ceres Seq. ID no. 12679006
  misc_feature (1)..(396): Pfam Name: Protein of unknown function (DUF760) Pfam Description: Protein of unknown function (DUF760)
  misc_feature (1)..(396): Homolog of NCBI NO: 18401645 NR Description: expressed protein; protein id: At3g17800.1, by cDNA: 15577., supported by cDNA: gi_17064819, supported by gi_20259855, supported by cDNA: gi_20466176 [Arabidopsis
  misc_feature (1)..(396): Homolog of NCBI NO: 17064820 NR Description: Unknown protein [Arabidopsis thaliana]
  misc_feature (1)..(396): Homolog of NCBI NO: 15221185 NR Description: unknown protein; protein id: At1g48450.1, by cDNA: gi_17380819, supported by cDNA: gi_18086464 [Arabidopsis >gi|8778707|gb|AAF79715.1|AC020889_23 T1N15.6 [Arabidopsis
  misc_feature (140)..(396): Homolog of NCBI NO: 13561930 NR Description: unknown [Brassica napus]
  misc_feature (14)..(396): Homolog of NCBI NO: 28301943 NR Description: unknown protein [Oryza sativa (japonica
  misc_feature (34)..(394): Homolog of NCBI NO: 18398302 NR Description: expressed protein; protein id: At1g32160.1, by cDNA: 39425., supported by cDNA: gi_14335033 [Arabidopsis
  misc_feature (5)..(394): Homolog of NCBI NO: 32489097 NR Description: OSJNBa0093F12.3 [Oryza sativa (japonica
  misc_feature (43)..(246): Homolog of NCBI NO: 15239021 NR Description: putative protein; protein id: At5g48590.1, by cDNA: 7891. [Arabidopsis thaliana] gb|AAF02142.1~gene_id:K15N18.6~strong similarity to unknown
  misc_feature (302)..(391): Homolog of NCBI NO: 15239021 NR Description: putative protein; protein id: At5g48590.1, by cDNA: 7891. [Arabidopsis thaliana] gb|AAF02142.1~gene_id:K15N18.6~strong similarity to unknown
  misc_feature (46)..(327): Homolog of NCBI NO: 18397912 NR Description: expressed protein; protein id: At3g07310.1, by cDNA: 37200., supported by cDNA: gi_14596186 [Arabidopsis >gi|6041833|gb|AAF02142.1|AC009853_2 unknown protein [Arabidopsis

SEQ ID NO: 85146 - protein, 243 aa, Arabidopsis thaliana; identical to SEQ ID NO: 39464
  peptide (1)..(243): Ceres Seq. ID no. 12679007
  misc_feature (1)..(243): Pfam Name: Protein of unknown function (DUF760) Pfam Description: Protein of unknown function (DUF760)
  misc_feature (1)..(243): Homolog of NCBI NO: 18401645 NR Description: expressed protein; protein id: At3g17800.1, by cDNA: 15577., supported by cDNA: gi_17064819, supported by gi_20259855, supported by cDNA: gi_20466176 [Arabidopsis
  misc_feature (1)..(243): Homolog of NCBI NO: 17064820 NR Description: Unknown protein [Arabidopsis thaliana]
  misc_feature (1)..(243): Homolog of NCBI NO: 15221185 NR Description: unknown protein; protein id: At1g48450.1, by cDNA: gi_17380819, supported by cDNA: gi_18086464 [Arabidopsis >gi|8778707|gb|AAF79715.1|AC020889_23 T1N15.6 [Arabidopsis
  misc_feature (1)..(243): Homolog of NCBI NO: 13561930 NR Description: unknown [Brassica napus]
  misc_feature (1)..(243): Homolog of NCBI NO: 28301943 NR Description: unknown protein [Oryza sativa (japonica
  misc_feature (1)..(241): Homolog of NCBI NO: 18398302 NR Description: expressed protein; protein id: At1g32160.1, by cDNA: 39425., supported by cDNA: gi_14335033 [Arabidopsis
  misc_feature (1)..(241): Homolog of NCBI NO: 32489097 NR Description: OSJNBa0093F12.3 [Oryza sativa (japonica
  misc_feature (1)..(93): Homolog of NCBI NO: 15239021 NR Description: putative protein; protein id: At5g48590.1, by cDNA: 7891. [Arabidopsis thaliana] gb|AAF02142.1~gene_id:K15N18.6~strong similarity to unknown
  misc_feature (149)..(238): Homolog of NCBI NO: 15239021 NR Description: putative protein; protein id: At5g48590.1, by cDNA: 7891. [Arabidopsis thaliana] gb|AAF02142.1~gene_id:K15N18.6~strong similarity to unknown
  misc_feature (1)..(174): Homolog of NCBI NO: 18397912 NR Description: expressed protein; protein id: At3g07310.1, by cDNA: 37200., supported by cDNA: gi_14596186 [Arabidopsis >gi|6041833|gb|AAF02142.1|AC009853_2 unknown protein [Arabidopsis

SEQ ID NO: 85147 - DNA, 1332 bp, Arabidopsis thaliana
  misc_feature (1)..(1332): Ceres Seq. ID no. 12679044
  misc_feature: MA Experiment ID: 20000171 Result: Down-regulated in Transcription
  misc_feature: MA Experiment 20000171 PARAMETER Experiment Name: At_42deg_Heat_P Parameter: Age (day) Value: 14
  misc_feature: MA Experiment 20000171 PARAMETER Experiment Name: At_42deg_Heat_P Parameter: Organism Value: A. thaliana
  misc_feature: MA Experiment 20000171 PARAMETER Experiment Name: At_42deg_Heat_P Parameter: Plant Line Value: WS
  misc_feature: MA Experiment 20000171 PARAMETER Experiment Name: At_42deg_Heat_P Parameter: Temperature (deg C) Value: 42 vs. 22
  misc_feature: MA Experiment 20000171 PARAMETER Experiment Name: At_42deg_Heat_P Parameter: Timepoint (hr) Value: 1
  misc_feature: MA Experiment 20000171 PARAMETER Experiment Name: At_42deg_Heat_P Parameter: Tissue Value: Aerial
  misc_feature: MA Experiment ID: 20000173 Result: Down-regulated in Transcription
  misc_feature: MA Experiment 20000173 PARAMETER Experiment Name: At_42deg_Heat_P Parameter: Age (day) Value: 14
  misc_feature: MA Experiment 20000173 PARAMETER Experiment Name: At_42deg_Heat_P Parameter: Organism Value: A. thaliana
  misc_feature: MA Experiment 20000173 PARAMETER Experiment Name: At_42deg_Heat_P Parameter: Plant Line Value: WS
  misc_feature: MA Experiment 20000173 PARAMETER Experiment Name: At_42deg_Heat_P Parameter: Temperature (deg C) Value: 42 vs. 22
  misc_feature: MA Experiment 20000173 PARAMETER Experiment Name: At_42deg_Heat_P Parameter: Timepoint (hr) Value: 6
  misc_feature: MA Experiment 20000173 PARAMETER Experiment Name: At_42deg_Heat_P Parameter: Tissue Value: Aerial
  misc_feature: MA Experiment ID: 20000182 Result: Up-regulated in Transcription
  misc_feature: MA Experiment 20000182 PARAMETER Experiment Name: At_2mM_SA_P Parameter: Age (day) Value: 14
  misc_feature: MA Experiment 20000182 PARAMETER Experiment Name: At_2mM_SA_P Parameter: Organism Value: A. thaliana
  misc_feature: MA Experiment 20000182 PARAMETER Experiment Name: At_2mM_SA_P Parameter: Plant Line Value: WS
  misc_feature: MA Experiment 20000182 PARAMETER Experiment Name: At_2mM_SA_P Parameter: Timepoint (hr) Value: 6
  misc_feature: MA Experiment 20000182 PARAMETER Experiment Name: At_2mM_SA_P Parameter: Tissue Value: Aerial
  misc_feature: MA Experiment 20000182 PARAMETER Experiment Name: At_2mM_SA_P Parameter: Treatment Value: 2mM SA vs. No Treatment
  misc_feature: MA Experiment ID: 20000184 Result: Down-regulated in Transcription
  misc_feature: MA Experiment 20000184 PARAMETER Experiment Name: At_Shoots__P Parameter: Age (day) Value: 7
  misc_feature: MA Experiment 20000184 PARAMETER Experiment Name: At_Shoots__P Parameter: Tissue Value: Shoots vs. Whole Plant
  misc_feature: MA Experiment ID: 20000185 Result: Down-regulated in Transcription
  misc_feature: MA Experiment 20000185 PARAMETER Experiment Name: At_Roots__P Parameter: Age (day) Value: 7 vs. 21
  misc_feature: MA Experiment 20000185 PARAMETER Experiment Name: At_Roots__P Parameter: Organism Value: A. thaliana
  misc_feature: MA Experiment 20000185 PARAMETER Experiment Name: At_Roots__P Parameter: Tissue Value: Roots vs. Whole Plant
  misc_feature: MA Experiment ID: 20000234 Result: Down-regulated in Transcription
  misc_feature: MA Experiment 20000234 PARAMETER Experiment Name: At_Siliques_P Parameter: Age (day) Value: 21
  misc_feature: MA Experiment 20000234 PARAMETER Experiment Name: At_Siliques_P Parameter: Organism Value: A. thaliana
  misc_feature: MA Experiment 20000234 PARAMETER Experiment Name: At_Siliques_P Parameter: Plant Line Value: WS
  misc_feature: MA Experiment 20000234 PARAMETER Experiment Name: At_Siliques_P Parameter: Tissue Value: Less Than 5mm Siliques vs. Whole Plant
  misc_feature: MA Experiment ID: 20000264 Result: Down-regulated in Transcription
  misc_feature: MA Experiment 20000264 PARAMETER Experiment Name: At_Open_Flower_P Parameter: Age (day) Value: 21
  misc_feature: MA Experiment 20000264 PARAMETER Experiment Name: At_Open_Flower_P Parameter: Plant Line Value: WS
  misc_feature: MA Experiment 20000264 PARAMETER Experiment Name: At_Open_Flower_P Parameter: Tissue Value: Open Flower vs. Whole Plant
  misc_feature: MA Experiment ID: 20000265 Result: Down-regulated in Transcription
  misc_feature: MA Experiment 20000265 PARAMETER Experiment Name: At_Open_Flower_P Parameter: Age (day) Value: 21
  misc_feature: MA Experiment 20000265 PARAMETER Experiment Name: At_Open_Flower_P Parameter: Plant Line Value: WS
  misc_feature: MA Experiment 20000265 PARAMETER Experiment Name: At_Open_Flower_P Parameter: Tissue Value: Closed Flower vs. Whole Plant
  misc_feature: MA Experiment ID: 20000286 Result: Down-regulated in Transcription
  misc_feature: MA Experiment 20000286 PARAMETER Experiment Name: At_Open_Flower_P Parameter: Age (day) Value: 21
  misc_feature: MA Experiment 20000286 PARAMETER Experiment Name: At_Open_Flower_P Parameter: Plant Line Value: WS
  misc_feature: MA Experiment 20000286 PARAMETER Experiment Name: At_Open_Flower_P Parameter: Tissue Value: Half Open vs. Whole Plant
  misc_feature: MA Experiment ID: 20000438 Result: Down-regulated in Transcription
  misc_feature: MA Experiment 20000438 PARAMETER Experiment Name: At_Shoots__P Parameter: Age (day) Value: 14
  misc_feature: MA Experiment 20000438 PARAMETER Experiment Name: At_Shoots__P Parameter: Tissue Value: Shoots vs. Whole Plant
  misc_feature: MA Experiment ID: 20000495 Result: Down-regulated in Transcription
  misc_feature: MA Experiment 20000495 PARAMETER Experiment Name: At_Guard_Cells_P Parameter: Harvest Date Value: 8/2/2002
  misc_feature: MA Experiment 20000495 PARAMETER Experiment Name: At_Guard_Cells_P Parameter: Organism Value: A. thaliana
  misc_feature: MA Experiment 20000495 PARAMETER Experiment Name: At_Guard_Cells_P Parameter: Tissue Value: Guard Cells vs. Leaves
  misc_feature: MA Experiment ID: 20000794 Result: Down-regulated in Transcription
  misc_feature: MA Experiment 20000794 PARAMETER Experiment Name: At_Petals_P Parameter: Age (day) Value: 23-25 days
  misc_feature: MA Experiment 20000794 PARAMETER Experiment Name: At_Petals_P Parameter: Plant Line Value: WS
  misc_feature: MA Experiment 20000794 PARAMETER Experiment Name: At_Petals_P Parameter: Tissue Value: Petals vs. Whole plant
  misc_feature: MA Experiment ID: 20001555 Result: Down-regulated in Transcription
  misc_feature: MA Experiment 20001555 PARAMETER Experiment Name: At_Drought_Soil_Dry_P Parameter: Age (day) Value: 24
  misc_feature: MA Experiment 20001555 PARAMETER Experiment Name: At_Drought_Soil_Dry_P Parameter: Organism Value: A. thaliana
  misc_feature: MA Experiment 20001555 PARAMETER Experiment Name: At_Drought_Soil_Dry_P Parameter: Plant Line Value: WS
  misc_feature: MA Experiment 20001555 PARAMETER Experiment Name: At_Drought_Soil_Dry_P Parameter: Post Timepoint (hr) Value: None
  misc_feature: MA Experiment 20001555 PARAMETER Experiment Name: At_Drought_Soil_Dry_P Parameter: Post-Treatment Value: None
  misc_feature: MA Experiment 20001555 PARAMETER Experiment Name: At_Drought_Soil_Dry_P Parameter: Timepoint (day) Value: 10
  misc_feature: MA Experiment 20001555 PARAMETER Experiment Name: At_Drought_Soil_Dry_P Parameter: Treatment Value: Drought vs. No Drought
  misc_feature: MA Experiment ID: 20001558 Result: Down-regulated in Transcription
  misc_feature: MA Experiment 20001558 PARAMETER Experiment Name: At_Drought_Soil_Dry_P Parameter: Age (day) Value: 27
  misc_feature: MA Experiment 20001558 PARAMETER Experiment Name: At_Drought_Soil_Dry_P Parameter: Organism Value: A. thaliana
  misc_feature: MA Experiment 20001558 PARAMETER Experiment Name: At_Drought_Soil_Dry_P Parameter: Plant Line Value: WS
  misc_feature: MA Experiment 20001558 PARAMETER Experiment Name: At_Drought_Soil_Dry_P Parameter: Post Timepoint (hr) Value: 6
  misc_feature: MA Experiment 20001558 PARAMETER Experiment Name: At_Drought_Soil_Dry_P Parameter: Post-Treatment Value: Re-Water vs. No Drought
  misc_feature: MA Experiment 20001558 PARAMETER Experiment Name: At_Drought_Soil_Dry_P Parameter: Timepoint (day) Value: 13
  misc_feature: MA Experiment 20001558 PARAMETER Experiment Name: At_Drought_Soil_Dry_P Parameter: Treatment Value: Drought vs. No Drought
  misc_feature: MA Experiment ID: 20001560 Result: Down-regulated in Transcription
  misc_feature: MA Experiment 20001560 PARAMETER Experiment Name: At_Drought_Soil_Dry_P Parameter: Age (day) Value: 28
  misc_feature: MA Experiment 20001560 PARAMETER Experiment Name: At_Drought_Soil_Dry_P Parameter: Organism Value: A. thaliana
  misc_feature: MA Experiment 20001560 PARAMETER Experiment Name: At_Drought_Soil_Dry_P Parameter: Plant Line Value: WS
  misc_feature: MA Experiment 20001560 PARAMETER Experiment Name: At_Drought_Soil_Dry_P Parameter: Post Timepoint (hr) Value: None
  misc_feature: MA Experiment 20001560 PARAMETER Experiment Name: At_Drought_Soil_Dry_P Parameter: Post-Treatment Value: None
  misc_feature: MA Experiment 20001560 PARAMETER Experiment Name: At_Drought_Soil_Dry_P Parameter: Timepoint (day) Value: 14
  misc_feature: MA Experiment 20001560 PARAMETER Experiment Name: At_Drought_Soil_Dry_P Parameter: Treatment Value: Drought vs. No Drought
aaagtccaaacacagcataaaagtagctctattgactttttttcttcctccaaactctttttacgtcaagcaatggaggatcttgatccaacctacatccaagcaccagagcatagatcagattcgaatttcatccctaaccaaccagaagaaatacccgtgattgatctctcgcgcctcgatgaccccgaagatgtccaaaacgttatctcagagatcggtgatgcttgtgaaaaatggggattttttcaggtgcttaatcatggtgtgccttctgacgcaaggcaacgtgtggagaagactgtgaagatgtttttcgatttgcctatggaagagaagataaaggtgaagagagacgatgtgaatcctgtagggtatcatgatggagaacacaccaagaacgttaaagattggaaagaagtgtttgatatttatttcaaagatccaatggtcattccttcaaccactgatcctgaagatgaaggcttaagacttgtttacaacaagtggcctcaatctccttctgatttcagggaagcatgtgaagtatatgcgagacacgctgaaaaattagcgttcaagctcttggaactgatttcgttaagcttaggcttgccaaaagagcgttttcatgactacttcaaagaacaaatgagttttttcaggataaatcgttatccaccatgtccaagacctgacctagctttaggtgttggtcaccacaaagatgccgacgttattagtctattggctcaagatgatgttggaggattacaagttagtcgtagatcggacggtgtttggtttccgattagacccgtccctaatgctcttgtcatcaatataggcaattgtatggaggtaataatatccttgaacttatgtcatattcttttgttatacataacattaaaagattctttcataattaatgagtattactatatcataaatatgataatgtagatatggacgaatgacaagtattggagtgctgaacatagagtggtggtgaacacaacaagagagagatactcgataccattcttcttgttgccttcacacgatgtggaagtgaagccattagaagaacttgtgagtcctgaaaaccctccaaaatacaaaggctataaatggggtaagttctacgtcagtaggaatagaagcgattttcgaaaactggaaatcgaaaacatccaaatcgatgacttcaaagttaaaacttaatatactatgtatcggctttttttttgtttaccaagctatgatattaatcaaataatgtgtgtgggacttaatttgtgtcggaaagaataaatttgattacttttg

SEQ ID NO: 85148 - protein, 321 aa, Arabidopsis thaliana
  peptide (1)..(321): Ceres Seq. ID no. 12679045
  misc_feature (217)..(288): Pfam Name: 2OG-Fe(II) oxygenase superfamily Pfam Description: 2OG-Fe(II) oxygenase superfamily
  misc_feature (25)..(288): Homolog of NCBI NO: 18402081 NR Description: expressed protein; protein id: At3g19010.1,
  misc_feature (25)..(288): Homolog of NCBI NO: 21593702 NR Description: unknown [Arabidopsis thaliana]
  misc_feature (25)..(321): Homolog of NCBI NO: 30685157 NR Description: flavonol synthase family [Arabidopsis thaliana]
  misc_feature (25)..(288): Homolog of NCBI NO: 18402079 NR Description: expressed protein; protein id: At3g19000.1, by cDNA: 36985., supported by cDNA: gi_20466683 [Arabidopsis
  misc_feature (304)..(321): Homolog of NCBI NO: 18402079 NR Description: expressed protein; protein id: At3g19000.1, by cDNA: 36985., supported by cDNA: gi_20466683 [Arabidopsis
  misc_feature (66)..(273): Homolog of NCBI NO: 18103924 NR Description: putative oxylase protein [Pinus pinaster]
  misc_feature (51)..(289): Homolog of NCBI NO: 18402992 NR Description: expressed protein; protein id: At3g21420.1, by cDNA: 118190. [Arabidopsis thaliana]
  misc_feature (32)..(289): Homolog of NCBI NO: 34907194 NR Description: putative ethylene-forming enzyme [Oryza sativa
  misc_feature (25)..(289): Homolog of NCBI NO: 15229694 NR Description: putative leucoanthocyanidin dioxygenase; protein At3g11180.1 [Arabidopsis thaliana]
  misc_feature (304)..(321): Homolog of NCBI NO: 15229694 NR Description: putative leucoanthocyanidin dioxygenase; protein At3g11180.1 [Arabidopsis thaliana]
KVQTQHKSSSIDFFSSSKLFLRQAMEDLDPTYIQAPEHRSDSNFIPNQPEEIPVIDLSRLDDPEDVQNVISEIGDACEKWGFFQVLNHGVPSDARQRVEKTVKMFFDLPMEEKIKVKRDDVNPVGYHDGEHTKNVKDWKEVFDIYFKDPMVIPSTTDPEDEGLRLVYNKWPQSPSDFREACEVYARHAEKLAFKLLELISLSLGLPKERFHDYFKEQMSFFRINRYPPCPRPDLALGVGHHKDADVISLLAQDDVGGLQVSRRSDGVWFPIRPVPNALVINIGNCMEVIISLNLCHILLLYITLKDSFIINEYYYIINMIM

SEQ ID NO: 85149 - protein, 297 aa, Arabidopsis thaliana
  peptide (1)..(297): Ceres Seq. ID no. 12679046
  misc_feature (193)..(264): Pfam Name: 2OG-Fe(II) oxygenase superfamily Pfam Description: 2OG-Fe(II) oxygenase superfamily
  misc_feature (1)..(264): Homolog of NCBI NO: 18402081 NR Description: expressed protein; protein id: At3g19010.1,
  misc_feature (1)..(264): Homolog of NCBI NO: 21593702 NR Description: unknown [Arabidopsis thaliana]
  misc_feature (1)..(297): Homolog of NCBI NO: 30685157 NR Description: flavonol synthase family [Arabidopsis thaliana]
  misc_feature (1)..(264): Homolog of NCBI NO: 18402079 NR Description: expressed protein; protein id: At3g19000.1, by cDNA: 36985., supported by cDNA: gi_20466683 [Arabidopsis
  misc_feature (280)..(297): Homolog of NCBI NO: 18402079 NR Description: expressed protein; protein id: At3g19000.1, by cDNA: 36985., supported by cDNA: gi_20466683 [Arabidopsis
  misc_feature (42)..(249): Homolog of NCBI NO: 18103924 NR Description: putative oxylase protein [Pinus pinaster]
  misc_feature (27)..(265): Homolog of NCBI NO: 18402992 NR Description: expressed protein; protein id: At3g21420.1, by cDNA: 118190. [Arabidopsis thaliana]
  misc_feature (8)..(265): Homolog of NCBI NO: 34907194 NR Description: putative ethylene-forming enzyme [Oryza sativa
  misc_feature (1)..(265): Homolog of NCBI NO: 15229694 NR Description: putative leucoanthocyanidin dioxygenase; protein At3g11180.1 [Arabidopsis thaliana]
  misc_feature (280)..(297): Homolog of NCBI NO: 15229694 NR Description: putative leucoanthocyanidin dioxygenase; protein At3g11180.1 [Arabidopsis thaliana]
MEDLDPTYIQAPEHRSDSNFIPNQPEEIPVIDLSRLDDPEDVQNVISEIGDACEKWGFFQVLNHGVPSDARQRVEKTVKMFFDLPMEEKIKVKRDDVNPVGYHDGEHTKNVKDWKEVFDIYFKDPMVIPSTTDPEDEGLRLVYNKWPQSPSDFREACEVYARHAEKLAFKLLELISLSLGLPKERFHDYFKEQMSFFRINRYPPCPRPDLALGVGHHKDADVISLLAQDDVGGLQVSRRSDGVWFPIRPVPNALVINIGNCMEVIISLNLCHILLLYITLKDSFIINEYYYIINMIM

SEQ ID NO: 85150 - protein, 218 aa, Arabidopsis thaliana
  peptide (1)..(218): Ceres Seq. ID no. 12679047
  misc_feature (114)..(185): Pfam Name: 2OG-Fe(II) oxygenase superfamily Pfam Description: 2OG-Fe(II) oxygenase superfamily
  misc_feature (1)..(185): Homolog of NCBI NO: 18402081 NR Description: expressed protein; protein id: At3g19010.1,
  misc_feature (1)..(185): Homolog of NCBI NO: 21593702 NR Description: unknown [Arabidopsis thaliana]
  misc_feature (1)..(218): Homolog of NCBI NO: 30685157 NR Description: flavonol synthase family [Arabidopsis thaliana]
  misc_feature (1)..(185): Homolog of NCBI NO: 18402079 NR Description: expressed protein; protein id: At3g19000.1, by cDNA: 36985., supported by cDNA: gi_20466683 [Arabidopsis
  misc_feature (201)..(218): Homolog of NCBI NO: 18402079 NR Description: expressed protein; protein id: At3g19000.1, by cDNA: 36985., supported by cDNA: gi_20466683 [Arabidopsis
  misc_feature (1)..(170): Homolog of NCBI NO: 18103924 NR Description: putative oxylase protein [Pinus pinaster]
  misc_feature (1)..(186): Homolog of NCBI NO: 18402992 NR Description: expressed protein; protein id: At3g21420.1, by cDNA: 118190. [Arabidopsis thaliana]
  misc_feature (1)..(186): Homolog of NCBI NO: 34907194 NR Description: putative ethylene-forming enzyme [Oryza sativa
  misc_feature (1)..(186): Homolog of NCBI NO: 15229694 NR Description: putative leucoanthocyanidin dioxygenase; protein At3g11180.1 [Arabidopsis thaliana]
  misc_feature (201)..(218): Homolog of NCBI NO: 15229694 NR Description: putative leucoanthocyanidin dioxygenase; protein At3g11180.1 [Arabidopsis thaliana]
MFFDLPMEEKIKVKRDDVNPVGYHDGEHTKNVKDWKEVFDIYFKDPMVIPSTTDPEDEGLRLVYNKWPQSPSDFREACEVYARHAEKLAFKLLELISLSLGLPKERFHDYFKEQMSFFRINRYPPCPRPDLALGVGHHKDADVISLLAQDDVGGLQVSRRSDGVWFPIRPVPNALVINIGNCMEVIISLNLCHILLLYITLKDSFIINEYYYIINMIM

SEQ ID NO: 85151 - DNA, 1713 bp, Arabidopsis thaliana
  misc_feature (1)..(1713): Ceres Seq. ID no. 12679064
  misc_feature: MA Experiment ID: 20000171 Result: Down-regulated in Transcription
  misc_feature: MA Experiment 20000171 PARAMETER Experiment Name: At_42deg_Heat_P Parameter: Age (day) Value: 14
  misc_feature: MA Experiment 20000171 PARAMETER Experiment Name: At_42deg_Heat_P Parameter: Organism Value: A. thaliana
  misc_feature: MA Experiment 20000171 PARAMETER Experiment Name: At_42deg_Heat_P Parameter: Plant Line Value: WS
  misc_feature: MA Experiment 20000171 PARAMETER Experiment Name: At_42deg_Heat_P Parameter: Temperature (deg C) Value: 42 vs. 22
  misc_feature: MA Experiment 20000171 PARAMETER Experiment Name: At_42deg_Heat_P Parameter: Timepoint (hr) Value: 1
  misc_feature: MA Experiment 20000171 PARAMETER Experiment Name: At_42deg_Heat_P Parameter: Tissue Value: Aerial
  misc_feature: MA Experiment ID: 20000173 Result: Down-regulated in Transcription
  misc_feature: MA Experiment 20000173 PARAMETER Experiment Name: At_42deg_Heat_P Parameter: Age (day) Value: 14
  misc_feature: MA Experiment 20000173 PARAMETER Experiment Name: At_42deg_Heat_P Parameter: Organism Value: A. thaliana
  misc_feature: MA Experiment 20000173 PARAMETER Experiment Name: At_42deg_Heat_P Parameter: Plant Line Value: WS
  misc_feature: MA Experiment 20000173 PARAMETER Experiment Name: At_42deg_Heat_P Parameter: Temperature (deg C) Value: 42 vs. 22
  misc_feature: MA Experiment 20000173 PARAMETER Experiment Name: At_42deg_Heat_P Parameter: Timepoint (hr) Value: 6
  misc_feature: MA Experiment 20000173 PARAMETER Experiment Name: At_42deg_Heat_P Parameter: Tissue Value: Aerial
  misc_feature: MA Experiment ID: 20000180 Result: Up-regulated in Transcription
  misc_feature: MA Experiment 20000180 PARAMETER Experiment Name: At_Germinating_Seeds_P Parameter: Age (hr) Value: 24 vs. 0
  misc_feature: MA Experiment 20000180 PARAMETER Experiment Name: At_Germinating_Seeds_P Parameter: Tissue Value: Germinating Seeds
  misc_feature: MA Experiment ID: 20000182 Result: Down-regulated in Transcription
  misc_feature: MA Experiment 20000182 PARAMETER Experiment Name: At_2mM_SA_P Parameter: Age (day) Value: 14
  misc_feature: MA Experiment 20000182 PARAMETER Experiment Name: At_2mM_SA_P Parameter: Organism Value: A. thaliana
  misc_feature: MA Experiment 20000182 PARAMETER Experiment Name: At_2mM_SA_P Parameter: Plant Line Value: WS
  misc_feature: MA Experiment 20000182 PARAMETER Experiment Name: At_2mM_SA_P Parameter: Timepoint (hr) Value: 6
  misc_feature: MA Experiment 20000182 PARAMETER Experiment Name: At_2mM_SA_P Parameter: Tissue Value: Aerial
  misc_feature: MA Experiment 20000182 PARAMETER Experiment Name: At_2mM_SA_P Parameter: Treatment Value: 2mM SA vs. No Treatment
  misc_feature: MA Experiment ID: 20000184 Result: Up-regulated in Transcription
  misc_feature: MA Experiment 20000184 PARAMETER Experiment Name: At_Shoots__P Parameter: Age (day) Value: 7
  misc_feature: MA Experiment 20000184 PARAMETER Experiment Name: At_Shoots__P Parameter: Tissue Value: Shoots vs. Whole Plant
  misc_feature: MA Experiment ID: 20000185 Result: Up-regulated in Transcription
  misc_feature: MA Experiment 20000185 PARAMETER Experiment Name: At_Roots__P Parameter: Age (day) Value: 7 vs. 21
  misc_feature: MA Experiment 20000185 PARAMETER Experiment Name: At_Roots__P Parameter: Organism Value: A. thaliana
  misc_feature: MA Experiment 20000185 PARAMETER Experiment Name: At_Roots__P Parameter: Tissue Value: Roots vs. Whole Plant
  misc_feature: MA Experiment ID: 20000227 Result: Down-regulated in Transcription
  misc_feature: MA Experiment 20000227 PARAMETER Experiment Name: At_Root-Tips-vs-Tops_P Parameter: Tissue Value: Root Tips vs. Root Tops
  misc_feature: MA Experiment ID: 20000437 Result: Down-regulated in Transcription
  misc_feature: MA Experiment 20000437 PARAMETER Experiment Name: At_Drought_P Parameter: Age (day) Value: 8
  misc_feature: MA Experiment 20000437 PARAMETER Experiment Name: At_Drought_P Parameter: Organism Value: A. thaliana
  misc_feature: MA Experiment 20000437 PARAMETER Experiment Name: At_Drought_P Parameter: Plant Line Value: WS
  misc_feature: MA Experiment 20000437 PARAMETER Experiment Name: At_Drought_P Parameter: Timepoint (hr) Value: 24
  misc_feature: MA Experiment 20000437 PARAMETER Experiment Name: At_Drought_P Parameter: Tissue Value: Whole Plant
  misc_feature: MA Experiment 20000437 PARAMETER Experiment Name: At_Drought_P Parameter: Treatment Value: Drought vs. No Drought
  misc_feature: MA Experiment ID: 20000439 Result: Up-regulated in Transcription
  misc_feature: MA Experiment 20000439 PARAMETER Experiment Name: At_Roots__P Parameter: Age (day) Value: 14 vs. 21
  misc_feature: MA Experiment 20000439 PARAMETER Experiment Name: At_Roots__P Parameter: Organism Value: A. thaliana
  misc_feature: MA Experiment 20000439 PARAMETER Experiment Name: At_Roots__P Parameter: Tissue Value: Roots vs. Whole Plant
  misc_feature: MA Experiment ID: 20000794 Result: Down-regulated in Transcription
  misc_feature: MA Experiment 20000794 PARAMETER Experiment Name: At_Petals_P Parameter: Age (day) Value: 23-25 days
  misc_feature: MA Experiment 20000794 PARAMETER Experiment Name: At_Petals_P Parameter: Plant Line Value: WS
  misc_feature: MA Experiment 20000794 PARAMETER Experiment Name: At_Petals_P Parameter: Tissue Value: Petals vs. Whole plant
  misc_feature: MA Experiment ID: 20001904 Result: Down-regulated in Transcription
  misc_feature: MA Experiment 20001904 PARAMETER Experiment Name: At_Drought_Reproduction_P Parameter: Age (day) Value: 37
  misc_feature: MA Experiment 20001904 PARAMETER Experiment Name: At_Drought_Reproduction_P Parameter: Organism Value: A. thaliana
  misc_feature: MA Experiment 20001904 PARAMETER Experiment Name: At_Drought_Reproduction_P Parameter: Plant Line Value: WS
  misc_feature: MA Experiment 20001904 PARAMETER Experiment Name: At_Drought_Reproduction_P Parameter: Timepoint (day) Value: 7
  misc_feature: MA Experiment 20001904 PARAMETER Experiment Name: At_Drought_Reproduction_P Parameter: Tissue Value: Rosettes
  misc_feature: MA Experiment 20001904 PARAMETER Experiment Name: At_Drought_Reproduction_P Parameter: Treatment Value: Drought vs. No Drought
  misc_feature: MA Experiment ID: 20001911 Result: Down-regulated in Transcription
  misc_feature: MA Experiment 20001911 PARAMETER Experiment Name: At_Drought_Reproduction_P Parameter: Age (day) Value: 40
  misc_feature: MA Experiment 20001911 PARAMETER Experiment Name: At_Drought_Reproduction_P Parameter: Organism Value: A. thaliana
  misc_feature: MA Experiment 20001911 PARAMETER Experiment Name: At_Drought_Reproduction_P Parameter: Plant Line Value: WS
  misc_feature: MA Experiment 20001911 PARAMETER Experiment Name: At_Drought_Reproduction_P Parameter: Timepoint (day) Value: 10
  misc_feature: MA Experiment 20001911 PARAMETER Experiment Name: At_Drought_Reproduction_P Parameter: Tissue Value: Flowers
  misc_feature: MA Experiment 20001911 PARAMETER Experiment Name: At_Drought_Reproduction_P Parameter: Treatment Value: Drought vs. No Drought
gagagaagcaagacaccaaaaacttagtctgacatcaaaacccaaaatccaagaagaaagaaagagagagtcttcacgctcacactggctttggctttggctctggcgttgtaaacaatgctcctccctctcttcttcttctttctccatctccatctccatctctcttcttcttcttcaatctccttccctgattttcaaatcatcgacgttttacaacctcctctcaccgtcactgcaactcttcccgatttcaacaacacccatttctccgatgaatccagttctaagtacactctccgtcttctccaccgcgacagattcccttcagtcacttaccgtaaccaccaccaccgtctccatgctcgtatgcgcagagacacagacagagtctccgccattctccgccgcatttctgggaaagttataccttcttccgattctagatacgaggttaacgattttgggtccgatattgtttccggtatggatcaaggaagtggtgagtatttcgtcagaatcggcgtcggaagtcctccgagagatcagtacatggtcattgattccggtagcgatatggtttgggttcaatgtcagccttgtaagctctgttacaaacaatccgacccggtttttgacccggctaaatccgggtcttacactggagtctcttgtggctcttccgtctgtgaccggattgaaaactccggttgtcactccggtgggtgccgttacgaggtcatgtacggagacgggtcttacacgaagggaacgttagctctcgaaacgctgacgtttgctaagacggtggttagaaacgttgcgatgggatgtggtcaccggaatagaggaatgtttattggagctgccggtttattgggtatcggaggcggttcaatgtcgtttgtgggtcaattaagcggtcaaaccggtggtgcgttcggttattgtttagtgagtcgtggcactgactcgaccggttcattggtattcgggcgggaagcgttgcccgttggtgcctcgtgggtcccgttggtccggaacccgcgggctccaagtttttactacgttgggctcaagggccttggagtaggaggcgtccggattccgttaccggatggtgtttttgacctgactgaaaccggtgacggtggtgtggttatggataccggaacagccgtcacaagacttcccacggcggcttacgtcgcttttcgagatggattcaagtcgcagacagcgaatttgccgcgggcttccggtgtatcgatattcgacacgtgttatgatctgtcagggtttgtttcggtacgagtcccgaccgtgtcgttctatttcacggaaggtccggttttgacattaccggcgaggaattttctgatgccggtggatgattcgggaacgtattgttttgcgtttgcggcgtctccgacgggtttgtcaataatagggaacatacaacaagaagggattcaagtatctttcgacggagccaatggctttgttggttttggccccaacgtttgctagcggttaagatagagaaattacgatttttgtttgctagtaagtaaaaagcttttgtctcaaaactatatatgtatttgtctctttttttctttcttattagtttggtttgagtttttaataaatctgattagtatagagagataacaaaaatgtatatgttttgaccaaatttgtcttttgatt

SEQ ID NO: 85152 - protein, 470 aa, Arabidopsis thaliana
  peptide (1)..(470): Ceres Seq. ID no. 12679065
  misc_feature (78)..(468): Pfam Name: Eukaryotic aspartyl protease Pfam Description: Eukaryotic aspartyl protease
  misc_feature (1)..(470): Homolog of NCBI NO: 28392860 NR Description: unknown protein [Arabidopsis thaliana]
  misc_feature (85)..(470): Homolog of NCBI NO: 15231010 NR Description: hypothetical protein, 5' partial; protein id:
  misc_feature (5)..(306): Homolog of NCBI NO: 38344196 NR Description: OSJNBa0064G10.12 [Oryza sativa (japonica
  misc_feature (312)..(470): Homolog of NCBI NO: 38344196 NR Description: OSJNBa0064G10.12 [Oryza sativa (japonica
  misc_feature (23)..(470): Homolog of NCBI NO: 19424106 NR Description: putative chloroplast nucleoid DNA-binding protein
  misc_feature (23)..(470): Homolog of NCBI NO: 15229656 NR Description: putative chloroplast nucleoid DNA-binding protein id: At3g18490.1 [Arabidopsis thaliana]
  misc_feature (53)..(470): Homolog of NCBI NO: 34895664 NR Description: nucleoid DNA-binding protein cnd41-like protein
  misc_feature (1)..(470): Homolog of NCBI NO: 15223368 NR Description: chloroplast nucleoid DNA binding protein, protein id: At1g01300.1, supported by cDNA: 7567. [Arabidopsis
  misc_feature (1)..(470): Homolog of NCBI NO: 21594980 NR Description: chloroplast nucleoid DNA binding protein,
  misc_feature (6)..(470): Homolog of NCBI NO: 15222611 NR Description: hypothetical protein; protein id: At1g25510.1, by cDNA: gi_20466515 [Arabidopsis thaliana]
MLLPLFFFFLHLHLHLSSSSSISFPDFQIIDVLQPPLTVTATLPDFNNTHFSDESSSKYTLRLLHRDRFPSVTYRNHHHRLHARMRRDTDRVSAILRRISGKVIPSSDSRYEVNDFGSDIVSGMDQGSGEYFVRIGVGSPPRDQYMVIDSGSDMVWVQCQPCKLCYKQSDPVFDPAKSGSYTGVSCGSSVCDRIENSGCHSGGCRYEVMYGDGSYTKGTLALETLTFAKTVVRNVAMGCGHRNRGMFIGAAGLLGIGGGSMSFVGQLSGQTGGAFGYCLVSRGTDSTGSLVFGREALPVGASWVPLVRNPRAPSFYYVGLKGLGVGGVRIPLPDGVFDLTETGDGGVVMDTGTAVTRLPTAAYVAFRDGFKSQTANLPRASGVSIFDTCYDLSGFVSVRVPTVSFYFTEGPVLTLPARNFLMPVDDSGTYCFAFAASPTGLSIIGNIQQEGIQVSFDGANGFVGFGPNVC

SEQ ID NO: 85153 - protein, 386 aa, Arabidopsis thaliana
  peptide (1)..(386): Ceres Seq. ID no. 12679066
  misc_feature (1)..(384): Pfam Name: Eukaryotic aspartyl protease Pfam Description: Eukaryotic aspartyl protease
  misc_feature (1)..(386): Homolog of NCBI NO: 28392860 NR Description: unknown protein [Arabidopsis thaliana]
  misc_feature (1)..(386): Homolog of NCBI NO: 15231010 NR Description: hypothetical protein, 5' partial; protein id:
  misc_feature (1)..(222): Homolog of NCBI NO: 38344196 NR Description: OSJNBa0064G10.12 [Oryza sativa (japonica
  misc_feature (228)..(386): Homolog of NCBI NO: 38344196 NR Description: OSJNBa0064G10.12 [Oryza sativa (japonica
  misc_feature (1)..(386): Homolog of NCBI NO: 19424106 NR Description: putative chloroplast nucleoid DNA-binding protein
  misc_feature (1)..(386): Homolog of NCBI NO: 15229656 NR Description: putative chloroplast nucleoid DNA-binding protein id: At3g18490.1 [Arabidopsis thaliana]
  misc_feature (1)..(386): Homolog of NCBI NO: 34895664 NR Description: nucleoid DNA-binding protein cnd41-like protein
  misc_feature (1)..(386): Homolog of NCBI NO: 15223368 NR Description: chloroplast nucleoid DNA binding protein, protein id: At1g01300.1, supported by cDNA: 7567. [Arabidopsis
  misc_feature (1)..(386): Homolog of NCBI NO: 21594980 NR Description: chloroplast nucleoid DNA binding protein,
  misc_feature (1)..(386): Homolog of NCBI NO: 15222611 NR Description: hypothetical protein; protein id: At1g25510.1, by cDNA: gi_20466515 [Arabidopsis thaliana]
MRRDTDRVSAILRRISGKVIPSSDSRYEVNDFGSDIVSGMDQGSGEYFVRIGVGSPPRDQYMVIDSGSDMVWVQCQPCKLCYKQSDPVFDPAKSGSYTGVSCGSSVCDRIENSGCHSGGCRYEVMYGDGSYTKGTLALETLTFAKTVVRNVAMGCGHRNRGMFIGAAGLLGIGGGSMSFVGQLSGQTGGAFGYCLVSRGTDSTGSLVFGREALPVGASWVPLVRNPRAPSFYYVGLKGLGVGGVRIPLPDGVFDLTETGDGGVVMDTGTAVTRLPTAAYVAFRDGFKSQTANLPRASGVSIFDTCYDLSGFVSVRVPTVSFYFTEGPVLTLPARNFLMPVDDSGTYCFAFAASPTGLSIIGNIQQEGIQVSFDGANGFVGFGPNVC

SEQ ID NO: 85154 - protein, 347 aa, Arabidopsis thaliana
  peptide (1)..(347): Ceres Seq. ID no. 12679067
  misc_feature (1)..(345): Pfam Name: Eukaryotic aspartyl protease Pfam Description: Eukaryotic aspartyl protease
  misc_feature (1)..(347): Homolog of NCBI NO: 28392860 NR Description: unknown protein [Arabidopsis thaliana]
  misc_feature (1)..(347): Homolog of NCBI NO: 15231010 NR Description: hypothetical protein, 5' partial; protein id:
  misc_feature (1)..(183): Homolog of NCBI NO: 38344196 NR Description: OSJNBa0064G10.12 [Oryza sativa (japonica
  misc_feature (189)..(347): Homolog of NCBI NO: 38344196 NR Description: OSJNBa0064G10.12 [Oryza sativa (japonica
  misc_feature (1)..(347): Homolog of NCBI NO: 19424106 NR Description: putative chloroplast nucleoid DNA-binding protein
  misc_feature (1)..(347): Homolog of NCBI NO: 15229656 NR Description: putative chloroplast nucleoid DNA-binding protein id: At3g18490.1 [Arabidopsis thaliana]
  misc_feature (1)..(347): Homolog of NCBI NO: 34895664 NR Description: nucleoid DNA-binding protein cnd41-like protein
  misc_feature (1)..(347): Homolog of NCBI NO: 15223368 NR Description: chloroplast nucleoid DNA binding protein, protein id: At1g01300.1, supported by cDNA: 7567. [Arabidopsis
  misc_feature (1)..(347): Homolog of NCBI NO: 21594980 NR Description: chloroplast nucleoid DNA binding protein,
  misc_feature (1)..(347): Homolog of NCBI NO: 15222611 NR Description: hypothetical protein; protein id: At1g25510.1, by cDNA: gi_20466515 [Arabidopsis thaliana]
MDQGSGEYFVRIGVGSPPRDQYMVIDSGSDMVWVQCQPCKLCYKQSDPVFDPAKSGSYTGVSCGSSVCDRIENSGCHSGGCRYEVMYGDGSYTKGTLALETLTFAKTVVRNVAMGCGHRNRGMFIGAAGLLGIGGGSMSFVGQLSGQTGGAFGYCLVSRGTDSTGSLVFGREALPVGASWVPLVRNPRAPSFYYVGLKGLGVGGVRIPLPDGVFDLTETGDGGVVMDTGTAVTRLPTAAYVAFRDGFKSQTANLPRASGVSIFDTCYDLSGFVSVRVPTVSFYFTEGPVLTLPARNFLMPVDDSGTYCFAFAASPTGLSIIGNIQQEGIQVSFDGANGFVGFGPNVC

SEQ ID NO: 85155 - DNA, 3738 bp, Arabidopsis thaliana
  misc_feature (1)..(3738): Ceres Seq. ID no. 12679127
  misc_feature: MA Experiment ID: 20000437 Result: Up-regulated in Transcription
  misc_feature: MA Experiment 20000437 PARAMETER Experiment Name: At_Drought_P Parameter: Age (day) Value: 8
  misc_feature: MA Experiment 20000437 PARAMETER Experiment Name: At_Drought_P Parameter: Organism Value: A. thaliana
  misc_feature: MA Experiment 20000437 PARAMETER Experiment Name: At_Drought_P Parameter: Plant Line Value: WS
  misc_feature: MA Experiment 20000437 PARAMETER Experiment Name: At_Drought_P Parameter: Timepoint (hr) Value: 24
  misc_feature: MA Experiment 20000437 PARAMETER Experiment Name: At_Drought_P Parameter: Tissue Value: Whole Plant
  misc_feature: MA Experiment 20000437 PARAMETER Experiment Name: At_Drought_P Parameter: Treatment Value: Drought vs. No Drought
  misc_feature: MA Experiment ID: 20001911 Result: Up-regulated in Transcription
  misc_feature: MA Experiment 20001911 PARAMETER Experiment Name: At_Drought_Reproduction_P Parameter: Age (day) Value: 40
  misc_feature: MA Experiment 20001911 PARAMETER Experiment Name: At_Drought_Reproduction_P Parameter: Organism Value: A. thaliana
  misc_feature: MA Experiment 20001911 PARAMETER Experiment Name: At_Drought_Reproduction_P Parameter: Plant Line Value: WS
  misc_feature: MA Experiment 20001911 PARAMETER Experiment Name: At_Drought_Reproduction_P Parameter: Timepoint (day) Value: 10
  misc_feature: MA Experiment 20001911 PARAMETER Experiment Name: At_Drought_Reproduction_P Parameter: Tissue Value: Flowers
  misc_feature: MA Experiment 20001911 PARAMETER Experiment Name: At_Drought_Reproduction_P Parameter: Treatment Value: Drought vs. No Drought
atgaaggctttgagattgattcagcctcatctcttgaagacaggtagtcttagaactgatttgctctgtaccatttcgagtttcttttctagctgcgaacgagacttttcaagtattagcaatgggaatgtctgtttcagagagagattgagaagtggtattgttgatattaagaaagatgatgctattgctctgttccaagaaatgattaggtctcgtcctcttcctagtcttgttgatttcagtagattctttagtgccattgccagaacaaaacagttcaatctcgtgttagatttctgcaagcaactggaattgaatgggattgctcataacatctacactttgaatatcatgatcaactgcttttgccggtgttgtaaaacttgttttgcttattctgttttgggaaaagtaatgaagcttgggtatgagcctgacacaaccacgtttaacactctgatcaaaggactctttcttgagggtaaagtgtctgaagctgtggttttagtcgataggatggtggaaaacggatgtcaacctgatgtggttacttataattcgattgtaaatgggatatgtagatcaggagatacttctttggccttggatttgctcagaaagatggaagaaagaaatgttaaggctgatgtgtttacttacagtacaatcattgatagtctttgtagagatggttgcatagacgctgcaattagccttttcaaggaaatggagacgaaagggattaaatctagtgttgttacgtataattctcttgtgagaggtctttgtaaagccggtaaatggaatgatggggcactgttgttgaaggatatggtgagtagggaaatcgtccctaatgtcatcactttcaatgtattacttgatgtttttgtcaaagaagggaagcttcaggaggctaatgaattgtacaaagagatgatcacaagaggtatatcacctaatattattacttataataccttgatggatgggtattgtatgcagaaccgtcttagtgaggccaacaatatgttggatcttatggttaggaataagtgcagtcctgatatcgtgacttttacaagtctcatcaaaggatattgtatggtgaaaagagttgacgatggtatgaaggtcttccgcaatatttctaagagaggcttggttgccaatgcagttacttatagcattcttgtccaagggttttgtcaatccgggaaaataaagctcgcagaggaacttttccaagaaatggtttcacacggtgttcttcctgatgttatgacgtatggtattttgcttgatggcttgtgtgacaatgggaagcttgaaaaggcattggaaatttttgaggatttacaaaagagtaagatggatcttggtattgttatgtatacaaccatcatcgaggggatgtgcaagggtggaaaagtggaagatgcctggaatttattctgtagcctaccttgtaaaggagtgaagcctaatgttatgacatacaccgtgatgatttcaggattatgtaagaaagggtcactgtctgaagcaaacatcttgcttagaaaaatggaggaagatgggaatgcgccaaatgattgtacatacaacacactaatccgggcacatctccgagatggtgacttaactgcatcagctaaacttattgaagaaatgaagagttgtgggttctcagcagatgcttccagtattaagatggttatcgatatgttattgagtgcaatgaaaaggttaacactcagatattgtcttagcaaaggttcaaagagccgacaagatctcctggagttaagcggttcagagaaaatcaggcttagtagcttaacctttgttaaaatgtttccctgcaacactattactacatctctaaacgtcaacacaatcgaagctcgtggtatgaattccgcagaactgaatagagatctcaggaagctaaggagatcatcggttctaaagaagttcaagaacagggatgttagggtacttgtgactaacgagctcttgacttggggtttggaagatgcggaatgtgatctcatggtcgatcttgagcttccaacagatgctgttcactatgctcatcgagctggaagaatgagaaggccgggaaggaaaatgacggtggttacagccgaagaactacacaaggagatgattcaacgaggtatagctcctaatactattacatatagttccttgatagatgggttttgcaaggagaatcgcctagatgaggccaaccagatgttggatctgatggttaccaaaggtgattctgatattcgttatctgttggctggtttgatgaggaagaagcggaaaggtagtgaaactgagggttgggagaatttaccagatgatttatcatgttcaactgcatcacgatcatccaacttcaggtcgcacttttcactagagggttatgctagacttaagaaacggtgtaaggagactgaagctgtcgagtctgttggttcctttaagagacgaattgctggtgttgctactgcacctccttgtggtgcatcatctttggtttcgtcaggaagaggtttgaagaggaagatagggtgcatagatgtttccacacagactggtaggaagaataaaatagacgatgactatgtttttggtcgaaatattgggaaagggaaatttgggtcagtcaggatctgtaagtctaggaagaatgggactgagtttgcttgtaaaactctgaagaagggggaggagactgttcaccgggaagttgagataatgcaacatttgtctggtcatcctcgggttgtcacattgcatgctgtgtatgaagagtcagactgtttccatcttgtgatggagctgtgttcagggggacgtttgattgatcagatggtaaaggtgggcaggtattctgagcaacgagcagctaatatattcaaggaccttatgctagtgatcaattattgccatgagatgggagttgtgcatagagatataaaacctgagaatattctcctaacagctgctgggaagatacagctggctgattttggcctcgccatgagaattgcaaaaggtcaaacactgtcaggattggcaggaagtcctgcttatgttgcacctgaagttctttccgaaaattattcagagaaggttgacgtttggagtgcaggtgtcctcttatacgctctcttgtctggtgtactcccttttaagggagactcattggatgctattttcgaagcaatcaaaaacgtgaagcttgatttcaacacgggagtgtgggagtctgtgtccaaacctgcccgtgatctcttggcgagaatgctaacaagggaagaatctgccagaatcacagcggatgaagtgctaaggcatccatggatactcttttacacagaccggacactcaagaccatgtgtatcaagtcgaagcacaagagtcaagcaggatcttctacgtgtctccagaatcgcagtcccacagagaaaactgacctaaacagagctgacagggaaaagaagataccatctgattcaccgactgattcattctccaacacagaggaggaagaagatgagagcggtgtggtcgatgtgcttgttgttgcaatcgccaacgtgaggatctcagaaccaaagagaagcagagtctgtagtcccaccaataaccccattgagcagcaacactcttctaacttgacctcgactagtacactctgtcgagctttctga

SEQ ID NO: 85156 - protein, 1245 aa, Arabidopsis thaliana
  peptide (1)..(1245): Ceres Seq. ID no. 12679128
  misc_feature (882)..(1130): Pfam Name: Protein kinase domain Pfam Description: Protein kinase domain
  misc_feature (776)..(1245): Homolog of NCBI NO: 15222045 NR Description: calcium dependent protein kinase, putative; id: At1g12680.1, supported by cDNA: gi_17065355 [Arabidopsis >gi|17065356|gb|AAL32832.1| Unknown protein [Arabidopsis
  misc_feature (108)..(578): Homolog of NCBI NO: 11994279 NR Description: gb|AAD43616.1~gene_id:F16J14.3~strong similarity
  misc_feature (108)..(578): Homolog of NCBI NO: 15228763 NR Description: hypothetical protein; protein id: At3g22470.1
  misc_feature (49)..(583): Homolog of NCBI NO: 9502388 NR Description: T12C24.15 [Arabidopsis thaliana]
  misc_feature (714)..(764): Homolog of NCBI NO: 9502388 NR Description: T12C24.15 [Arabidopsis thaliana]
  misc_feature (49)..(578): Homolog of NCBI NO: 15221282 NR Description: hypothetical protein; protein id: At1g12300.1
  misc_feature (49)..(578): Homolog of NCBI NO: 25402719 NR Description: protein F5O11.4 [imported] - Arabidopsis thaliana
  misc_feature (56)..(578): Homolog of NCBI NO: 15221740 NR Description: unknown protein; protein id: At1g63330.1
  misc_feature (49)..(580): Homolog of NCBI NO: 15220990 NR Description: unknown protein; protein id: At1g12770.1
  misc_feature (49)..(578): Homolog of NCBI NO: 6630464 NR Description: F23N19.4 [Arabidopsis thaliana]
MKALRLIQPHLLKTGSLRTDLLCTISSFFSSCERDFSSISNGNVCFRERLRSGIVDIKKDDAIALFQEMIRSRPLPSLVDFSRFFSAIARTKQFNLVLDFCKQLELNGIAHNIYTLNIMINCFCRCCKTCFAYSVLGKVMKLGYEPDTTTFNTLIKGLFLEGKVSEAVVLVDRMVENGCQPDVVTYNSIVNGICRSGDTSLALDLLRKMEERNVKADVFTYSTIIDSLCRDGCIDAAISLFKEMETKGIKSSVVTYNSLVRGLCKAGKWNDGALLLKDMVSREIVPNVITFNVLLDVFVKEGKLQEANELYKEMITRGISPNIITYNTLMDGYCMQNRLSEANNMLDLMVRNKCSPDIVTFTSLIKGYCMVKRVDDGMKVFRNISKRGLVANAVTYSILVQGFCQSGKIKLAEELFQEMVSHGVLPDVMTYGILLDGLCDNGKLEKALEIFEDLQKSKMDLGIVMYTTIIEGMCKGGKVEDAWNLFCSLPCKGVKPNVMTYTVMISGLCKKGSLSEANILLRKMEEDGNAPNDCTYNTLIRAHLRDGDLTASAKLIEEMKSCGFSADASSIKMVIDMLLSAMKRLTLRYCLSKGSKSRQDLLELSGSEKIRLSSLTFVKMFPCNTITTSLNVNTIEARGMNSAELNRDLRKLRRSSVLKKFKNRDVRVLVTNELLTWGLEDAECDLMVDLELPTDAVHYAHRAGRMRRPGRKMTVVTAEELHKEMIQRGIAPNTITYSSLIDGFCKENRLDEANQMLDLMVTKGDSDIRYLLAGLMRKKRKGSETEGWENLPDDLSCSTASRSSNFRSHFSLEGYARLKKRCKETEAVESVGSFKRRIAGVATAPPCGASSLVSSGRGLKRKIGCIDVSTQTGRKNKIDDDYVFGRNIGKGKFGSVRICKSRKNGTEFACKTLKKGEETVHREVEIMQHLSGHPRVVTLHAVYEESDCFHLVMELCSGGRLIDQMVKVGRYSEQRAANIFKDLMLVINYCHEMGVVHRDIKPENILLTAAGKIQLADFGLAMRIAKGQTLSGLAGSPAYVAPEVLSENYSEKVDVWSAGVLLYALLSGVLPFKGDSLDAIFEAIKNVKLDFNTGVWESVSKPARDLLARMLTREESARITADEVLRHPWILFYTDRTLKTMCIKSKHKSQAGSSTCLQNRSPTEKTDLNRADREKKIPSDSPTDSFSNTEEEEDESGVVDVLVVAIANVRISEPKRSRVCSPTNNPIEQQHSSNLTSTSTLCRAF

SEQ ID NO: 85157 - protein, 1177 aa, Arabidopsis thaliana
  peptide (1)..(1177): Ceres Seq. ID no. 12679129
  misc_feature (814)..(1062): Pfam Name: Protein kinase domain Pfam Description: Protein kinase domain
  misc_feature (708)..(1177): Homolog of NCBI NO: 15222045 NR Description: calcium dependent protein kinase, putative; id: At1g12680.1, supported by cDNA: gi_17065355 [Arabidopsis >gi|17065356|gb|AAL32832.1| Unknown protein [Arabidopsis
  misc_feature (40)..(510): Homolog of NCBI NO: 11994279 NR Description: gb|AAD43616.1~gene_id:F16J14.3~strong similarity
  misc_feature (40)..(510): Homolog of NCBI NO: 15228763 NR Description: hypothetical protein; protein id: At3g22470.1
  misc_feature (1)..(515): Homolog of NCBI NO: 9502388 NR Description: T12C24.15 [Arabidopsis thaliana]
  misc_feature (646)..(696): Homolog of NCBI NO: 9502388 NR Description: T12C24.15 [Arabidopsis thaliana]
  misc_feature (1)..(510): Homolog of NCBI NO: 15221282 NR Description: hypothetical protein; protein id: At1g12300.1
  misc_feature (1)..(510): Homolog of NCBI NO: 25402719 NR Description: protein F5O11.4 [imported] - Arabidopsis thaliana
  misc_feature (1)..(510): Homolog of NCBI NO: 15221740 NR Description: unknown protein; protein id: At1g63330.1
  misc_feature (1)..(512): Homolog of NCBI NO: 15220990 NR Description: unknown protein; protein id: At1g12770.1
  misc_feature (1)..(510): Homolog of NCBI NO: 6630464 NR Description: F23N19.4 [Arabidopsis thaliana]
MIRSRPLPSLVDFSRFFSAIARTKQFNLVLDFCKQLELNGIAHNIYTLNIMINCFCRCCKTCFAYSVLGKVMKLGYEPDTTTFNTLIKGLFLEGKVSEAVVLVDRMVENGCQPDVVTYNSIVNGICRSGDTSLALDLLRKMEERNVKADVFTYSTIIDSLCRDGCIDAAISLFKEMETKGIKSSVVTYNSLVRGLCKAGKWNDGALLLKDMVSREIVPNVITFNVLLDVFVKEGKLQEANELYKEMITRGISPNIITYNTLMDGYCMQNRLSEANNMLDLMVRNKCSPDIVTFTSLIKGYCMVKRVDDGMKVFRNISKRGLVANAVTYSILVQGFCQSGKIKLAEELFQEMVSHGVLPDVMTYGILLDGLCDNGKLEKALEIFEDLQKSKMDLGIVMYTTIIEGMCKGGKVEDAWNLFCSLPCKGVKPNVMTYTVMISGLCKKGSLSEANILLRKMEEDGNAPNDCTYNTLIRAHLRDGDLTASAKLIEEMKSCGFSADASSIKMVIDMLLSAMKRLTLRYCLSKGSKSRQDLLELSGSEKIRLSSLTFVKMFPCNTITTSLNVNTIEARGMNSAELNRDLRKLRRSSVLKKFKNRDVRVLVTNELLTWGLEDAECDLMVDLELPTDAVHYAHRAGRMRRPGRKMTVVTAEELHKEMIQRGIAPNTITYSSLIDGFCKENRLDEANQMLDLMVTKGDSDIRYLLAGLMRKKRKGSETEGWENLPDDLSCSTASRSSNFRSHFSLEGYARLKKRCKETEAVESVGSFKRRIAGVATAPPCGASSLVSSGRGLKRKIGCIDVSTQTGRKNKIDDDYVFGRNIGKGKFGSVRICKSRKNGTEFACKTLKKGEETVHREVEIMQHLSGHPRVVTLHAVYEESDCFHLVMELCSGGRLIDQMVKVGRYSEQRAANIFKDLMLVINYCHEMGVVHRDIKPENILLTAAGKIQLADFGLAMRIAKGQTLSGLAGSPAYVAPEVLSENYSEKVDVWSAGVLLYALLSGVLPFKGDSLDAIFEAIKNVKLDFNTGVWESVSKPARDLLARMLTREESARITADEVLRHPWILFYTDRTLKTMCIKSKHKSQAGSSTCLQNRSPTEKTDLNRADREKKIPSDSPTDSFSNTEEEEDESGVVDVLVVAIANVRISEPKRSRVCSPTNNPIEQQHSSNLTSTSTLCRAF

SEQ ID NO: 85158 - protein, 1127 aa, Arabidopsis thaliana
  peptide (1)..(1127): Ceres Seq. ID no. 12679130
  misc_feature (764)..(1012): Pfam Name: Protein kinase domain Pfam Description: Protein kinase domain
  misc_feature (658)..(1127): Homolog of NCBI NO: 15222045 NR Description: calcium dependent protein kinase, putative; id: At1g12680.1, supported by cDNA: gi_17065355 [Arabidopsis >gi|17065356|gb|AAL32832.1| Unknown protein [Arabidopsis
  misc_feature (1)..(460): Homolog of NCBI NO: 11994279 NR Description: gb|AAD43616.1~gene_id:F16J14.3~strong similarity
  misc_feature (1)..(460): Homolog of NCBI NO: 15228763 NR Description: hypothetical protein; protein id: At3g22470.1
  misc_feature (1)..(465): Homolog of NCBI NO: 9502388 NR Description: T12C24.15 [Arabidopsis thaliana]
  misc_feature (596)..(646): Homolog of NCBI NO: 9502388 NR Description: T12C24.15 [Arabidopsis thaliana]
  misc_feature (1)..(460): Homolog of NCBI NO: 15221282 NR Description: hypothetical protein; protein id: At1g12300.1
  misc_feature (1)..(460): Homolog of NCBI NO: 25402719 NR Description: protein F5O11.4 [imported] - Arabidopsis thaliana
  misc_feature (1)..(460): Homolog of NCBI NO: 15221740 NR Description: unknown protein; protein id: At1g63330.1
  misc_feature (1)..(462): Homolog of NCBI NO: 15220990 NR Description: unknown protein; protein id: At1g12770.1
  misc_feature (1)..(460): Homolog of NCBI NO: 6630464 NR Description: F23N19.4 [Arabidopsis thaliana]
MINCFCRCCKTCFAYSVLGKVMKLGYEPDTTTFNTLIKGLFLEGKVSEAVVLVDRMVENGCQPDVVTYNSIVNGICRSGDTSLALDLLRKMEERNVKADVFTYSTIIDSLCRDGCIDAAISLFKEMETKGIKSSVVTYNSLVRGLCKAGKWNDGALLLKDMVSREIVPNVITFNVLLDVFVKEGKLQEANELYKEMITRGISPNIITYNTLMDGYCMQNRLSEANNMLDLMVRNKCSPDIVTFTSLIKGYCMVKRVDDGMKVFRNISKRGLVANAVTYSILVQGFCQSGKIKLAEELFQEMVSHGVLPDVMTYGILLDGLCDNGKLEKALEIFEDLQKSKMDLGIVMYTTIIEGMCKGGKVEDAWNLFCSLPCKGVKPNVMTYTVMISGLCKKGSLSEANILLRKMEEDGNAPNDCTYNTLIRAHLRDGDLTASAKLIEEMKSCGFSADASSIKMVIDMLLSAMKRLTLRYCLSKGSKSRQDLLELSGSEKIRLSSLTFVKMFPCNTITTSLNVNTIEARGMNSAELNRDLRKLRRSSVLKKFKNRDVRVLVTNELLTWGLEDAECDLMVDLELPTDAVHYAHRAGRMRRPGRKMTVVTAEELHKEMIQRGIAPNTITYSSLIDGFCKENRLDEANQMLDLMVTKGDSDIRYLLAGLMRKKRKGSETEGWENLPDDLSCSTASRSSNFRSHFSLEGYARLKKRCKETEAVESVGSFKRRIAGVATAPPCGASSLVSSGRGLKRKIGCIDVSTQTGRKNKIDDDYVFGRNIGKGKFGSVRICKSRKNGTEFACKTLKKGEETVHREVEIMQHLSGHPRVVTLHAVYEESDCFHLVMELCSGGRLIDQMVKVGRYSEQRAANIFKDLMLVINYCHEMGVVHRDIKPENILLTAAGKIQLADFGLAMRIAKGQTLSGLAGSPAYVAPEVLSENYSEKVDVWSAGVLLYALLSGVLPFKGDSLDAIFEAIKNVKLDFNTGVWESVSKPARDLLARMLTREESARITADEVLRHPWILFYTDRTLKTMCIKSKHKSQAGSSTCLQNRSPTEKTDLNRADREKKIPSDSPTDSFSNTEEEEDESGVVDVLVVAIANVRISEPKRSRVCSPTNNPIEQQHSSNLTSTSTLCRAF

SEQ ID NO: 85159 - DNA, 1419 bp, Arabidopsis thaliana
  misc_feature (1)..(1419): Ceres Seq. ID no. 12679137
  misc_feature: MA Experiment ID: 20000180 Result: Up-regulated in Transcription
  misc_feature: MA Experiment 20000180 PARAMETER Experiment Name: At_Germinating_Seeds_P Parameter: Age (hr) Value: 24 vs. 0
  misc_feature: MA Experiment 20000180 PARAMETER Experiment Name: At_Germinating_Seeds_P Parameter: Tissue Value: Germinating Seeds
  misc_feature: MA Experiment ID: 20000436 Result: Down-regulated in Transcription
  misc_feature: MA Experiment 20000436 PARAMETER Experiment Name: At_Drought_P Parameter: Age (day) Value: 7
  misc_feature: MA Experiment 20000436 PARAMETER Experiment Name: At_Drought_P Parameter: Organism Value: A. thaliana
  misc_feature: MA Experiment 20000436 PARAMETER Experiment Name: At_Drought_P Parameter: Plant Line Value: WS
  misc_feature: MA Experiment 20000436 PARAMETER Experiment Name: At_Drought_P Parameter: Timepoint (hr) Value: 12
  misc_feature: MA Experiment 20000436 PARAMETER Experiment Name: At_Drought_P Parameter: Tissue Value: Whole Plant
  misc_feature: MA Experiment 20000436 PARAMETER Experiment Name: At_Drought_P Parameter: Treatment Value: Drought vs. No Drought
  misc_feature: MA Experiment ID: 20000437 Result: Down-regulated in Transcription
  misc_feature: MA Experiment 20000437 PARAMETER Experiment Name: At_Drought_P Parameter: Age (day) Value: 8
  misc_feature: MA Experiment 20000437 PARAMETER Experiment Name: At_Drought_P Parameter: Organism Value: A. thaliana
  misc_feature: MA Experiment 20000437 PARAMETER Experiment Name: At_Drought_P Parameter: Plant Line Value: WS
  misc_feature: MA Experiment 20000437 PARAMETER Experiment Name: At_Drought_P Parameter: Timepoint (hr) Value: 24
  misc_feature: MA Experiment 20000437 PARAMETER Experiment Name: At_Drought_P Parameter: Tissue Value: Whole Plant
  misc_feature: MA Experiment 20000437 PARAMETER Experiment Name: At_Drought_P Parameter: Treatment Value: Drought vs. No Drought
  misc_feature: MA Experiment ID: 20000439 Result: Up-regulated in Transcription
  misc_feature: MA Experiment 20000439 PARAMETER Experiment Name: At_Roots__P Parameter: Age (day) Value: 14 vs. 21
  misc_feature: MA Experiment 20000439 PARAMETER Experiment Name: At_Roots__P Parameter: Organism Value: A. thaliana
  misc_feature: MA Experiment 20000439 PARAMETER Experiment Name: At_Roots__P Parameter: Tissue Value: Roots vs. Whole Plant
  misc_feature: MA Experiment ID: 20000527 Result: Up-regulated in Transcription
  misc_feature: MA Experiment 20000527 PARAMETER Experiment Name: At_10percent_PEG_P Parameter: Age (day) Value: 20
  misc_feature: MA Experiment 20000527 PARAMETER Experiment Name: At_10percent_PEG_P Parameter: Organism Value: A. thaliana
  misc_feature: MA Experiment 20000527 PARAMETER Experiment Name: At_10percent_PEG_P Parameter: Plant Line Value: WS
  misc_feature: MA Experiment 20000527 PARAMETER Experiment Name: At_10percent_PEG_P Parameter: Timepoint (day) Value: 20
  misc_feature: MA Experiment 20000527 PARAMETER Experiment Name: At_10percent_PEG_P Parameter: Tissue Value: Whole Plant
  misc_feature: MA Experiment 20000527 PARAMETER Experiment Name: At_10percent_PEG_P Parameter: Treatment Value: 10percent PEG vs. No Treatment
  misc_feature: MA Experiment ID: 20001450 Result: Down-regulated in Transcription
  misc_feature: MA Experiment 20001450 PARAMETER Experiment Name: At_Far-red-induction_P Parameter: Age (day) Value: 7
  misc_feature: MA Experiment 20001450 PARAMETER Experiment Name: At_Far-red-induction_P Parameter: Light Value: Far-red vs. White
  misc_feature: MA Experiment 20001450 PARAMETER Experiment Name: At_Far-red-induction_P Parameter: Organism Value: A. thaliana
  misc_feature: MA Experiment 20001450 PARAMETER Experiment Name: At_Far-red-induction_P Parameter: Plant Line Value: Columbia
  misc_feature: MA Experiment 20001450 PARAMETER Experiment Name: At_Far-red-induction_P Parameter: Timepoint (hr) Value: 8
  misc_feature: MA Experiment 20001450 PARAMETER Experiment Name: At_Far-red-induction_P Parameter: Tissue Value: Whole Plant
atgtgggcattgctcatttgggtttctttgcttctcataagtatcacacattgggtttatagttggagaaatcctaaatgcagagggaaacttccacctggttccatgggtttccctttactcggcgagagtatccaattcttcaagccaaacaaaacttcagacatccctccttttatcaaagagagagttaagaagtatggcccaattttcaagaccaatctggtggggagaccagttattgtatcaacagatgctgatttgagttattttgtgtttaaccaagagggacgttgtttccagagttggtatccagacacttttacacacatctttgggaagaagaatgtgggttcattacatggtttcatgtacaagtaccttaaaaacatggttttgactctctttggccatgatggtctcaagaagatgcttcctcaagtagaaatgactgccaataagaggttggagctttggtcaaatcaagattcagtagaactcaaagatgcaaccgcaagcatgatatttgatctcaccgcgaagaagttgatcagccatgatccagacaagtcatcagagaatctaagggcaaactttgttgctttcatacagggattgatctctttcccttttgatatcccaggcacagcttatcacaaatgtctacagggtagggcaaaggcaatgaaaatgttgaggaatatgcttcaagagaggcgtgagaaccctcggaagaatccaagtgatttctttgattatgttattgaagagattcagaaagaagggacaattctgacagaagagattgcactggatttgatgtttgtcttgctatttgccagctttgaaacaacttctttggctctaactttagctatcaagtttctctcagatgaccctgaagtcctaaagcgtttaacggaagaacatgagacaattctgagaaaccgggaagatgcagactctggacttacatgggaagaatacaagtcaatgacttacacatttcagttcataaacgaaaccgcgagactagcaaatatagttcctgcaatcttcagaaaggcgttgagagatataaaattcaaagattatacgattccagccggctgggcggtgatggtctgtccaccagctgtacatttgaatcccgaaatgtataaagatcctttagtctttaatccatcaagatgggagggatcaaaagttacaaacgcatcaaagcacttcatggcgtttggtggaggtatgaggttctgcgttggaaccgacttcacaaaattgcagatggctgcgtttcttcacagcttggtaacaaaatacaggtgggaggagataaaaggagggaatataactcgaacgcctggattacagtttccaaatggttaccatgtcaaactccataagaagagagactag

SEQ ID NO: 85160 - protein, 472 aa, Arabidopsis thaliana
  peptide (1)..(472): Ceres Seq. ID no. 12679138
  misc_feature (1)..(472): Homolog of NCBI NO: 30682922 NR Description: cytochrome P450, putative [Arabidopsis thaliana]
  misc_feature (1)..(472): Homolog of NCBI NO: 9502380 NR Description: T12C24.27 [Arabidopsis thaliana]
  misc_feature (3)..(470): Homolog of NCBI NO: 20520627 NR Description: putative cytochrome P450 [Oryza sativa (japonica
  misc_feature (3)..(470): Homolog of NCBI NO: 38567920 NR Description: OSJNBa0088I22.16 [Oryza sativa (japonica
  misc_feature (10)..(467): Homolog of NCBI NO: 38567916 NR Description: OSJNBa0088I22.12 [Oryza sativa (japonica
  misc_feature (8)..(470): Homolog of NCBI NO: 18483228 NR Description: putative cytochrome P450-like protein [Sorghum
  misc_feature (75)..(470): Homolog of NCBI NO: 27764671 NR Description: putative hydroxylase [Oryza sativa (japonica
  misc_feature (2)..(398): Homolog of NCBI NO: 38567917 NR Description: OSJNBa0088I22.13 [Oryza sativa (japonica
  misc_feature (1)..(459): Homolog of NCBI NO: 15222806 NR Description: cytochrome P450, putative; protein id:
  misc_feature (1)..(459): Homolog of NCBI NO: 15218388 NR Description: cytochrome P450, putative; protein id: supported by cDNA: gi_17473540 [Arabidopsis thaliana]
MWALLIWVSLLLISITHWVYSWRNPKCRGKLPPGSMGFPLLGESIQFFKPNKTSDIPPFIKERVKKYGPIFKTNLVGRPVIVSTDADLSYFVFNQEGRCFQSWYPDTFTHIFGKKNVGSLHGFMYKYLKNMVLTLFGHDGLKKMLPQVEMTANKRLELWSNQDSVELKDATASMIFDLTAKKLISHDPDKSSENLRANFVAFIQGLISFPFDIPGTAYHKCLQGRAKAMKMLRNMLQERRENPRKNPSDFFDYVIEEIQKEGTILTEEIALDLMFVLLFASFETTSLALTLAIKFLSDDPEVLKRLTEEHETILRNREDADSGLTWEEYKSMTYTFQFINETARLANIVPAIFRKALRDIKFKDYTIPAGWAVMVCPPAVHLNPEMYKDPLVFNPSRWEGSKVTNASKHFMAFGGGMRFCVGTDFTKLQMAAFLHSLVTKYRWEEIKGGNITRTPGLQFPNGYHVKLHKKRD

SEQ ID NO: 85161 - protein, 437 aa, Arabidopsis thaliana
  peptide (1)..(437): Ceres Seq. ID no. 12679139
  misc_feature (1)..(437): Homolog of NCBI NO: 30682922 NR Description: cytochrome P450, putative [Arabidopsis thaliana]
  misc_feature (1)..(437): Homolog of NCBI NO: 9502380 NR Description: T12C24.27 [Arabidopsis thaliana]
  misc_feature (1)..(435): Homolog of NCBI NO: 20520627 NR Description: putative cytochrome P450 [Oryza sativa (japonica
  misc_feature (1)..(435): Homolog of NCBI NO: 38567920 NR Description: OSJNBa0088I22.16 [Oryza sativa (japonica
  misc_feature (1)..(432): Homolog of NCBI NO: 38567916 NR Description: OSJNBa0088I22.12 [Oryza sativa (japonica
  misc_feature (1)..(435): Homolog of NCBI NO: 18483228 NR Description: putative cytochrome P450-like protein [Sorghum
  misc_feature (40)..(435): Homolog of NCBI NO: 27764671 NR Description: putative hydroxylase [Oryza sativa (japonica
  misc_feature (1)..(363): Homolog of NCBI NO: 38567917 NR Description: OSJNBa0088I22.13 [Oryza sativa (japonica
  misc_feature (1)..(424): Homolog of NCBI NO: 15222806 NR Description: cytochrome P450, putative; protein id:
  misc_feature (1)..(424): Homolog of NCBI NO: 15218388 NR Description: cytochrome P450, putative; protein id: supported by cDNA: gi_17473540 [Arabidopsis thaliana]
MGFPLLGESIQFFKPNKTSDIPPFIKERVKKYGPIFKTNLVGRPVIVSTDADLSYFVFNQEGRCFQSWYPDTFTHIFGKKNVGSLHGFMYKYLKNMVLTLFGHDGLKKMLPQVEMTANKRLELWSNQDSVELKDATASMIFDLTAKKLISHDPDKSSENLRANFVAFIQGLISFPFDIPGTAYHKCLQGRAKAMKMLRNMLQERRENPRKNPSDFFDYVIEEIQKEGTILTEEIALDLMFVLLFASFETTSLALTLAIKFLSDDPEVLKRLTEEHETILRNREDADSGLTWEEYKSMTYTFQFINETARLANIVPAIFRKALRDIKFKDYTIPAGWAVMVCPPAVHLNPEMYKDPLVFNPSRWEGSKVTNASKHFMAFGGGMRFCVGTDFTKLQMAAFLHSLVTKYRWEEIKGGNITRTPGLQFPNGYHVKLHKKRD

SEQ ID NO: 85162 - protein, 349 aa, Arabidopsis thaliana
  peptide (1)..(349): Ceres Seq. ID no. 12679140
  misc_feature (1)..(349): Homolog of NCBI NO: 30682922 NR Description: cytochrome P450, putative [Arabidopsis thaliana]
  misc_feature (1)..(349): Homolog of NCBI NO: 9502380 NR Description: T12C24.27 [Arabidopsis thaliana]
  misc_feature (1)..(347): Homolog of NCBI NO: 20520627 NR Description: putative cytochrome P450 [Oryza sativa (japonica
  misc_feature (1)..(347): Homolog of NCBI NO: 38567920 NR Description: OSJNBa0088I22.16 [Oryza sativa (japonica
  misc_feature (1)..(344): Homolog of NCBI NO: 38567916 NR Description: OSJNBa0088I22.12 [Oryza sativa (japonica
  misc_feature (1)..(347): Homolog of NCBI NO: 18483228 NR Description: putative cytochrome P450-like protein [Sorghum
  misc_feature (1)..(347): Homolog of NCBI NO: 27764671 NR Description: putative hydroxylase [Oryza sativa (japonica
  misc_feature (1)..(275): Homolog of NCBI NO: 38567917 NR Description: OSJNBa0088I22.13 [Oryza sativa (japonica
  misc_feature (1)..(336): Homolog of NCBI NO: 15222806 NR Description: cytochrome P450, putative; protein id:
  misc_feature (1)..(336): Homolog of NCBI NO: 15218388 NR Description: cytochrome P450, putative; protein id: supported by cDNA: gi_17473540 [Arabidopsis thaliana]
MYKYLKNMVLTLFGHDGLKKMLPQVEMTANKRLELWSNQDSVELKDATASMIFDLTAKKLISHDPDKSSENLRANFVAFIQGLISFPFDIPGTAYHKCLQGRAKAMKMLRNMLQERRENPRKNPSDFFDYVIEEIQKEGTILTEEIALDLMFVLLFASFETTSLALTLAIKFLSDDPEVLKRLTEEHETILRNREDADSGLTWEEYKSMTYTFQFINETARLANIVPAIFRKALRDIKFKDYTIPAGWAVMVCPPAVHLNPEMYKDPLVFNPSRWEGSKVTNASKHFMAFGGGMRFCVGTDFTKLQMAAFLHSLVTKYRWEEIKGGNITRTPGLQFPNGYHVKLHKKRD

SEQ ID NO: 85163 - DNA, 1418 bp, Arabidopsis thaliana
  misc_feature (1)..(1418): Ceres Seq. ID no. 12679153
  misc_feature: MA Experiment ID: 20000314 Result: Down-regulated in Transcription
  misc_feature: MA Experiment 20000314 PARAMETER Experiment Name: At_14day_Shoots-Roots_Sub_P Parameter: Age (day) Value: 14
  misc_feature: MA Experiment 20000314 PARAMETER Experiment Name: At_14day_Shoots-Roots_Sub_P Parameter: Organism Value: A. thaliana
  misc_feature: MA Experiment 20000314 PARAMETER Experiment Name: At_14day_Shoots-Roots_Sub_P Parameter: Plant Line Value: WS
  misc_feature: MA Experiment 20000314 PARAMETER Experiment Name: At_14day_Shoots-Roots_Sub_P Parameter: Tissue Value: Roots vs. Whole Plant
  misc_feature: MA Experiment ID: 20000315 Result: Down-regulated in Transcription
  misc_feature: MA Experiment 20000315 PARAMETER Experiment Name: At_14day_Shoots-Roots_Sub_P Parameter: Age (day) Value: 14
  misc_feature: MA Experiment 20000315 PARAMETER Experiment Name: At_14day_Shoots-Roots_Sub_P Parameter: Organism Value: A. thaliana
  misc_feature: MA Experiment 20000315 PARAMETER Experiment Name: At_14day_Shoots-Roots_Sub_P Parameter: Plant Line Value: WS
  misc_feature: MA Experiment 20000315 PARAMETER Experiment Name: At_14day_Shoots-Roots_Sub_P Parameter: Tissue Value: Shoots vs. Whole Plant
  misc_feature: MA Experiment ID: 20000329 Result: Down-regulated in Transcription
  misc_feature: MA Experiment 20000329 PARAMETER Experiment Name: At_4deg_Cold_Sub_P Parameter: Age (day) Value: 14
  misc_feature: MA Experiment 20000329 PARAMETER Experiment Name: At_4deg_Cold_Sub_P Parameter: Organism Value: A. thaliana
  misc_feature: MA Experiment 20000329 PARAMETER Experiment Name: At_4deg_Cold_Sub_P Parameter: Plant Line Value: WS
  misc_feature: MA Experiment 20000329 PARAMETER Experiment Name: At_4deg_Cold_Sub_P Parameter: Temperature (deg C) Value: 4 vs. 22
  misc_feature: MA Experiment 20000329 PARAMETER Experiment Name: At_4deg_Cold_Sub_P Parameter: Timepoint (hr) Value: 6
  misc_feature: MA Experiment 20000329 PARAMETER Experiment Name: At_4deg_Cold_Sub_P Parameter: Tissue Value: Aerial
  misc_feature: MA Experiment ID: 20000332 Result: Down-regulated in Transcription
  misc_feature: MA Experiment 20000332 PARAMETER Experiment Name: At_4deg_Cold_Sub_P Parameter: Age (day) Value: 14
  misc_feature: MA Experiment 20000332 PARAMETER Experiment Name: At_4deg_Cold_Sub_P Parameter: Organism Value: A. thaliana
  misc_feature: MA Experiment 20000332 PARAMETER Experiment Name: At_4deg_Cold_Sub_P Parameter: Plant Line Value: WS
  misc_feature: MA Experiment 20000332 PARAMETER Experiment Name: At_4deg_Cold_Sub_P Parameter: Temperature (deg C) Value: 4 vs. 22
  misc_feature: MA Experiment 20000332 PARAMETER Experiment Name: At_4deg_Cold_Sub_P Parameter: Timepoint (hr) Value: 2
  misc_feature: MA Experiment 20000332 PARAMETER Experiment Name: At_4deg_Cold_Sub_P Parameter: Tissue Value: Aerial
  misc_feature: MA Experiment ID: 20000355 Result: Down-regulated in Transcription
  misc_feature: MA Experiment 20000355 PARAMETER Experiment Name: At_Siliques_Sub_P Parameter: Age (day) Value: 21
  misc_feature: MA Experiment 20000355 PARAMETER Experiment Name: At_Siliques_Sub_P Parameter: Organism Value: A. thaliana
  misc_feature: MA Experiment 20000355 PARAMETER Experiment Name: At_Siliques_Sub_P Parameter: Plant Line Value: WS
  misc_feature: MA Experiment 20000355 PARAMETER Experiment Name: At_Siliques_Sub_P Parameter: Tissue Value: Less Than 5mm Siliques vs. Whole Plant
ccactcatttttcctatttttcgctttgcgtgccttcttatcaacttgtaaacaaagctacaaatatctttaaataaggacccaactctttttcaattcctcccatcaatcttcttcatttgttcttctgttggtggtggtgatctagttttcaaagaatcgattttgccaagtgggttcttcttgataacctttcttcttctttgaaatgggttcttctgtggagcagaacattcttgttactggtggtgctggctttatcgggacgcatactgttgttcaacttctcaaagatggttttaaggtttcgatcatcgataattttgataactctgttatcgaagctgttgatagagttagggagcttgttggtcctgatctctccaagaagctcgacttcaatctgggtgatctaagaaacaaaggggacattgagaaactattctccaagcagagatttgatgctgtgattcattttgcgggtcttaaagctgtgggtgagagtgttgaaaaccctcgccgctactttgacaataacttggttggaacaatcaatctatatgagaccatggcaaagtacaactgcaaaatgatggtgttttcatcttctgccactgtttatggacaacctgaaaagattccatgcatggaagactttgaattaaaggctatgaatccttatggtcgtactaagctctttcttgaagaaatagctagagatattcaaaaggcagaaccggaatggagaattattctgctgaggtacttcaatcctgtaggagcacatgagagtggcagtattggtgaggatccaaaaggcatccccaataacctcatgccttacatccaacaagtggccgttggacgtttaccggaactcaatgtctatggacatgactatcccaccgaggatggtagtgcggtaagagactacatccatgtgatggatttagcagatggccatatcgctgcgctcaggaagctatttgctgatccaaagattggttgtactgcttacaatctagggactggtcaaggaacgtctgtgttagaaatggttgcagcttttgaaaaagcttccggcaagaaaatcccgattaagctctgtccgagaaggtcaggagatgcaacagcagtttatgcttcaacagagaaggctgagaaagaacttggctggaaggcaaaatatggagtggatgagatgtgcagagatcagtggaaatgggcaaacaataatccatggggttaccagaataagctttgaatttacttcttttgtttggagttaccatttctaattactcaaatctaaaagaaagaaatatacatacatatgatgatatagttgtgctttatattccacatgtatcgaactgatctcttacttcgatgaataaaatggaaagttgatttgattg

SEQ ID NO: 85164 - protein, 351 aa, Arabidopsis thaliana; identical to SEQ ID NO: 44133
  peptide (1)..(351): Ceres Seq. ID no. 12679154
  misc_feature (9)..(344): Pfam Name: NAD dependent epimerase/dehydratase family Pfam Description: NAD dependent epimerase/dehydratase family
  misc_feature (1)..(351): Homolog of NCBI NO: 15222072 NR Description: uridine diphosphate glucose epimerase; protein At1g12780.1, supported by cDNA: gi_12248020, supported by cDNA:
  misc_feature (1)..(351): Homolog of NCBI NO: 2129759 NR Description: UDPglucose 4-epimerase (EC 5.1.3.2) - Arabidopsis >gi|1143392|emb|CAA90941.1| uridine diphosphate glucose epimerase
  misc_feature (1)..(350): Homolog of NCBI NO: 18407751 NR Description: uridine diphosphate glucose epimerase, putative; id: At1g63180.1, supported by cDNA: 1932. [Arabidopsis thaliana]
  misc_feature (1)..(350): Homolog of NCBI NO: 25292327 NR Description: hypothetical protein F16M19.8 [imported] - thaliana >gi|12323247|gb|AAG51599.1|AC010795_3 uridine
  misc_feature (7)..(350): Homolog of NCBI NO: 11386762 NR Description: UDP-glucose 4-epimerase (Galactowaldenase)
  misc_feature (7)..(350): Homolog of NCBI NO: 11386774 NR Description: UDP-glucose 4-epimerase GEPI42 (Galactowaldenase)
  misc_feature (8)..(347): Homolog of NCBI NO: 26106014 NR Description: putative UDP-glucose 4-epimerase [Oryza sativa
  misc_feature (7)..(347): Homolog of NCBI NO: 11386775 NR Description: UDP-glucose 4-epimerase GEPI48 (Galactowaldenase)
  misc_feature (7)..(350): Homolog of NCBI NO: 21553659 NR Description: UDP-galactose 4-epimerase-like protein
  misc_feature (7)..(349): Homolog of NCBI NO: 12643850 NR Description: Probable UDP-glucose 4-epimerase At4g10960

SEQ ID NO: 85165 - protein, 231 aa, Arabidopsis thaliana; identical to SEQ ID NO: 44134
  peptide (1)..(231): Ceres Seq. ID no. 12679155
  misc_feature (1)..(224): Pfam Name: NAD dependent epimerase/dehydratase family Pfam Description: NAD dependent epimerase/dehydratase family
  misc_feature (1)..(231): Homolog of NCBI NO: 15222072 NR Description: uridine diphosphate glucose epimerase; protein At1g12780.1, supported by cDNA: gi_12248020, supported by cDNA:
  misc_feature (1)..(231): Homolog of NCBI NO: 2129759 NR Description: UDPglucose 4-epimerase (EC 5.1.3.2) - Arabidopsis >gi|1143392|emb|CAA90941.1| uridine diphosphate glucose epimerase
  misc_feature (1)..(230): Homolog of NCBI NO: 18407751 NR Description: uridine diphosphate glucose epimerase, putative; id: At1g63180.1, supported by cDNA: 1932. [Arabidopsis thaliana]
  misc_feature (1)..(230): Homolog of NCBI NO: 25292327 NR Description: hypothetical protein F16M19.8 [imported] - thaliana >gi|12323247|gb|AAG51599.1|AC010795_3 uridine
  misc_feature (1)..(230): Homolog of NCBI NO: 11386762 NR Description: UDP-glucose 4-epimerase (Galactowaldenase)
  misc_feature (1)..(230): Homolog of NCBI NO: 11386774 NR Description: UDP-glucose 4-epimerase GEPI42 (Galactowaldenase)
  misc_feature (1)..(227): Homolog of NCBI NO: 26106014 NR Description: putative UDP-glucose 4-epimerase [Oryza sativa
  misc_feature (1)..(227): Homolog of NCBI NO: 11386775 NR Description: UDP-glucose 4-epimerase GEPI48 (Galactowaldenase)
  misc_feature (1)..(230): Homolog of NCBI NO: 21553659 NR Description: UDP-galactose 4-epimerase-like protein
  misc_feature (1)..(229): Homolog of NCBI NO: 12643850 NR Description: Probable UDP-glucose 4-epimerase At4g10960

SEQ ID NO: 85166 - protein, 224 aa, Arabidopsis thaliana; identical to SEQ ID NO: 44135
  peptide (1)..(224): Ceres Seq. ID no. 12679156
  misc_feature (1)..(217): Pfam Name: NAD dependent epimerase/dehydratase family Pfam Description: NAD dependent epimerase/dehydratase family
  misc_feature (1)..(224): Homolog of NCBI NO: 15222072 NR Description: uridine diphosphate glucose epimerase; protein At1g12780.1, supported by cDNA: gi_12248020, supported by cDNA:
  misc_feature (1)..(224): Homolog of NCBI NO: 2129759 NR Description: UDPglucose 4-epimerase (EC 5.1.3.2) - Arabidopsis >gi|1143392|emb|CAA90941.1| uridine diphosphate glucose epimerase
  misc_feature (1)..(223): Homolog of NCBI NO: 18407751 NR Description: uridine diphosphate glucose epimerase, putative; id: At1g63180.1, supported by cDNA: 1932. [Arabidopsis thaliana]
  misc_feature (1)..(223): Homolog of NCBI NO: 25292327 NR Description: hypothetical protein F16M19.8 [imported] - thaliana >gi|12323247|gb|AAG51599.1|AC010795_3 uridine
  misc_feature (1)..(223): Homolog of NCBI NO: 11386762 NR Description: UDP-glucose 4-epimerase (Galactowaldenase)
  misc_feature (1)..(223): Homolog of NCBI NO: 11386774 NR Description: UDP-glucose 4-epimerase GEPI42 (Galactowaldenase)
  misc_feature (1)..(220): Homolog of NCBI NO: 26106014 NR Description: putative UDP-glucose 4-epimerase [Oryza sativa
  misc_feature (1)..(220): Homolog of NCBI NO: 11386775 NR Description: UDP-glucose 4-epimerase GEPI48 (Galactowaldenase)
  misc_feature (1)..(223): Homolog of NCBI NO: 21553659 NR Description: UDP-galactose 4-epimerase-like protein
  misc_feature (1)..(222): Homolog of NCBI NO: 12643850 NR Description: Probable UDP-glucose 4-epimerase At4g10960

SEQ ID NO: 85167 - DNA, 1116 bp, Arabidopsis thaliana
  misc_feature (1)..(1116): Ceres Seq. ID no. 12679188
  misc_feature: MA Experiment ID: 20000171 Result: Down-regulated in Transcription
  misc_feature: MA Experiment 20000171 PARAMETER Experiment Name: At_42deg_Heat_P Parameter: Age (day) Value: 14
  misc_feature: MA Experiment 20000171 PARAMETER Experiment Name: At_42deg_Heat_P Parameter: Organism Value: A. thaliana
  misc_feature: MA Experiment 20000171 PARAMETER Experiment Name: At_42deg_Heat_P Parameter: Plant Line Value: WS
  misc_feature: MA Experiment 20000171 PARAMETER Experiment Name: At_42deg_Heat_P Parameter: Temperature (deg C) Value: 42 vs. 22
  misc_feature: MA Experiment 20000171 PARAMETER Experiment Name: At_42deg_Heat_P Parameter: Timepoint (hr) Value: 1
  misc_feature: MA Experiment 20000171 PARAMETER Experiment Name: At_42deg_Heat_P Parameter: Tissue Value: Aerial
  misc_feature: MA Experiment ID: 20000173 Result: Down-regulated in Transcription
  misc_feature: MA Experiment 20000173 PARAMETER Experiment Name: At_42deg_Heat_P Parameter: Age (day) Value: 14
  misc_feature: MA Experiment 20000173 PARAMETER Experiment Name: At_42deg_Heat_P Parameter: Organism Value: A. thaliana
  misc_feature: MA Experiment 20000173 PARAMETER Experiment Name: At_42deg_Heat_P Parameter: Plant Line Value: WS
  misc_feature: MA Experiment 20000173 PARAMETER Experiment Name: At_42deg_Heat_P Parameter: Temperature (deg C) Value: 42 vs. 22
  misc_feature: MA Experiment 20000173 PARAMETER Experiment Name: At_42deg_Heat_P Parameter: Timepoint (hr) Value: 6
  misc_feature: MA Experiment 20000173 PARAMETER Experiment Name: At_42deg_Heat_P Parameter: Tissue Value: Aerial
  misc_feature: MA Experiment ID: 20000182 Result: Up-regulated in Transcription
  misc_feature: MA Experiment 20000182 PARAMETER Experiment Name: At_2mM_SA_P Parameter: Age (day) Value: 14
  misc_feature: MA Experiment 20000182 PARAMETER Experiment Name: At_2mM_SA_P Parameter: Organism Value: A. thaliana
  misc_feature: MA Experiment 20000182 PARAMETER Experiment Name: At_2mM_SA_P Parameter: Plant Line Value: WS
  misc_feature: MA Experiment 20000182 PARAMETER Experiment Name: At_2mM_SA_P Parameter: Timepoint (hr) Value: 6
  misc_feature: MA Experiment 20000182 PARAMETER Experiment Name: At_2mM_SA_P Parameter: Tissue Value: Aerial
  misc_feature: MA Experiment 20000182 PARAMETER Experiment Name: At_2mM_SA_P Parameter: Treatment Value: 2mM SA vs. No Treatment
  misc_feature: MA Experiment ID: 20000184 Result: Down-regulated in Transcription
  misc_feature: MA Experiment 20000184 PARAMETER Experiment Name: At_Shoots__P Parameter: Age (day) Value: 7
  misc_feature: MA Experiment 20000184 PARAMETER Experiment Name: At_Shoots__P Parameter: Tissue Value: Shoots vs. Whole Plant
  misc_feature: MA Experiment ID: 20001905 Result: Down-regulated in Transcription
  misc_feature: MA Experiment 20001905 PARAMETER Experiment Name: At_Drought_Reproduction_P Parameter: Age (day) Value: 40
  misc_feature: MA Experiment 20001905 PARAMETER Experiment Name: At_Drought_Reproduction_P Parameter: Organism Value: A. thaliana
  misc_feature: MA Experiment 20001905 PARAMETER Experiment Name: At_Drought_Reproduction_P Parameter: Plant Line Value: WS
  misc_feature: MA Experiment 20001905 PARAMETER Experiment Name: At_Drought_Reproduction_P Parameter: Timepoint (day) Value: 10
  misc_feature: MA Experiment 20001905 PARAMETER Experiment Name: At_Drought_Reproduction_P Parameter: Tissue Value: Rosettes
  misc_feature: MA Experiment 20001905 PARAMETER Experiment Name: At_Drought_Reproduction_P Parameter: Treatment Value: Drought vs. No Drought
atggctaaccgaacagacaactcgaatcgctgttcgaatggtaaaaagccaaatgatggaatgagactcattatagcgacattcgtaggaatagttgtcggtttcttcttggggatatctttccctacactatcactaacaaaaatttgggttccatcgaatccccgaggtgcagagatgctgactcctggtatcattgcacctgaatcagattactacttacgcagactttggggattacctgaggaggatgttcctgtgaagccaaagtatctcattgcgtttactgtcggttttggtcagaaagtgaacgttgatgcttgtgtcaagaagttttcaaaagattttacaattgttctattccactacgacggacgaaccacagaatgggaagaattagaatggtccaaacgcgcaatacacgtgagcgtgccaaagcaaaccaaatggtggtatgctaaaaggtttctgcatcctgacattgtggcaccttatgactatgtattcatctgggatgaagacctcggccttgaaaacttcgatgtagaagagtacatcaggcttataaagaaacacggtctagagatatcgcagcctgctgttgagtctaagaaaaagatcacatgggagataacaaagagaaaaaccaaaggagaagttcacaaagatgcgaaggagaaaccaggtcgatgcaatgaccctcacttgcctccctgtgcagcgtacgtagtctcaaatgttcattacaaaaacatagatctatacagtactcttgattccatgtttatagagattatggctccagtattctcaagagatgcatggcgttgcgtgtggcatatgattcagaacgatttggttcacggttggggtcttgatttcgcactccgtaaatgcgttgagcctgcacatgagaagataggagttgtggattctcaatggatcatacatcaatctcttccttctttaggcagccagggagaggcacaagacggtaaagcagggtggcaaggggtgagagacagatgtaaacgggaatggacaatgttccaaagccgaatggctagttccgagaagcagtatctcaaggaaatcgcaaactcaacgattcattag

SEQ ID NO: 85168 - protein, 371 aa, Arabidopsis thaliana
  peptide (1)..(371): Ceres Seq. ID no. 12679189
  misc_feature (48)..(368): Pfam Name: Protein of unknown function (DUF707) Pfam Description: Protein of unknown function (DUF707)
  misc_feature (1)..(371): Homolog of NCBI NO: 25402748 NR Description: protein F3F19.3 [imported] - Arabidopsis thaliana
  misc_feature (48)..(243): Homolog of NCBI NO: 22329525 NR Description: unknown protein; protein id: At1g13000.1, by cDNA: gi_18175818, supported by cDNA: gi_20465546 [Arabidopsis >gi|18175819|gb|AAL59933.1| unknown protein [Arabidopsis
  misc_feature (262)..(371): Homolog of NCBI NO: 22329525 NR Description: unknown protein; protein id: At1g13000.1, by cDNA: gi_18175818, supported by cDNA: gi_20465546 [Arabidopsis >gi|18175819|gb|AAL59933.1| unknown protein [Arabidopsis
  misc_feature (1)..(53): Homolog of NCBI NO: 22329525 NR Description: unknown protein; protein id: At1g13000.1, by cDNA: gi_18175818, supported by cDNA: gi_20465546 [Arabidopsis >gi|18175819|gb|AAL59933.1| unknown protein [Arabidopsis
  misc_feature (48)..(243): Homolog of NCBI NO: 18404941 NR Description: expressed protein; protein id: At3g26440.1,
  misc_feature (262)..(369): Homolog of NCBI NO: 18404941 NR Description: expressed protein; protein id: At3g26440.1,
  misc_feature (1)..(54): Homolog of NCBI NO: 18404941 NR Description: expressed protein; protein id: At3g26440.1,
  misc_feature (48)..(243): Homolog of NCBI NO: 16612300 NR Description: AT3g26440/F20C19_16 [Arabidopsis thaliana]
  misc_feature (262)..(369): Homolog of NCBI NO: 16612300 NR Description: AT3g26440/F20C19_16 [Arabidopsis thaliana]
  misc_feature (1)..(54): Homolog of NCBI NO: 16612300 NR Description: AT3g26440/F20C19_16 [Arabidopsis thaliana]
MANRTDNSNRCSNGKKPNDGMRLIIATFVGIVVGFFLGISFPTLSLTKIWVPSNPRGAEMLTPGIIAPESDYYLRRLWGLPEEDVPVKPKYLIAFTVGFGQKVNVDACVKKFSKDFTIVLFHYDGRTTEWEELEWSKRAIHVSVPKQTKWWYAKRFLHPDIVAPYDYVFIWDEDLGLENFDVEEYIRLIKKHGLEISQPAVESKKKITWEITKRKTKGEVHKDAKEKPGRCNDPHLPPCAAYVVSNVHYKNIDLYSTLDSMFIEIMAPVFSRDAWRCVWHMIQNDLVHGWGLDFALRKCVEPAHEKIGVVDSQWIIHQSLPSLGSQGEAQDGKAGWQGVRDRCKREWTMFQSRMASSEKQYLKEIANSTIH

SEQ ID NO: 85169 - protein, 351 aa, Arabidopsis thaliana
  peptide (1)..(351): Ceres Seq. ID no. 12679190
  misc_feature (28)..(348): Pfam Name: Protein of unknown function (DUF707) Pfam Description: Protein of unknown function (DUF707)
  misc_feature (1)..(351): Homolog of NCBI NO: 25402748 NR Description: protein F3F19.3 [imported] - Arabidopsis thaliana
  misc_feature (28)..(223): Homolog of NCBI NO: 22329525 NR Description: unknown protein; protein id: At1g13000.1, by cDNA: gi_18175818, supported by cDNA: gi_20465546 [Arabidopsis >gi|18175819|gb|AAL59933.1| unknown protein [Arabidopsis
  misc_feature (242)..(351): Homolog of NCBI NO: 22329525 NR Description: unknown protein; protein id: At1g13000.1, by cDNA: gi_18175818, supported by cDNA: gi_20465546 [Arabidopsis >gi|18175819|gb|AAL59933.1| unknown protein [Arabidopsis
  misc_feature (1)..(33): Homolog of NCBI NO: 22329525 NR Description: unknown protein; protein id: At1g13000.1, by cDNA: gi_18175818, supported by cDNA: gi_20465546 [Arabidopsis >gi|18175819|gb|AAL59933.1| unknown protein [Arabidopsis
  misc_feature (28)..(223): Homolog of NCBI NO: 18404941 NR Description: expressed protein; protein id: At3g26440.1,
  misc_feature (242)..(349): Homolog of NCBI NO: 18404941 NR Description: expressed protein; protein id: At3g26440.1,
  misc_feature (1)..(34): Homolog of NCBI NO: 18404941 NR Description: expressed protein; protein id: At3g26440.1,
  misc_feature (28)..(223): Homolog of NCBI NO: 16612300 NR Description: AT3g26440/F20C19_16 [Arabidopsis thaliana]
  misc_feature (242)..(349): Homolog of NCBI NO: 16612300 NR Description: AT3g26440/F20C19_16 [Arabidopsis thaliana]
  misc_feature (1)..(34): Homolog of NCBI NO: 16612300 NR Description: AT3g26440/F20C19_16 [Arabidopsis thaliana]
MRLIIATFVGIVVGFFLGISFPTLSLTKIWVPSNPRGAEMLTPGIIAPESDYYLRRLWGLPEEDVPVKPKYLIAFTVGFGQKVNVDACVKKFSKDFTIVLFHYDGRTTEWEELEWSKRAIHVSVPKQTKWWYAKRFLHPDIVAPYDYVFIWDEDLGLENFDVEEYIRLIKKHGLEISQPAVESKKKITWEITKRKTKGEVHKDAKEKPGRCNDPHLPPCAAYVVSNVHYKNIDLYSTLDSMFIEIMAPVFSRDAWRCVWHMIQNDLVHGWGLDFALRKCVEPAHEKIGVVDSQWIIHQSLPSLGSQGEAQDGKAGWQGVRDRCKREWTMFQSRMASSEKQYLKEIANSTIH

SEQ ID NO: 85170 - protein, 312 aa, Arabidopsis thaliana
  peptide (1)..(312): Ceres Seq. ID no. 12679191
  misc_feature (1)..(309): Pfam Name: Protein of unknown function (DUF707) Pfam Description: Protein of unknown function (DUF707)
  misc_feature (1)..(312): Homolog of NCBI NO: 25402748 NR Description: protein F3F19.3 [imported] - Arabidopsis thaliana
  misc_feature (1)..(184): Homolog of NCBI NO: 22329525 NR Description: unknown protein; protein id: At1g13000.1, by cDNA: gi_18175818, supported by cDNA: gi_20465546 [Arabidopsis >gi|18175819|gb|AAL59933.1| unknown protein [Arabidopsis
  misc_feature (203)..(312): Homolog of NCBI NO: 22329525 NR Description: unknown protein; protein id: At1g13000.1, by cDNA: gi_18175818, supported by cDNA: gi_20465546 [Arabidopsis >gi|18175819|gb|AAL59933.1| unknown protein [Arabidopsis
  misc_feature (1)..(184): Homolog of NCBI NO: 18404941 NR Description: expressed protein; protein id: At3g26440.1,
  misc_feature (203)..(310): Homolog of NCBI NO: 18404941 NR Description: expressed protein; protein id: At3g26440.1,
  misc_feature (1)..(184): Homolog of NCBI NO: 16612300 NR Description: AT3g26440/F20C19_16 [Arabidopsis thaliana]
  misc_feature (203)..(310): Homolog of NCBI NO: 16612300 NR Description: AT3g26440/F20C19_16 [Arabidopsis thaliana]
  misc_feature (1)..(163): Homolog of NCBI NO: 9294303 NR Description: gb|AAD31054.1~gene_id:F20C19.17~strong similarity
  misc_feature (203)..(310): Homolog of NCBI NO: 9294303 NR Description: gb|AAD31054.1~gene_id:F20C19.17~strong similarity
  misc_feature (1)..(184): Homolog of NCBI NO: 18408876 NR Description: F12A21.2; protein id: At1g67850.1, supported by gi_14326581 [Arabidopsis thaliana] At1g67850/F12A21_2 [Arabidopsis thaliana]
MLTPGIIAPESDYYLRRLWGLPEEDVPVKPKYLIAFTVGFGQKVNVDACVKKFSKDFTIVLFHYDGRTTEWEELEWSKRAIHVSVPKQTKWWYAKRFLHPDIVAPYDYVFIWDEDLGLENFDVEEYIRLIKKHGLEISQPAVESKKKITWEITKRKTKGEVHKDAKEKPGRCNDPHLPPCAAYVVSNVHYKNIDLYSTLDSMFIEIMAPVFSRDAWRCVWHMIQNDLVHGWGLDFALRKCVEPAHEKIGVVDSQWIIHQSLPSLGSQGEAQDGKAGWQGVRDRCKREWTMFQSRMASSEKQYLKEIANSTIH

SEQ ID NO: 85171 - DNA, 1425 bp, Arabidopsis thaliana
  misc_feature (1)..(1425): Ceres Seq. ID no. 12679196
  misc_feature: MA Experiment ID: 20000794 Result: Up-regulated in Transcription
  misc_feature: MA Experiment 20000794 PARAMETER Experiment Name: At_Petals_P Parameter: Age (day) Value: 23-25 days
  misc_feature: MA Experiment 20000794 PARAMETER Experiment Name: At_Petals_P Parameter: Plant Line Value: WS
  misc_feature: MA Experiment 20000794 PARAMETER Experiment Name: At_Petals_P Parameter: Tissue Value: Petals vs. Whole plant
atggcgatcttgttctgtttcttcttggtttcgcttgttactctcgtatcatcaatcttttttaaacagatcaaaaacacaaaatttaatcttcctccgagccctcctagtcttccgataattggaaacttacaccatcttacaggattgcctcacagatgttatcataagctctccatcaaatacggtcccgtgatacttcttcatctcggctttgttccagttgttgtgatctcattgagcgaagcagctgaagcagtactcaaaacacatgatttggaatgttgcagccgaccaaagacggtggggaccggaaaactctcttacggttttaaagacatcagttttgtgccatacagtgagtattggcgggaaatgcgaaaactcgcggttaccgaactttttagccttaaaaaggttcaatcttataggtatataagaggggaagagatcgaatttatggtgaagaaattaatcagctttgaagcaatctcctgtggatctaccttcttctccctcaccgcaagcataatttttagagtagccttagggcggaatttccacgagagcggctccattatcgatcaggaggggattgaagaacttgttaccgcggctacaacagctataggaagttttactttctcggacttcttcccaagtggacttggaagattcttagattgcttgtttcgtacgcaaacaaatataaacaaagtctcggagaagcttgatgctttttaccagcatgtgattgatgatcacttgaagccatcaactttggattcctccggagatattgttgccttgatgttagatatgataaagaaaaaaggacataaagatgatttcaagctcaatgtggataacatcaaagcagtcctcatgaatatatttctcgcggggatagacacaggcgccataacaatgatttgggcgatgaccgagctcgttaaaaaacccttagtgatgaagagagctcaagaaaatatccgaggcgtcctcgggctcaaaagagatagaatcactgaagaagacctatgcaaatttgattgcttgaaacatattgtcaaggaaacattaagattacacccaccagttccatttttggtcccaagggaaacaatatctcacatcaagattcaaggctacgatattccaccaaaaacgcaaatccaagttaacgtattacattttagaggacaacactttgactttctaccgtttggttctggtcgaaggatctgtcccgcgatatcaatggcgattgctaccgtggagctaggactgatgaatttgcttgactttttcgattggagattgcctgatgggatgaaagttgaagacattgatatagaagaagctggtaatgtcacggtagtcaagaaactacttatttaccttgtgccccttcaacgtcattga

SEQ ID NO: 85172 - protein, 474 aa, Arabidopsis thaliana
  peptide (1)..(474): Ceres Seq. ID no. 12679197
  misc_feature (1)..(396): Homolog of NCBI NO: 13878395 NR Description: CYTOCHROME P450 71B27
  misc_feature (399)..(474): Homolog of NCBI NO: 13878395 NR Description: CYTOCHROME P450 71B27
  misc_feature (185)..(474): Homolog of NCBI NO: 25282611 NR Description: F3F19 hypothetical protein - Arabidopsis thaliana Strong similarity to gb|D78605 cytochrome P450 monooxygenase from
  misc_feature (1)..(158): Homolog of NCBI NO: 25282611 NR Description: F3F19 hypothetical protein - Arabidopsis thaliana Strong similarity to gb|D78605 cytochrome P450 monooxygenase from
  misc_feature (1)..(396): Homolog of NCBI NO: 15222174 NR Description: cytochrome p450 family; protein id: At1g13080.1, by cDNA: gi_3164139 [Arabidopsis thaliana]
  misc_feature (399)..(474): Homolog of NCBI NO: 15222174 NR Description: cytochrome p450 family; protein id: At1g13080.1, by cDNA: gi_3164139 [Arabidopsis thaliana]
  misc_feature (1)..(396): Homolog of NCBI NO: 15231520 NR Description: cytochrome p450 family; protein id: At3g26170.1, by cDNA: 262802. [Arabidopsis thaliana] Cytochrome P450 71B19 >gi|11994436|dbj|BAB02438.1| cytochrome
  misc_feature (399)..(472): Homolog of NCBI NO: 15231520 NR Description: cytochrome p450 family; protein id: At3g26170.1, by cDNA: 262802. [Arabidopsis thaliana] Cytochrome P450 71B19 >gi|11994436|dbj|BAB02438.1| cytochrome
  misc_feature (1)..(396): Homolog of NCBI NO: 21554748 NR Description: cytochrome P450, putative [Arabidopsis thaliana]
  misc_feature (399)..(472): Homolog of NCBI NO: 21554748 NR Description: cytochrome P450, putative [Arabidopsis thaliana]
MAILFCFFLVSLVTLVSSIFFKQIKNTKFNLPPSPPSLPIIGNLHHLTGLPHRCYHKLSIKYGPVILLHLGFVPVVVISLSEAAEAVLKTHDLECCSRPKTVGTGKLSYGFKDISFVPYSEYWREMRKLAVTELFSLKKVQSYRYIRGEEIEFMVKKLISFEAISCGSTFFSLTASIIFRVALGRNFHESGSIIDQEGIEELVTAATTAIGSFTFSDFFPSGLGRFLDCLFRTQTNINKVSEKLDAFYQHVIDDHLKPSTLDSSGDIVALMLDMIKKKGHKDDFKLNVDNIKAVLMNIFLAGIDTGAITMIWAMTELVKKPLVMKRAQENIRGVLGLKRDRITEEDLCKFDCLKHIVKETLRLHPPVPFLVPRETISHIKIQGYDIPPKTQIQVNVLHFRGQHFDFLPFGSGRRICPAISMAIATVELGLMNLLDFFDWRLPDGMKVEDIDIEEAGNVTVVKKLLIYLVPLQRH

SEQ ID NO: 85173 - protein, 349 aa, Arabidopsis thaliana
  peptide (1)..(349): Ceres Seq. ID no. 12679198
  misc_feature (1)..(271): Homolog of NCBI NO: 13878395 NR Description: CYTOCHROME P450 71B27
  misc_feature (274)..(349): Homolog of NCBI NO: 13878395 NR Description: CYTOCHROME P450 71B27
  misc_feature (60)..(349): Homolog of NCBI NO: 25282611 NR Description: F3F19 hypothetical protein - Arabidopsis thaliana Strong similarity to gb|D78605 cytochrome P450 monooxygenase from
  misc_feature (1)..(33): Homolog of NCBI NO: 25282611 NR Description: F3F19 hypothetical protein - Arabidopsis thaliana Strong similarity to gb|D78605 cytochrome P450 monooxygenase from
  misc_feature (1)..(271): Homolog of NCBI NO: 15222174 NR Description: cytochrome p450 family; protein id: At1g13080.1, by cDNA: gi_3164139 [Arabidopsis thaliana]
  misc_feature (274)..(349): Homolog of NCBI NO: 15222174 NR Description: cytochrome p450 family; protein id: At1g13080.1, by cDNA: gi_3164139 [Arabidopsis thaliana]
  misc_feature (1)..(271): Homolog of NCBI NO: 15231520 NR Description: cytochrome p450 family; protein id: At3g26170.1, by cDNA: 262802. [Arabidopsis thaliana] Cytochrome P450 71B19 >gi|11994436|dbj|BAB02438.1| cytochrome
  misc_feature (274)..(347): Homolog of NCBI NO: 15231520 NR Description: cytochrome p450 family; protein id: At3g26170.1, by cDNA: 262802. [Arabidopsis thaliana] Cytochrome P450 71B19 >gi|11994436|dbj|BAB02438.1| cytochrome
  misc_feature (1)..(271): Homolog of NCBI NO: 21554748 NR Description: cytochrome P450, putative [Arabidopsis thaliana]
  misc_feature (274)..(347): Homolog of NCBI NO: 21554748 NR Description: cytochrome P450, putative [Arabidopsis thaliana]
MRKLAVTELFSLKKVQSYRYIRGEEIEFMVKKLISFEAISCGSTFFSLTASIIFRVALGRNFHESGSIIDQEGIEELVTAATTAIGSFTFSDFFPSGLGRFLDCLFRTQTNINKVSEKLDAFYQHVIDDHLKPSTLDSSGDIVALMLDMIKKKGHKDDFKLNVDNIKAVLMNIFLAGIDTGAITMIWAMTELVKKPLVMKRAQENIRGVLGLKRDRITEEDLCKFDCLKHIVKETLRLHPPVPFLVPRETISHIKIQGYDIPPKTQIQVNVLHFRGQHFDFLPFGSGRRICPAISMAIATVELGLMNLLDFFDWRLPDGMKVEDIDIEEAGNVTVVKKLLIYLVPLQRH

SEQ ID NO: 85174 - protein, 321 aa, Arabidopsis thaliana
  peptide (1)..(321): Ceres Seq. ID no. 12679199
  misc_feature (1)..(243): Homolog of NCBI NO: 13878395 NR Description: CYTOCHROME P450 71B27
  misc_feature (246)..(321): Homolog of NCBI NO: 13878395 NR Description: CYTOCHROME P450 71B27
  misc_feature (32)..(321): Homolog of NCBI NO: 25282611 NR Description: F3F19 hypothetical protein - Arabidopsis thaliana Strong similarity to gb|D78605 cytochrome P450 monooxygenase from
  misc_feature (1)..(243): Homolog of NCBI NO: 15222174 NR Description: cytochrome p450 family; protein id: At1g13080.1, by cDNA: gi_3164139 [Arabidopsis thaliana]
  misc_feature (246)..(321): Homolog of NCBI NO: 15222174 NR Description: cytochrome p450 family; protein id: At1g13080.1, by cDNA: gi_3164139 [Arabidopsis thaliana]
  misc_feature (1)..(243): Homolog of NCBI NO: 15231520 NR Description: cytochrome p450 family; protein id: At3g26170.1, by cDNA: 262802. [Arabidopsis thaliana] Cytochrome P450 71B19 >gi|11994436|dbj|BAB02438.1| cytochrome
  misc_feature (246)..(319): Homolog of NCBI NO: 15231520 NR Description: cytochrome p450 family; protein id: At3g26170.1, by cDNA: 262802. [Arabidopsis thaliana] Cytochrome P450 71B19 >gi|11994436|dbj|BAB02438.1| cytochrome
  misc_feature (1)..(243): Homolog of NCBI NO: 21554748 NR Description: cytochrome P450, putative [Arabidopsis thaliana]
  misc_feature (246)..(319): Homolog of NCBI NO: 21554748 NR Description: cytochrome P450, putative [Arabidopsis thaliana]
  misc_feature (1)..(243): Homolog of NCBI NO: 15231522 NR Description: cytochrome p450 family; protein id: At3g26180.1, by cDNA: gi_15810462, supported by cDNA: gi_16226473 [Arabidopsis >gi|13878386|sp|Q9LTM3|C72K_ARATH Cytochrome P450 71B20
MVKKLISFEAISCGSTFFSLTASIIFRVALGRNFHESGSIIDQEGIEELVTAATTAIGSFTFSDFFPSGLGRFLDCLFRTQTNINKVSEKLDAFYQHVIDDHLKPSTLDSSGDIVALMLDMIKKKGHKDDFKLNVDNIKAVLMNIFLAGIDTGAITMIWAMTELVKKPLVMKRAQENIRGVLGLKRDRITEEDLCKFDCLKHIVKETLRLHPPVPFLVPRETISHIKIQGYDIPPKTQIQVNVLHFRGQHFDFLPFGSGRRICPAISMAIATVELGLMNLLDFFDWRLPDGMKVEDIDIEEAGNVTVVKKLLIYLVPLQRH

SEQ ID NO: 85175 - DNA, 1401 bp, Arabidopsis thaliana
  misc_feature (1)..(1401): Ceres Seq. ID no. 12679236
  misc_feature: MA Experiment ID: 108434 Result: Down-regulated in Transcription
  misc_feature: MA Experiment 108434 PARAMETER Experiment Name: At_Root_Tips_cDNA_P Parameter: Tissue Value: Root Tips
  misc_feature: MA Experiment ID: 108462 Result: Up-regulated in Transcription
  misc_feature: MA Experiment 108462 PARAMETER Experiment Name: At_Germinating_Seeds_cDNA_P Parameter: Age (day) Value: 2 vs. 0
  misc_feature: MA Experiment 108462 PARAMETER Experiment Name: At_Germinating_Seeds_cDNA_P Parameter: Tissue Value: Germinating Seeds
  misc_feature: MA Experiment ID: 108463 Result: Up-regulated in Transcription
  misc_feature: MA Experiment 108463 PARAMETER Experiment Name: At_Germinating_Seeds_cDNA_P Parameter: Age (day) Value: 3 vs. 0
  misc_feature: MA Experiment 108463 PARAMETER Experiment Name: At_Germinating_Seeds_cDNA_P Parameter: Tissue Value: Germinating Seeds
  misc_feature: MA Experiment ID: 108469 Result: Up-regulated in Transcription
  misc_feature: MA Experiment ID: 108488 Result: Down-regulated in Transcription
  misc_feature: MA Experiment ID: 108573 Result: Up-regulated in Transcription
  misc_feature: MA Experiment 108573 PARAMETER Experiment Name: At_Drought_cDNA_P Parameter: Timepoint (hr) Value: 6
  misc_feature: MA Experiment 108573 PARAMETER Experiment Name: At_Drought_cDNA_P Parameter: Tissue Value: Aerial
  misc_feature: MA Experiment 108573 PARAMETER Experiment Name: At_Drought_cDNA_P Parameter: Treatment Value: Drought vs. No Drought
  misc_feature: MA Experiment ID: 108576 Result: Up-regulated in Transcription
  misc_feature: MA Experiment 108576 PARAMETER Experiment Name: At_42deg_Heat_cDNA_P Parameter: Temperature (deg C) Value: 42 vs. 22
  misc_feature: MA Experiment 108576 PARAMETER Experiment Name: At_42deg_Heat_cDNA_P Parameter: Timepoint (hr) Value: 1
  misc_feature: MA Experiment 108576 PARAMETER Experiment Name: At_42deg_Heat_cDNA_P Parameter: Tissue Value: Aerial
  misc_feature: MA Experiment ID: 108585 Result: Up-regulated in Transcription
  misc_feature: MA Experiment 108585 PARAMETER Experiment Name: At_5mM_NaNP_cDNA_P Parameter: Timepoint (hr) Value: 6
  misc_feature: MA Experiment 108585 PARAMETER Experiment Name: At_5mM_NaNP_cDNA_P Parameter: Tissue Value: Aerial
  misc_feature: MA Experiment 108585 PARAMETER Experiment Name: At_5mM_NaNP_cDNA_P Parameter: Treatment Value: null
  misc_feature: MA Experiment ID: 108667 Result: Up-regulated in Transcription
  misc_feature: MA Experiment 108667 PARAMETER Experiment Name: At_2mM_SA_cDNA_P Parameter: Plant Line Value: WS
  misc_feature: MA Experiment 108667 PARAMETER Experiment Name: At_2mM_SA_cDNA_P Parameter: Timepoint (hr) Value: 1
  misc_feature: MA Experiment 108667 PARAMETER Experiment Name: At_2mM_SA_cDNA_P Parameter: Treatment Value: 2mM SA vs. No Treatment
  misc_feature: MA Experiment ID: 108668 Result: Up-regulated in Transcription
  misc_feature: MA Experiment 108668 PARAMETER Experiment Name: At_2mM_SA_cDNA_P Parameter: Plant Line Value: WS
  misc_feature: MA Experiment 108668 PARAMETER Experiment Name: At_2mM_SA_cDNA_P Parameter: Timepoint (hr) Value: 6
  misc_feature: MA Experiment 108668 PARAMETER Experiment Name: At_2mM_SA_cDNA_P Parameter: Treatment Value: 2mM SA vs. No Treatment
  misc_feature: MA Experiment ID: 20000087 Result: Down-regulated in Transcription
  misc_feature: MA Experiment 20000087 PARAMETER Experiment Name: At_100uM_ABA_Mutants_cDNA_P Parameter: Plant Line Value: WS
  misc_feature: MA Experiment 20000087 PARAMETER Experiment Name: At_100uM_ABA_Mutants_cDNA_P Parameter: Timepoint (hr) Value: 6
  misc_feature: MA Experiment 20000087 PARAMETER Experiment Name: At_100uM_ABA_Mutants_cDNA_P Parameter: Tissue Value: Aerial
  misc_feature: MA Experiment 20000087 PARAMETER Experiment Name: At_100uM_ABA_Mutants_cDNA_P Parameter: Treatment Value: 100uM ABA vs. No Treatment
  misc_feature: MA Experiment ID: 20000113 Result: Up-regulated in Transcription
  misc_feature: MA Experiment 20000113 PARAMETER Experiment Name: At_42deg_Heat_cDNA_P Parameter: Temperature (deg C) Value: 42 vs. 22
  misc_feature: MA Experiment 20000113 PARAMETER Experiment Name: At_42deg_Heat_cDNA_P Parameter: Timepoint (hr) Value: 8
  misc_feature: MA Experiment 20000113 PARAMETER Experiment Name: At_42deg_Heat_cDNA_P Parameter: Tissue Value: Aerial
  misc_feature: MA Experiment ID: 20000182 Result: Up-regulated in Transcription
  misc_feature: MA Experiment 20000182 PARAMETER Experiment Name: At_2mM_SA_P Parameter: Age (day) Value: 14
  misc_feature: MA Experiment 20000182 PARAMETER Experiment Name: At_2mM_SA_P Parameter: Organism Value: A. thaliana
  misc_feature: MA Experiment 20000182 PARAMETER Experiment Name: At_2mM_SA_P Parameter: Plant Line Value: WS
  misc_feature: MA Experiment 20000182 PARAMETER Experiment Name: At_2mM_SA_P Parameter: Timepoint (hr) Value: 6
  misc_feature: MA Experiment 20000182 PARAMETER Experiment Name: At_2mM_SA_P Parameter: Tissue Value: Aerial
  misc_feature: MA Experiment 20000182 PARAMETER Experiment Name: At_2mM_SA_P Parameter: Treatment Value: 2mM SA vs. No Treatment
  misc_feature: MA Experiment ID: 20000184 Result: Down-regulated in Transcription
  misc_feature: MA Experiment 20000184 PARAMETER Experiment Name: At_Shoots__P Parameter: Age (day) Value: 7
  misc_feature: MA Experiment 20000184 PARAMETER Experiment Name: At_Shoots__P Parameter: Tissue Value: Shoots vs. Whole Plant
  misc_feature: MA Experiment ID: 20000185 Result: Down-regulated in Transcription
  misc_feature: MA Experiment 20000185 PARAMETER Experiment Name: At_Roots__P Parameter: Age (day) Value: 7 vs. 21
  misc_feature: MA Experiment 20000185 PARAMETER Experiment Name: At_Roots__P Parameter: Organism Value: A. thaliana
  misc_feature: MA Experiment 20000185 PARAMETER Experiment Name: At_Roots__P Parameter: Tissue Value: Roots vs. Whole Plant
  misc_feature: MA Experiment ID: 20000234 Result: Down-regulated in Transcription
  misc_feature: MA Experiment 20000234 PARAMETER Experiment Name: At_Siliques_P Parameter: Age (day) Value: 21
  misc_feature: MA Experiment 20000234 PARAMETER Experiment Name: At_Siliques_P Parameter: Organism Value: A. thaliana
  misc_feature: MA Experiment 20000234 PARAMETER Experiment Name: At_Siliques_P Parameter: Plant Line Value: WS
  misc_feature: MA Experiment 20000234 PARAMETER Experiment Name: At_Siliques_P Parameter: Tissue Value: Less Than 5mm Siliques vs. Whole Plant
  misc_feature: MA Experiment ID: 20000235 Result: Down-regulated in Transcription
  misc_feature: MA Experiment 20000235 PARAMETER Experiment Name: At_Siliques_P Parameter: Age (day) Value: 21
  misc_feature: MA Experiment 20000235 PARAMETER Experiment Name: At_Siliques_P Parameter: Organism Value: A. thaliana
  misc_feature: MA Experiment 20000235 PARAMETER Experiment Name: At_Siliques_P Parameter: Plant Line Value: WS
  misc_feature: MA Experiment 20000235 PARAMETER Experiment Name: At_Siliques_P Parameter: Tissue Value: 5-10mm Siliques vs. Whole Plant
  misc_feature: MA Experiment ID: 20000264 Result: Down-regulated in Transcription
  misc_feature: MA Experiment 20000264 PARAMETER Experiment Name: At_Open_Flower_P Parameter: Age (day) Value: 21
  misc_feature: MA Experiment 20000264 PARAMETER Experiment Name: At_Open_Flower_P Parameter: Plant Line Value: WS
  misc_feature: MA Experiment 20000264 PARAMETER Experiment Name: At_Open_Flower_P Parameter: Tissue Value: Open Flower vs. Whole Plant
  misc_feature: MA Experiment ID: 20000265 Result: Down-regulated in Transcription
  misc_feature: MA Experiment 20000265 PARAMETER Experiment Name: At_Open_Flower_P Parameter: Age (day) Value: 21
  misc_feature: MA Experiment 20000265 PARAMETER Experiment Name: At_Open_Flower_P Parameter: Plant Line Value: WS
  misc_feature: MA Experiment 20000265 PARAMETER Experiment Name: At_Open_Flower_P Parameter: Tissue Value: Closed Flower vs. Whole Plant
  misc_feature: MA Experiment ID: 20000286 Result: Down-regulated in Transcription
  misc_feature: MA Experiment 20000286 PARAMETER Experiment Name: At_Open_Flower_P Parameter: Age (day) Value: 21
  misc_feature: MA Experiment 20000286 PARAMETER Experiment Name: At_Open_Flower_P Parameter: Plant Line Value: WS
  misc_feature: MA Experiment 20000286 PARAMETER Experiment Name: At_Open_Flower_P Parameter: Tissue Value: Half Open vs. Whole Plant
  misc_feature: MA Experiment ID: 20000437 Result: Up-regulated in Transcription
  misc_feature: MA Experiment 20000437 PARAMETER Experiment Name: At_Drought_P Parameter: Age (day) Value: 8
  misc_feature: MA Experiment 20000437 PARAMETER Experiment Name: At_Drought_P Parameter: Organism Value: A. thaliana
  misc_feature: MA Experiment 20000437 PARAMETER Experiment Name: At_Drought_P Parameter: Plant Line Value: WS
  misc_feature: MA Experiment 20000437 PARAMETER Experiment Name: At_Drought_P Parameter: Timepoint (hr) Value: 24
  misc_feature: MA Experiment 20000437 PARAMETER Experiment Name: At_Drought_P Parameter: Tissue Value: Whole Plant
  misc_feature: MA Experiment 20000437 PARAMETER Experiment Name: At_Drought_P Parameter: Treatment Value: Drought vs. No Drought
  misc_feature: MA Experiment ID: 20000438 Result: Down-regulated in Transcription
  misc_feature: MA Experiment 20000438 PARAMETER Experiment Name: At_Shoots__P Parameter: Age (day) Value: 14
  misc_feature: MA Experiment 20000438 PARAMETER Experiment Name: At_Shoots__P Parameter: Tissue Value: Shoots vs. Whole Plant
  misc_feature: MA Experiment ID: 20000453 Result: Up-regulated in Transcription
  misc_feature: MA Experiment 20000453 PARAMETER Experiment Name: At_100uM_ABA_P Parameter: Age (day) Value: 15
  misc_feature: MA Experiment 20000453 PARAMETER Experiment Name: At_100uM_ABA_P Parameter: Organism Value: A. thaliana
  misc_feature: MA Experiment 20000453 PARAMETER Experiment Name: At_100uM_ABA_P Parameter: Plant Line Value: WS
  misc_feature: MA Experiment 20000453 PARAMETER Experiment Name: At_100uM_ABA_P Parameter: Timepoint (hr) Value: 24
  misc_feature: MA Experiment 20000453 PARAMETER Experiment Name: At_100uM_ABA_P Parameter: Tissue Value: Aerial
  misc_feature: MA Experiment 20000453 PARAMETER Experiment Name: At_100uM_ABA_P Parameter: Treatment Value: 100uM ABA vs. No Treatment
  misc_feature: MA Experiment ID: 20000575 Result: Down-regulated in Transcription
  misc_feature: MA Experiment 20000575 PARAMETER Experiment Name: At_100uM_ABA_Mutants__P Parameter: Organism Value: A. thaliana
  misc_feature: MA Experiment 20000575 PARAMETER Experiment Name: At_100uM_ABA_Mutants__P Parameter: Plant Line Value: CS22
  misc_feature: MA Experiment 20000575 PARAMETER Experiment Name: At_100uM_ABA_Mutants__P Parameter: Timepoint (hr) Value: 6
  misc_feature: MA Experiment 20000575 PARAMETER Experiment Name: At_100uM_ABA_Mutants__P Parameter: Tissue Value: Whole Plant
  misc_feature: MA Experiment 20000575 PARAMETER Experiment Name: At_100uM_ABA_Mutants__P Parameter: Treatment Value: 1uM ABA vs. No Treatment
  misc_feature: MA Experiment ID: 20000576 Result: Down-regulated in Transcription
  misc_feature: MA Experiment 20000576 PARAMETER Experiment Name: At_100uM_ABA_Mutants__P Parameter: Organism Value: A. thaliana
  misc_feature: MA Experiment 20000576 PARAMETER Experiment Name: At_100uM_ABA_Mutants__P Parameter: Plant Line Value: CS23
  misc_feature: MA Experiment 20000576 PARAMETER Experiment Name: At_100uM_ABA_Mutants__P Parameter: Timepoint (hr) Value: 6
  misc_feature: MA Experiment 20000576 PARAMETER Experiment Name: At_100uM_ABA_Mutants__P Parameter: Tissue Value: Whole Plant
  misc_feature: MA Experiment 20000576 PARAMETER Experiment Name: At_100uM_ABA_Mutants__P Parameter: Treatment Value: 1uM ABA vs. No Treatment
  misc_feature: MA Experiment ID: 20000794 Result: Down-regulated in Transcription
  misc_feature: MA Experiment 20000794 PARAMETER Experiment Name: At_Petals_P Parameter: Age (day) Value: 23-25 days
  misc_feature: MA Experiment 20000794 PARAMETER Experiment Name: At_Petals_P Parameter: Plant Line Value: WS
  misc_feature: MA Experiment 20000794 PARAMETER Experiment Name: At_Petals_P Parameter: Tissue Value: Petals vs. Whole plant
  misc_feature: MA Experiment ID: 20001757 Result: Down-regulated in Transcription
  misc_feature: MA Experiment 20001757 PARAMETER Experiment Name: At_50mM_NH4NO3_L-to-H_P Parameter: Timepoint (hr) Value: 6
  misc_feature: MA Experiment 20001757 PARAMETER Experiment Name: At_50mM_NH4NO3_L-to-H_P Parameter: Tissue Value: Leaf
  misc_feature: MA Experiment 20001757 PARAMETER Experiment Name: At_50mM_NH4NO3_L-to-H_P Parameter: Treatment Value: 50mM NH4NO3 vs 100mM Mannitol
atggggaagaagcttgacgctttgcttggtcgcagtttcaagaccaacaagttcaagtctcttatcaccttagctctcacaaggctctctattctcaagaaccagcgtcaagccagactctctcaagccatctctgatgtcaccgagcttcttaagctcggccaacatgagcacgcttaccatagagtcgatcaagtcgtcaaagaccaaaacactctcgacgttctcttcttcatccatggctacttcactctctgtctcgatcgtattcacctctttgaacacaacagagattgtcctgaagagcttctagaagctgtttcgggtttgctatttgcagcttctagaatcggtgaattccctgagcttcaagagattcgtaatgttttgatttcgcgttttggcaaagatctcgcggctcggtctattgagttgcgcagtaattgtggggttgatcccaaaataattcagaagttgtcgacaagacctccaccgaaagaagttagaatgaaggctttgaaggagattgctgcagagaataacattgttctgaaactagaccaagcttctacgtccactgagggaacaacaaatatgcagggaacatcagatgttagtaagactaagctaacaagtaaagatggcagaggagaaggttatggtttatctgattcggtcaagagaggaaagaagaagtacaaagatgtggctgatgctgcacaagcagcgtttgagtcagcagctcatgcagcagaggctgcacaagcggctgtggagctttctcagttttctcctcgtggacatgacagtccgggtaacattggtggggaaaattcatttcatggttctgaaaacaaagagtcagaacaagaacaagaaggtaatgatgattcttcagaaggggaaggggatgtgatgtcagaatctaaaaggtcgatgtcagattcagaagatattattgatgtcccagtgatgtcattcagagaagaccctgtgaagctattggagaaggatactattatctacgatagtgaagaagaaacccaacctagtgttgagactattactattagtaagtctaaagatgagcaaaatcgtatggttggttcgaatagagcggatacaagacatgtggaccacatggttcgttcaattgaagatcctattatgcgtaaagcaggtttgaagggtccagtttcagtcaggacaagacaggttcgtggatactaagtacaaatgttataagtttttcaggtgcatctacggtgtaatcactcagttttgtacttttctatgttctttttgtggtcaaagatgtaagattattgtgttctttatggatataagctttcaatgatgttgtacagttgcatatgtgtgtgtttatacaagaaacgtttc

SEQ ID NO: 85176 - protein, 409 aa, Arabidopsis thaliana; identical to SEQ ID NO: 43156
  peptide (1)..(409): Ceres Seq. ID no. 12679237
  misc_feature (24)..(145): Pfam Name: Eukaryotic protein of unknown function, DUF292 Pfam Description: Eukaryotic protein of unknown function, DUF292
  misc_feature (1)..(409): Homolog of NCBI NO: 15222251 NR Description: hypothetical protein; protein id: At1g13340.1 thaliana] >gi|9958056|gb|AAG09545.1|AC011810_4 Unknown protein thaliana] >gi|26453048|dbj|BAC43600.1| unknown protein
  misc_feature (1)..(318): Homolog of NCBI NO: 13702817 NR Description: unknown protein [Oryza sativa]
  misc_feature (5)..(321): Homolog of NCBI NO: 15218545 NR Description: hypothetical protein; protein id: At1g34220.1
  misc_feature (10)..(194): Homolog of NCBI NO: 40253290 NR Description: unknown protein [Oryza sativa (japonica
  misc_feature (24)..(289): Homolog of NCBI NO: 15237108 NR Description: putative protein; protein id: At4g35730.1
  misc_feature (5)..(228): Homolog of NCBI NO: 18395668 NR Description: expressed protein; protein id: At1g25420.1, by cDNA: 7917., supported by cDNA: gi_20465253 [Arabidopsis
  misc_feature (5)..(228): Homolog of NCBI NO: 21595428 NR Description: unknown [Arabidopsis thaliana]
  misc_feature (4)..(182): Homolog of NCBI NO: 34910388 NR Description: P0692C11.15 [Oryza sativa (japonica
  misc_feature (8)..(304): Homolog of NCBI NO: 30688332 NR Description: expressed protein [Arabidopsis thaliana]
  misc_feature (24)..(183): Homolog of NCBI NO: 15224833 NR Description: hypothetical protein; protein id: At2g19710.1

SEQ ID NO: 85177 - protein, 240 aa, Arabidopsis thaliana; identical to SEQ ID NO: 43157
  peptide (1)..(240): Ceres Seq. ID no. 12679238
  misc_feature (1)..(240): Homolog of NCBI NO: 15222251 NR Description: hypothetical protein; protein id: At1g13340.1 thaliana] >gi|9958056|gb|AAG09545.1|AC011810_4 Unknown protein thaliana] >gi|26453048|dbj|BAC43600.1| unknown protein
  misc_feature (1)..(149): Homolog of NCBI NO: 13702817 NR Description: unknown protein [Oryza sativa]
  misc_feature (1)..(152): Homolog of NCBI NO: 15218545 NR Description: hypothetical protein; protein id: At1g34220.1
  misc_feature (1)..(25): Homolog of NCBI NO: 40253290 NR Description: unknown protein [Oryza sativa (japonica
  misc_feature (1)..(120): Homolog of NCBI NO: 15237108 NR Description: putative protein; protein id: At4g35730.1
  misc_feature (1)..(59): Homolog of NCBI NO: 18395668 NR Description: expressed protein; protein id: At1g25420.1, by cDNA: 7917., supported by cDNA: gi_20465253 [Arabidopsis
  misc_feature (1)..(59): Homolog of NCBI NO: 21595428 NR Description: unknown [Arabidopsis thaliana]
  misc_feature (1)..(13): Homolog of NCBI NO: 34910388 NR Description: P0692C11.15 [Oryza sativa (japonica
  misc_feature (1)..(135): Homolog of NCBI NO: 30688332 NR Description: expressed protein [Arabidopsis thaliana]
  misc_feature (1)..(14): Homolog of NCBI NO: 15224833 NR Description: hypothetical protein; protein id: At2g19710.1

SEQ ID NO: 85178 - protein, 211 aa, Arabidopsis thaliana; identical to SEQ ID NO: 43158
  peptide (1)..(211): Ceres Seq. ID no. 12679239
  misc_feature (1)..(211): Homolog of NCBI NO: 15222251 NR Description: hypothetical protein; protein id: At1g13340.1 thaliana] >gi|9958056|gb|AAG09545.1|AC011810_4 Unknown protein thaliana] >gi|26453048|dbj|BAC43600.1| unknown protein
  misc_feature (1)..(120): Homolog of NCBI NO: 13702817 NR Description: unknown protein [Oryza sativa]
  misc_feature (1)..(123): Homolog of NCBI NO: 15218545 NR Description: hypothetical protein; protein id: At1g34220.1
  misc_feature (1)..(91): Homolog of NCBI NO: 15237108 NR Description: putative protein; protein id: At4g35730.1
  misc_feature (1)..(30): Homolog of NCBI NO: 18395668 NR Description: expressed protein; protein id: At1g25420.1, by cDNA: 7917., supported by cDNA: gi_20465253 [Arabidopsis
  misc_feature (1)..(30): Homolog of NCBI NO: 21595428 NR Description: unknown [Arabidopsis thaliana]
  misc_feature (1)..(106): Homolog of NCBI NO: 30688332 NR Description: expressed protein [Arabidopsis thaliana]
  misc_feature (1)..(41): Homolog of NCBI NO: 15226014 NR Description: hypothetical protein; protein id: At2g14830.1
  misc_feature (1)..(106): Homolog of NCBI NO: 25407614 NR Description: hypothetical protein AT4g29440 [imported] - thaliana >gi|7269843|emb|CAB79702.1| putative protein
  misc_feature (1)..(23): Homolog of NCBI NO: 24660146 NR Description: Similar to RIKEN cDNA 2400003C14 gene [Mus >gi|26341222|dbj|BAC34273.1| unnamed protein product [Mus
